United States Patent Application Publication US 2021/0254056 A1 - sequence listing, part 23

SEQ ID NO: 46347 - DNA, 2690 bp, Homo sapiens
cggccacactgcagggggctgagggttgttgtttatatactttaaacttcaggaaattgagccacaaggaggccaggacttggccaaagtcacctgtaagtcactggcagtgctggggcaggttttcctgtctcccaggcctggtctaccccctggcctgtcccctatcccacttgatgacattcagtacatgggctaggagtgggtgggctggagaggggagcacatctgtctcctacctctgcagaaaccaccacaagggatcaggctgaaggcccatctagagcaggggttggtatcgaccttccccacagcctcctggctgggggtatcagtgagacccgagaggcactgtcattcccagcagggaactggttcctgctgcaaccttcccctctgatctcagatgttctcaggaaccctggctgtacctcctcagagagcgcagtgtgagcagggaagacccctgggccttcagtgcagcctgtggcacagcagtggaaactcccttgcccctggacttggacggattggcagcgattgtctaccaggtagccagcctgtgaaaaaaaaaagaaaacctggacttggctgctagggaaactgaggccctttctcttgggggtcagcctaggatgtagattaggtgacatctgcagggcctcctgctcctgagctgtgtggtctgcaattctgacacaggttggtgggaaggggcagaaggaggagggaggagcagtggcttctgcccctggagcttcagctggggctgggcagggtgggtttcgccgctgctcgggaaggcagtctgtggcttccccttggcactgatgctgacctcaaattcccaaggaagagtagggttctttatctgtttctgcctttgtgtgtggcctccagctctgtgggattgagctggggaaggcccctgtttttcccattcctcacgggcaagtcccaattaaatcattcaagttggcaggacctttctcagcccagaccttccttttgccacatgcaggcacttctgccgttggcatgggccctgcctttgatcaacgccctgggcctgttctgtttcctaagagccttgggcaagagtcagaagtccagggtctactccaggcgctcctggagcttgctgaggcctgagatgaactggggaagtgctctgaggcttggcttgtcaccctctgccacagccttgtcatgatgctcggaagacaaagtgaagacactcctttgtggagtcctccttccaagcattgccaccacgcagggtctgtcactgcctgcattattctcaggaccgacttccatgagtcaacttgggtgctgcatggcaggtgaggtgcctgctgccaaatatccttggctctctttagtgctttgaagggagacagttgtccctgtcttcagcccacatctcctcccacatccctacagctcagaccccttgcccagcatccttccctagggctccttggggaggcatagggggagtaagaataaagcagggaagagggtgagatgcctctagccagaagagctcaacttaaaggctgcctaactcctgccaccaccaggaagtggacagatggccccaggtctctgtgtcctcctgccctgtcgttgcatcatgtcctgaatgaagtaacgctgggcctcactccaggagactccagggctaatttctgctgatggggcgcagacaccgagctggttgttaaatgaggccctgggctgtctgtgccagtacagaccctgctccgcagccccacagggcctgagtgacagccagcctgtgctagcctgtgagacactccccagtcagaaaagagggtcactgacagcagggccgtgagtgggtttggcttccagagtggagacacaggacaataccagtgattctaagaccccaagacctcgctgatgccagacacaatgacagatgccacccatcaagccgaggcggataagggcatcataacttgtcacaacccgtcggcacatttttatttccggagagtctttgtatcttataaccgctttccacatgctaaatctgagttcattaacattacggaagatgcatctcttttaggactcacactcccattttagggaaggtggcagacgaaaccacaaatcaaacttgtaggggttcaaaataggaatagattagtcatggactatatcttatcaaagcctgctggcttcttatatccgcaaacagactggctgactgtggccattgtcagggctgttcacaacattctgtttttccctgtgagaatgtggtatgattgcagctgtgaaggtaagcgtggctcacgtgatttgcttttgccagcatcacgtgggtgggtgccatgtgttacttctgggtgggaacttcaagagatgttccccccattctctttccctggccatggtgatcttggaagcacatgctgaggtgtggcctctgtcagtagggtccctaagtgactgtacatactggatatatagcattatggaaataaatcttcactctatgaagtcactgagatttgggggtggcttgttatgcagcaggacctagtccatcctgcctgatgcactaactcacagccaggcacccagtatggagctcttaagttgaaagcaacttcactttgcctggcgtggtggctcacgcctgtaattcc

SEQ ID NO: 46348 - DNA, 4109 bp, Homo sapiens
tgtggcttaggagagcatctcttccctggagaaggcttggtttctagaatcacagagcaatacttcatattcctcagtcatagaaacttatttcggggctgattttatcctttgagagggttttttttttcttttttttttcttaacatttaaaatctcccaacatttctccagcttgaggaccaaatacgattttaatacagagattattagtttagaaacccttcagccactgacaaatgtacttagcagcaccaacaatgttctgatcttgctgtcaaggtgggagaaacatgggggcaagatgactcacgaagtcaagtgccactggaagggctgctctgggggaggcagaggctgcgagggcttctccctcttggccccctaatagatcctgacccctggacacgcagctcctcagccatggttagcaactgctttgacagcccctcccagccatgcttttctcctccggactttgcctcttgaagctgcacccaggattttggatattgctaaacacccagacctgcctacacatttcccagcctccaacaccctgccccacacctgctgccttcctctaagtaatatgatcagccaccacctgtcttgtgcaagagacctatgagccacagacgtaaggtgttgccagcggttagcatggcagttttatggttgcaagatggaacagctctttaaggtcaaaacacaataatgggatggagtgtgtgtgcgtgcatgtgtttgtatgtttgtgtgagtgtgtgtgaatgcttgtgcgtgtgtgggagtgtgtggctgagggagaatgcaggcaaggtttttccccaccagagggcagcagcacacacgttgaggccccaaatgcctgagagggattaactggaaactaaagccagcacccacctcctcacccagccactgggggacacattcttggaactgccctaggtttgcctggctttgcccagacctgtcccagagagcctcgatggcagctgaagttctgcctccaccaggcagatgtttttgaaaagctcagaagccatcattgaggttggattctccccataacgttctataacatctcttgccctcccctcccactgcttaaccagggtcaggggctgaaggggagggggtgggaatgggctgggggtggtggggcacttgagagcccatctgggcagagcaggatggggtctccagcgatctccaccccatctgtccatcccgcccaggctgtggcaccctggtgggtgggtgaggcctctcagctgccagctgggcctcccagccccggatgagttgcagtaactattattaaggtaacacactgcaactgcagcccgcgggccagcacgcgctgccaccctgcgcctccccagccagtgcacgtgctttcttccctgaaggacctgatgctcataaagtttattgctgttccctgtggctgctagtgaacaagagagcaaccatccgggtttctgcctgggaaggatttattcaggctctgtggagggcaggagaaagaaggagatgccgctggccagggggtgggcttggcctggcctgtgacccccggaagcagcagaggacagggagggccccagaggccacaggagcattgaggggcagggatgcagggaagtggcccaggaggggacaggagacctggttctgcctcaggctccctgagcctgcctctcggggcctcagcttccctatctgtactgagagctgtctgaccctgccatgttcttaccctcctatgggacaaccccccctttgattcagcaaggcaaagtggtggggaaaaatcaccatggtggggggtcggggggctggcagaggctctttctaattgaaagagatttaagagacctgctgacccaatgccttttgactggatccttttctaacaaaacattaacagacatgtagggccagctggggaaaggagactgcagacaggatgcagacgctcatgggtagttgttcatttgttagtggacagtgggttatgtgaggacctgctgaggactttgtgcaggggagaggcgtgctgtgatgtcagaacactctagctgtagcgtattcaatgaaacaaatacgacaaaactcgggccactgctgaaatcaggcgcaggatgtacaagtgtgcatgagatcattccctctatttgtatgcttgaagtttttcataataaaaggttaaaaaataaatgggtagctttttaaaaatgtagaaggcagagtccctccctatgggatcagaatttcaggggaaggggcctggcatggggggtttaaggcccccaaggcaagctcagttctcaggttcactagggtacctagaagagtcatgggtgggggccaagactccaccactgcccagggcatcagggaccaccgtttggtggagacatgtctcccacccccatgaccgccatcccgtggtctaccaccaccctgcaccaggccccaggcagctgctgtagatgctgatgtcatccagcctggtgccggcctcctgccccctcccgtggaaagctggggctgctgggctaggacatgctgttcctgtgcccaggggatgctgcccgcgtttcttggacaccggcctctgttaagggttaacgcagcccccggtacttgcccctccccccagcttcctctgtagtcccagtccaccctgaagtgagagggctccaggcacccctggaaggggaggggtggaattcccctgggagaagggagagggatgaaagaggaacagatgccagaattcctatacactgaactgtcccaacgccctaccccacccccgccacacacagatggacagacctccacgaagacgctggcacctccgtggggcagactcctggccagcctggaatggagacaagaccccagggtacagacaggccctgtgaacacgagaccctctctcccctcagtcaggccccgtcaaagaggctggccctgcccatccctgcctacaaggcagcactcaccagagcttcctccgagatcgtggggagtgtatggaaggcagggcccaggaatcttgtctctcagtgcccaccatgtacaggcatcaggcaatggcccgtcccagcgtggagcatttgctgttcaccagagccctggtgcgggaggtctgcccgggagggccgggctgccgtggcctggggagggaagggtcacctgaccctctggggaagggctggtggggactggcatgtccagctgtcagctgggtgttctgctgctctggggcagggccagaggggctggaagggaggggacaaagaggaggagagagaagaggggaggaggaaaggaggactggtctgaggcaggggagagttcagctcagctgcccacgtagatgtcaggacctgggcaccaagggcccatcaccccaaggccctggttattttttgattcctaattcaaaaggaaaggggtgagtctcgggttggggggttcatgctctcccttctgctgggcttcttgccccatcctctctgcaagaacctcactgcagcttaccccatactgtggctgccagagaaggaaagtcaggcggcaagacgttccatcagtcaacagtcagttagactgaggacaatcaggccatcaacaagcattttttgagaccccctgctagggctgaccaagcacccccagtgtcaggggattacagctggggggctcagcaagtcagagggcaactccaggataagtgtctggtgagagaatagaggactttgcagagagtgaggagggcatcctggaggagctgaccggctgagagctgaaggagaaacagggtcatttggttgagtgggggagggtggtgagaagggggctctagctacaggagaggctgtgcagaggcccagaggcccagaggcccagaggcaggtgggagcagggtcagggaggtggaagctgcagggagtgggactggggagagatggggcagggacgaggtggcctcaccagcctctgtcctcagcctctgggaggaactgaggtgctttatgccaggaagagtcggctcaggcttgtgtttaaaactctcaaaggtgggc

SEQ ID NO: 46349 - DNA, 1443 bp, Homo sapiens
cccaccatgtggtcatggatgacttcagtagctcctcatgttctcccacatctctttacaagcctgctcctacaagccattctccccagagtgatgtttagaaacaattcaagtcacgtcactttgctgcttaatactcttcagtggctccatccttagaataaagtccaaatttcacccccagcgttcagcccctgcccacctcctcagccccacctcacacctggttaactcctcttcatccttcagatgccagctccagctccagtgtcaccacctccaggaagccctccccgccctttctgacacagtccaccacctcgtccctttttttagaagtgcttatgccagctgtagttgcatatttatgtgtgtgacttgctccttgcctgtctctcttccttggggatggtgacttggctcagtttgctcaacgctatgtcctcagcatgtaacccagcgccagccttccagtacttgtttggtgaatgaatgaatgagtggataaacacgtggacacattctgggtctctggctttccctcctgggctcgccatgctctggcttgcacaacagcggtttcctttcctctccctgaccccagttaatgggggcctttggctcggttgctgtggctctgtggcatcatccctcctcaacagctgcccctgtccctgctcccatgacccagtgttcctgccctagagacaacaacctccacctcattctaggacatgtcatcaccccttcccacagtgtaaacatgggtggcggctacagacctgcccaggttccagtaaagcccctcctcccatgctgggctcccctctcgctgcaccccagcttggcatagcaccttccccttccttctcctccccgccgccccactccctagaaagtgcaggatggagcatgccctgagagaggtcactgtccagccctttgcagcaagggggggccttgtggctaggcggcttgtggcttccctatcatcacatccctgctggcctgacctggcccctagctcccagccccacctgggagcttccagcctgggtgttggatccagttcaggtcgttgcatcagagcctgccctgtcgggctccccaacagctgaagatactggggtagaagggccggcccagaccactacagccgggaatgtgggaggatgagctgttgagccacagattgcaaaatctgggaggtgataaactctctctggaaggcagatggccccactgactgggaagcaagggtgttaccacttaggtcctcagggacagacaacctctgcaggccgtgtgtgtgtgtgtgtgtgtgtgtgtgtgtgtgtgtttggccccgggaatgggaggtgtgaggggagccaccatgcccaccctatggccatgatcagtagaagcaggttaggggcagagggccggccctgccctgagctc

SEQ ID NO: 46350 - DNA, 1913 bp, Homo sapiens
ccgttagccagagctgtgtagcccacaaaggaagtcctgggagcccccgcctgctctctcgatgggcctctgccattcttcttcaccacgagactacgcatcctcttctctcctttgacaaacctacttgtaggtgagactctgagaggtttgcatttttaaaaaggacaaagtgttaagctaaaggaatgaatctttaacggtgggatttcaggcctcttcctcttaggggaggttttatttgttttggctctggcttggttttggcagggaacctcccctgtgtccctggagccaccctgaagccctaagatccctcctggaactgtcagctgggtcactctcccctttcgacagagcatttcctggggtgggagtcgaggtgggggacatcagcttccttaagctccaaagtagcccacctgccagggacccatgccctctctgctgagccttcagcccgtccccttctctcctgcctgccctgctctgatacagcctcccccaggggaggccaggaaagatccacccccactcctgaggggccggggctggccaggccgcagtgggcagagggcatcccagccacctctgcatctgactccacagctgtgagacagtgccagctcttacctggacttagcccacctcagtcgctggggatgcagctgctctctctgaatgggagcctccaagagtcagatgcagcaataagcccctcatcttctgctggggcccccagtagtaggctctgggggctttgtgcaccagggcaggctgcagggatgtatcaggctctcccctcctctccagagtgggggacagtttcatactctgcctgtcaccttctctccagggcagccttgtctcaggccccatgctctgcaggcctgcagggccaaagagggagaagcctgggtgtctctgtctggccgagccagctgggatgagggtctggggacagggttgcatccctggccttcccagggcccagtctcctcatcctcagtctcctggccccaggagacccccagtggagctgagagggctcagtgctggggatggggctcgacggaccctggcagcctgctgtgtggcactcagaaggggaagaagatctcagccctagcacagagggctgggaggctcaggcacagagagcctggtcagcaggccccatgttggccacacgagtgacccttctgggggcctgaacccagagctctgtctcctgggacgccagcaaccctgcttcagccccacagcctgcccggagcccttgtgtgttcagcctggggctcctcactggaggcctcagagctcccctctcccgtggccccagcccagcctggctgctgtccttgccctggcctgacccctgcatgacacttgtgagaagctgtcagcctgggcttagggccagtgactggggactctgccctgaagcaaggcagcctgaccccggtgtcactcctgtccccagaactggtagggaggttggccttcctcccctcctgctgcactgctgacccctgctggctaccctcgcacaccctccccacacaggcatttctccacaaggatctgctgcttgaatgctcccagcacagggggctcagcaccttgcacagcctgctccagtgagagacacttctgcctctctgaaaagttctttatcattagctgaagtctgaatattagttacttctatctgttattcttagttatactgtctgtagtcacatgttttcataataacaataacaacaacagatactgtctgtgtgccaggcgctgtccactatgtcatttaatccattcaacagctgtgagattggtgcctgtgtcattcccattatacagatgggaacgtgaggcccagagaaagcgtgtcgtctaaggccacccagcca

SEQ ID NO: 46351 - DNA, 2544 bp, Homo sapiens
ctcccaaacatccatctgccacaccagctaagacatactttagctttttcctgtattttggcagttcctgctaggcatgaaaggatgtggccttggctggaagctgggaacagtattagtcacattcgtgctttgtaaagagtattaaaagttggtgaactacagtggccctttatacctaaatgtataatgaaatgatctctatgtttcctttcagaaaacacacaatcctcagctattccggatacatactgtatcctgcagacctctcattggcatatctaaccatgtaacttaaatgtggccagaaggatggctgtgagcatccttgagtcgtagtctctctcttaacacactccatgagggtgctacaagcaatgataagggcctccagttgcgatcagtttaacctgtctggcaagcaaggctggtagattctcctgttgacaaagcggcggccctgtgattcaaagaagtggagagtggactttttggtgctacaaaggtgggacccccaaccagatcctatctgtgggccactgaaatctggagtgccttcaaacaggcactaaatgtgtaagccagaggtcaaaagggaagaacccaaacggatggggtgaatctgttagaggggggtgtggcttcctctccagggagaaaaccagaggttggaggagcagtgactacagcttgtgattgaaagggagacgttagaagggagggctggggcagaaaaggagaacaggagaaagtgaaggcagaaattattgcagatgcaggagccttggccctctcttcccacagctggaagaaggcaggcctggaaatgagaagacagtcagaggcagctgacaaggccggaagtgcgcggcctggcgccgacaggaacggggggtcctccggcggacacacgcgcgcccagggccctcccctgcgccggcccaggacgtactgttgtcctccgcctcctgcggcgctgagggcttgcccatcttcacccaaaggatgcccaggaagacgagcagtagccctaggctggcccagagcagaagccgagagagccagcgctccagccggcgccccacctcaggccgggccctcgccgcgccagcagggcccgctcgagtcgcccgcaggcccgggcgcgggtcgggaccgaggagggaggaaggcagccgcgccggggcgggagacgctgcccaccagcggcgggccgcgagacccgggccctgcgtggccctgtcgggcgtccgggcgtcctcgtcctcctcggagctgccccggaccgaggcgcggcgcctgagttgcgccgggcgggcaggataggcgaggccgcggctccctacccaggaagccgcggagggccggatatcaccgtaggccccaggggtcgcgtaggccgagcccgaggccggctgggagagccagggctccgcccgcggagaggccgcggcgggccgggcgcgcagcggcgcatcctcgcgtaaccgggcctcttcccgtaaccgctcctcgccccgcggccgggcctcctcccgcagccgctcctcgtcgcgcagccgggcctcgccccgcaggcggcgcagcttgttgcggtagacatcccgggtggtgtcggtgatgggtcctggctggaagcccagggcctgcagctcccgccgcagttccaggtccgacaggccggccatggccaggacgccgccccccgcccgcccctggcgcgcaccgcacccggaactgctccctcccgcaggcgcggcggagcgggcggggccacgcgccatgatgggaaggtcggtcgccatgttgggaaggtctgcacttggcctttggtcggccatgatgaggcggtctgacgtggctcttagagccgccatggtgggaaggtccaagggggattaaattttttgttttgttttgttttgttttgtttttctctctctctccgctctcccacttccctttgtttgttagatcaagcggtattaatctctgagtcctccaaccctagctctgcctctggcaggtggtaagcgttcagtaaagtcagcgttgatttaatagatgaattgcttaatggtgaacgaagccactgccacgaatggagagacaggatgatttgcctctctgggcttggggactgatgtgtgatccggttttatttgggtcttagagtacactccaggcatgctccaagaccctgtcccgacttcgggcttgttaactgggcgacactgagcaccaagtaggtgcgatccctgccttaggacagacactggcccccaaggagcgccagcctggaggagacgcagcatccatggtggaggcagaggagcaaaatgcccttgggttcgaatgggcagttgaggcttctctgcggagggcctgtgtctgcgtaatgggatttttacaaggagacatgggagagagaagactccagagatacacggtcttgcagcctcactggtggtttaggttgtgggctttggagccagacagttcgatttcaaatccctactcacaactattagatgtgtgatcata

SEQ ID NO: 46352 - DNA, 822 bp, Homo sapiens
caaaaatgaaatcgggagcacagaggtctgcagagagggcccccctacacacacacacccctcccatgcagaggggagctttctcccttcctgatgcttccgcatttggggtcctgggccacaggtaaccttgtgtgacatgataacatataggaatgttaattcatattccacggctcctctccatccccaaccttggccgcttccgttcagtagtcagcaggacagctcagctgtagtctcaaggaagagatgactcagcataaagagagagacagcagtctgtgcttgggttctgagtttccaaacccaggcctcaaggggaaacggaaatgactcatgtggataaacagtttggtagcttgggggcatgtgggatgacagagagcaagtgtggcatcttcctcccctcttccacgcacacacagaggtttctggatccagagttaagggagaggcaggggaaagtaagcagggtctggatagtttggcctctcagaaagatgagtcctgaggttacctgggacctttcagcttggctcactctgctacctcattgggttgctcaaggtcccaattccaaattccttgcatctaattggcatagctcatctttttcaggcaggtcccaagtcagaggtcagggccaggctatgaggagatagtctggctcacgtgaccgcctctggcctaatcagctgtggccaggagctgcgtcacatggactgaggaatggggtgtctgaggctgggcagggcaaaggcagggagagggttctcctagaacgggaacagctcctggcacggagagacagtacctcaa

SEQ ID NO: 46353 - DNA, 2156 bp, Homo sapiens
ttcaggttgtcttctactcaaggcagcaggtccaaacttttgtcatgataaagagtcagatcactgagctctgccaaaaatacctggtttggtagggtctcggctcctgctggctccctggcggatacagtccttctctccagtgtcgtttctcaacctcttaaatccaggtttcctctccgtaaatggaaaaacctcatgctctgccagcaattctaatgcacctttcaggcactttgggaagcgcacctcacctaggatgactcgcgccctggaggctcgggaaggacaggctgtttgctctgcagcccatctgccaaggttttgccgagctctacattgggtagcttgtattgcgaaaacacttgttggcttatttcctaaatgcaaaattctaatatgctttgattcaaaaggaaactccctgagattctgaggcccttctgagacctctaggtagaatggctggataggaggcctgaattctgggagaagggtgggaccagggatgggagaggtgtgagagtttcccacattctgtcttaagagaaaagccccagaaggaaagagattaacccagaattttggagaaagttgtcattaagaggcaggtggagggactggttaaaaaagggtgaaaaagtggtggggtcgggtgtagaaagagagcaattaggaaaagtggcactccaggaagttaagggacaagtctcaacagagagcatgggtgacaatgtcaaatgccacctaaatattatgtgctggaggcctgagcagtgtcctgtggatttagcaaggctgctggtgagctcagcacaagctgctgctgtggggtgagtggagggcgcattggtgccaccaggagggaaggaaggagtggcccactagcagccttagtggaagatgccctagagaggagaggggttgaggatttctggatcgagggagaagactgcagggctcaaatcctggagaggctggggaggagggtccagggccagaccttgggagagaggaggccctgtcaactggcacatgggaaggtcaggaggcaggcgaaggccgctgggctctgggccctactgtcctcagtgaaatagctgctgaggatattttctgagtgtctggctagtggttgcaaaaagcccagaggaggttgcaagaggtgaggcagctgatcaaagcaagtggaagggtaggccccgaggcccagctggagagggaggcagaggttcctggcgctgtggctgtgcagaagcagctttcctgcagcctgagtgcctgtggagctggggtgggaaggcagagcggacactagcctgggttggggattgtaaggaggctgagctgagctgtagggacaaaggcccagcgatgtggatgctggtgagagtagctccaagaagtgaaagaaggaagggaagcctggatgttgagaacccagagagactctggagccctccatgaggttggaaaatgggaacttttttctttttttttttttttacaatgactatttgattatctttgtagtcagaaaaaaaaagttgaaaagtcaaactgcctgaatgcccgttaacagtataatggataaataaattgtgtatttctacaatggaatacaactgcatgatacagcttccaaacctaactgtcccacataaaagggctaaatattattagcaatcatttgtgtaaggttcaaaaaacaggcaaacgtaatctgtggggttagattccaggttaatgattatgtttggggagggaggtcacaggaaagtccagggagggaggctggtactattctgattgctgacctagatgttagtcacatgggtctagtcagtcgttgaaatgcactggcctggaaatttatgacacgtgtgtgcatttttctgtgtgtttgttctacttgcatcaaaaattgacttaaaaccaaaaagactaacatgaagcaattccactggggttcgaggccagtcacttctgcagtcacctgtaatagatgttggtccaccctgtggtcagccagaaacagcaactgtcaaagtggtggtgatccttcctgtcccctgctcaggggaaagagcctccgcctctgtcccggtcccctgccctccatccagatggtcaaccacaccgtaaacatgaaaggc

SEQ ID NO: 46354 - DNA, 842 bp, Homo sapiens
tgtggacgctgggcggcctcctgagctccaggagggtccttcgtcccaacctgcctcactgggtgtttccttcccagccttcccggctcgccgcaggcctcagaggaccctcaaagccttggttttccctccctcggaagacaggaaacggggttgggagtttgtcgcagtatcgcagcccaagagcccaaattgtcccaagcccagtccacccgcgccctccagcagctccgctgaataggcgcggcgaagcgggccacgaccgcgagggggcgccaggcagccacgcgagactcccagggtcaggcccacgcgggccaccagccgcactactcttccgcttcccaagtcggcacacacggcgcccgtgcctccacgctgctgactgctgcaagtcgaatccctctcaactcctgtccgcacgggaaccccagtttacaggggagccggctgcctggcatcccggtgcggccacagaggcgtccttgtggaaggagcctggggaccgctgcggcccatcaagtgtgctgcacgccctccgtgcgcggcccgtcggagtgcaccttgcgcctcctgcattgtgaaagggagcggggagaacggaacatggacccaaagacactggcactggcagagctccgcctggggccgatgccttaggcagtacagtactggtcatcttgattggggtgcacctatggcctgccgttgtatgtgtggagaaaccaaaacctggagggattttctgccctgcccaggctgcacagctcaccagtggtggggctggcattggagctcccggtccacacctgggctcctccatcccatggaaaggcagaggt

SEQ ID NO: 46355 - DNA, 1349 bp, Homo sapiens
gagcaggccagcaccccatgctcccggtctccctcctttctcctccctcccctcactgctcagctctcccaccctcccaccttctgtctgccttagctgggcctcccctggcctcctctcaagaaggctgtggcccctttcctctgtgtgcttccccactttgtctctcccttttttctcagtcttcttgtctccctcactcagtcgctgtcttcatttccctcagtctttccctatagcaggctcacaagggtgcatcctcctaaggctcagtttctttgccattcccgagctccgccccctctgcccgccgtggccccgcccctgccgggccgccctcccctgcgctgggcggcgggccgggtggcaggcgggggcggggcccgggctggcgcggcgccggcctgagtcacacgcatgaggcagcgtgagtcaggcgcggagggaagtccctgcggaaggggctttcggagctgcagtcgaatcgcagggaaagagaaagtgttcgaaacgctgctttgacacagtgaccttgtgtgagccctagctgcacacaccccccccacccacgccctccccgcagacagcagcacgcacacccccggccggctcacggtacgcggccgctgcccgcactcccgggtcgggcctgcgcgtccctgtggggttgggcgagcggggtatcgagggtccagcagcctggacccggcccctccacagggcagtcccttttccagcttccaaaagctagcgttgctcacctactgccagaccccagacccacttctcccacgaggtgtaaagaaggacccctgagggtcttccacgtcaccttgtggagcctcgtggagtatggcagaaggaggagggcaatttgaggtcctgcagcgcccgggggaaccagggatgaactccctcctgcccccaggctctcctcctcatcctagaatcaatcgatgggattcagttacagaaatatttattaaacaccgactatatgccaagttataaaaacctgggacaagatggtaaacaaagcaggacagtaaacaaaatatattaacccctgcctttcaggaactggcattctagttaggtgagggagatgataaacaaaaaataagcaaatgatctaggctagtgctgcccgatagaaatagaagggaagccatgaatgtaatgtttaattttgtagtaaccatgttaagatggtaaaaagaaacacatgaaattaactttaatttttttttttgagaccgagtttcgctcttgttgcccaggctggaatacaatgatgtcgactcaccacaacctctgcctcctgaattcaagcaattcccctgcctcag

SEQ ID NO: 46356 - DNA, 3485 bp, Homo sapiens
ggcctactaagcgcgcgctccgggcccagggcacaaagatggagggagcggcgcgatccacccgccccacccccacccaccagacaaaggggcaggccgcccctcccccagccttcttcgcgggccccgccgccctctgctcccctcccctcgggccgccctttggtgacttcctttcccctccaagggcggccccgggacttctcaggaactgcgtttcacctggacgtggggcggggagccggcgcgcagagggcggcctccgggcccacccctaggccgagccggccccaggcccgcgccctcccctttgaacccgcgctcccggcccctggcgccttcccgcccaggcgcccccgcccccacccggtcaagcacgtgctgcccgggccccgagcgcttcccgccgcacgggtgggggctgggcccaccccccgcccgctccccacccccaccggaaacattcctgccacattcctgcaactgcaaggcccagcccgccgctccccaccccgcctccgcgccgggcccagggctttcctgcgtcccctccaccgccggctcgccccctgaggagggggctgggccagggcctcggctgaccggggaggaagaaggggagcagagaaaaacatgagtcacagccgtgtgtcactggagcgcatttcaattccctgcatcacaggaggtgtggaaggccgcctcggggaccgggcgcgggaggtgcgcccgagaaggccccgggccggcctgcagggcgcgccgctccgcctgcgccctttcctcccccaccgccctccccgccatcttcccctttggcttccttctcgctcggtgcaacaagtctttgttaagccgggcgccgggcgggccaggcgtggcggagatggcctgcgtgctcggcccctgccctcaaagcgcttccaggcgacctctggcccaccttttatttttatttacagtcccaacggaagggcccaggtccccaagtgggcctgcgtatctccagaacaccatctaagtcacctcaaggtatgaagcctcccttgggtgtacctgccaacgagccaatcgttggtttcgctggaaggctccaccttgatcatggctcgctggtggccattaataaaacactttggatttcacaagtttcacgtttgaatttcacaagacttgtatctcaccaatcagccacacgcgggttgacactgaaaggcacatgctgacacctgtccgcccaggggaaatctaccatctctctattttagttagggggcggcgtgtaggccgcggaattctctaacgagcgcgtttctcttcaccccctgggcccgcgtggacccccgtccacccccacacgccctggggggggggccgggcccacacgccctggaagcccctagaggtgactctccctgggacccctgtaccagggaggaaggataccgccacccgtcaccaccccccgccagaagctccttcgtgactcctctgcgcgtgccttcccacacctcctccgtccgggactgcgaggagtgggcggtcgactcgagttcgcagcccaggcctcccacacgcccctccctgccgtcagcacccacccgcgcggcagcggcggcggcggctggcgggcggccgcccttttaaatccccgggctcatttgcatggccccgccccctgagtgacacggctggcgcgggcgggcccgtcccccctgcccctgggtcgctctttttaagctcccctgagccggtgctgcgctcctctaattgggactccgagccggggctatttctggcgctggcgcggctccaagaaggcgtgagttcgcggccgctccggtggcttcttttttttatatctataatttaattaaattatttatttattgaggccgcgcacgggccgtgcccagcttcctgcccctcgccatccttcgggggagggggaatatttttgtccccccgcctggctgtgacacataaataccccgcgggggcctgggcggcgagcacgcggcggcggcggtctctgagcgcctctgctctctcccggtttcagatccgcatttgctaccagcggcggccgcggcggagccaggccggtcctcagcgcccagcaccgccgctcccggcaacccggagcgcgcaccgcaggccggcggccgagctcgcggtgagtcgtccccggggcccgcggcggcggcggcggaggggggcgcccgcgcccccgcccgcacgtcgcccctcctgcgagccgcccggggctgcagcgcgcgccgccggctttattcccaggccggggcggcgcgagccggcggcgggggagggccgcgcggcgcgggggcgggcggcggggcccggcggcgcggggaggacgcccgcaccccttcccccgcgccgcgggcgccctgcggggggcggggacccgggaaaggcgcgcggtgggggagggggcgcgcagctgcggcgagcgcgagttgtgcacccggcggagcccggaggagcccggcgcacctcgcgcggcggccgctcccgctggagccggagcccgagcccgagcccgggcccgggtgaggggcggggagagacacgggctgcggcgcggcaggagagtggggggtcgggcgccccccgcagctcagggaagttctggaagtgagggagatggggaggaacccccaaattcggccctacgccctctcggcctttctctcgcgccccctccgcagatgaggccggagcgcgggcctgggtttggggcttcaccccgaccccacctctggcctggcccgcgcctcttcagccccaggggccgggcctgccctccgcccccacaaactggtttcgctgctttgctgggctctgttggaactagtccctttgactccccgtttctattttattttcttctggggctttattttgcggggaggggacggagggagggggctttcttcctctcccccgcgcccgcgcgcgccaggtttcctgccccaaggcgggcttgggtgccccctctggcaggaagtggggccgggtgcacccgcgtggcggtgcatgcggtcggggtgcgctgctttcccgcgcctgcaggagcggcctgcgcccctccccccgcgcgccctggccccgggtcccgccggccggcctgcaacggccgggcgcagacacttgcagagtcaccctcgggccgggtctggagcctgatgcctcgggggtttagccctagccgctaggcgggtaggcaaagtgtcgggttgaaagggtctccgggaacctacttcttcctgctcgccaacttgctgtgtgaccttaggcaactcaaggcttctctgggctacttttttacgggggacggggaagaaaacaagggaacccccaagataatttcctagggcctttcctgcagagtccttaagtatttgaggagcacagtttgcatgcacagtgtatggaggagacaggcttgaggcccaagcggg

SEQ ID NO: 46357 - DNA, 2415 bp, Homo sapiens
ggaggcactttgcaaagatgctcaaactggagctttggatcctgaagggattcctaggtcagggatggtttgtggttcttggttcttgctgacttaaccttgttgaggaggcagagggctgtgtcttctgagggggtggaaacaggtgatgactgtccctgactaccccctctgtctttacagaaggagcccagcgaagtgccaacacctaagagacctcggggccgaccaaagggaagcaaaaacaagggtgctgccaagacccgggtgagacttgagatgggactacccctgggtggatgactagcagaggatcctcttgttggcaccatggccacggctgtggggaggtctgggaaggggctcagtcatctcagttgtgtacccccttccctggtacagggatggcagtgagtctttgctaactggggagagtggggcgatgactaaggtcttacttctggggggttggtcctgcccaggacactgcggagatcaggtcagaagtcccacagctttcctgatctagagaagggcagagtggggagaatggagggtccctgccagtccctgggctgagaatgttaccttctcttggggttccctggagcctgaaggggtggggacaggcagcaaaggccagattcacagtgacattagcctttcagaaaagttgttttgttttttattttattttttctaagacacgactcatatcctctgagtcatgggcggaggtgggagtagggggcgtgtgtgtatgtcgagggggcaaatgtggctggccagtcattgccagctggacttgggtgggcctgttgggtgagagtgttgggtcaccctgaacaggcaggtaggtctgccccccatcactattgggcatcgggtgagcactgatgagcattttggacttaggagatattttctctaaccctctagaaaaccaccacaactccaggaaggaaaccaaggggcagacccaaaaaactggtaggtgaagaagcagactgctgcttgcctcctgggctcttttgagttgagggtgttgagtacacagtacctgatgctatgcaccccctatggaaaggctctccttgacctgctgggacatcagattttacagaagtccagagaggggaaggtacctggcctgggctgtgcccatgagaagtgaggggtcccaggtataaatcagaccacatccccctgccctgccctgccctagttgtgtgtgggggtccctccctctcctgctcctagaatactcagaacttctaggggagatcttggaagtcatctagcctgtgtccccctcaattagagatgaggaaaggaagccatagggggaaggtttgtccttcctatgagcctctgcagaagagaaacagcgaaggagctgggccctgggaggggtcggtgctggagttctgatgtgacccaccacactgcactggagggcaccatccaattctgggtccccaaacagctggtggaaaggctcggtgggctgagtcaagaagctgcctctagggggccactgcagttagggtcaccccagccttccagctcctggccctctcctacccccagcctgccccctcaaatccctgaagctgtcattccttgagctgagccactgctggggtgggggggttagggggtgctgctggccaggccccaagagtgagtaacaggaaacaagttgttttggagtttgtgcctggcacgggggctgtagccccgtgtggtgtcccgacattcccgcccagtgagtgagccccggcggcacacacttccccttcctccccaccccggcctagggtcagccctcggccaccccggagggccagggcaccacagcacagcatctgcccctgtgggccaaggacctggttcccctgcacccaccagcgggctcttgcaccttccagccaccccttcccatttcctcccccagccacctcttcccccacctcctcttctcccctagggagtcagtcacatcctgaagctcattgctgccctgagctctgccctcctgccctccctgggcctgggggccaagggggcttggctcctggctctgggtgagagcagcatgtgtgtggggttttttcctccttttaaattctttttatgaatgaagccgggccgtggaggttgctgagtcacccacacactcagccctgactcatccctcttcaggagagccagggagtgcagggagcgggtggggccagcctctgggggtggaagagggggaccgggccagagctcacaccaacaactgcccacctcacaggagaaggaggaagaggagggcatctcgcaggagtcctcggaggaggagcagtgacccatgcgtgccgcctgctcctcactggaggagcagcttccttctgggactggacagct

SEQ ID NO: 46358 - DNA, 2752 bp, Homo sapiens
tgggagtctgcagcacccagttacagcccaagtaagcagaaccaggctctggtttcagtgtggacgagtatggctgggaacagggctgactcccaccttgcctcattctccccctggcccccaagtgctcaccttggggtctcccatgtcagagagcagctcctgctcagcctcatgcagttcctcagctgggtcatagctgtacatggggagcaggtgatggcgcagccggtccaccctggggagcaggggaggggactcagctaggaggtccccccaaccctcatcaaacacctggctgcctcgtctcctccctttcccaggcaggggcaattccagtgggtgccttttgggacacactatacctccaagaatacaaccctgattctacaaaggggctttccccagtgagtaacctgaggctggggcagggaaaacaaatttcaggcttgtatcaggatggctgagggacatcttacagaaaagtcagagcctatgagcaggaatttcagaacgggtgtggggttagggcgggtgggggacagggacactcaccgctttttcttctgtacatacattacctgcaacagagacacagcactgtgggggctgctgagcccaggaaggcccacaggcagagagaggcccacctccacacccttcactcccttaacaggacagtggggactctgtgcagactggaccaggcccacccagcccctgccttagcaaagctgtgggtgtctgtgtgtatatgagggctccttaccacagccaccaccaccccgaccagggtgatgaggaagaagggccccaacacatagcccaccatggagtcgctgttggcctggggggcattgggcacagtggtgttactcatgacatcagcagccggagggctgggtggtcagcatgggcagtggcgcttcgggagggcgcctccactgggctccctgggaaggaggaagggaggttatcagttgcacccaggtgacatccagactctggatccctcccccagagctgaagatctatgaaaactggtcccaggtcaaatcctgggaggagggatcctccaggtagatgtactgggtgtgaccctccagtgagtcttggcaaatcctggcaggaaaggggatcaagggaaggcctggatccagggctgagtcttgcccaactcctatccctaaatcagggtggggcccagctcagatgctggccaaacatttacaagtctcagcttctggggaaagattaagtgcaggtttcaggtgcctgccccagcccttttggggcattgggctgccagcacctgtccagtggagcaaaatggataaatgaggtctaaaggaaggacctgcactgcagccaggggtgagatgggagcatctgaaggagcccgcttccatcctggtccaatcccacttcaagcgatgggctccatgcctgagttctatgcccttgtccctggtgtcacctcagacatacagcccaaacaccctctcccccatctgtctcgtgtgccagggtggacacgagtgggtaaagctggattgtatcttcaagatgatgtcaccttcctcttgtctccacccggggctccgcccaggtccctcccctcctggcctgagctgacaggcagaggtggagagggtcagtccccatcgacagaagcaaagagatcgtcctggggcagtttgcacgctgatggcccaaggtccgcgacccaggttcgcttgagtctctatcagagggcaaggtatgagcgacctacccccgtgtccgtagggcacggggcatcgagcttgcccttacccagtcgtatgctcatcgtcccaggtcaagggggcatgccagggtggggagggcgtcaggccgctgctaggatgcgggccagcaacagcggacaggaggtggttcccacggcgctgggaggctcaggccggaggtgggggtgttgggggatgcggatgggccgccccgcgcccgaacatcctggaagcccgtcacccgaggcgtggacccgtgccggcgctctgcagcccagccggcctggccatgccttacctcccgccgctgcagccccgacaggaacgccctcggttggctcccgggccccggaaaagccgtcaggcgcgtgatcaaaggacccggggaaatgggccgggcctcagcacccggacgcagccaatccggtagcggaaagccggtggcctggagatttctggagccgccaatccggaggcgggggtgggcggtgcgaaggcggggacagcggggcttgcagggtccgcccggcggcggcagggggcagccgagggctgcgcagtgggggaggagaacgcgacgcggggccggacggggtagggcggggcgcgcgcagttttccggcggcccctggcccgcccgcgtctggagctccgattctgggaggtccccggcgcccacttcattcacccctctcgttgcagccagaatagggtcgcgccacgctctaacgttgagcccaggcccttcgcggcaagaccctgctccgggcccactcggcctccgtctgtgtttgttccctggccttcgggctgtgctcggctggtagagtacggcaggtctgggctaccgagggccctggcacgcccaccctctctgcgcctgtcttaacgtctgtaaaacaagctgtgtgaggattattattattactttttttttgagatggagtctgtctctgtcgtccaggctggagtgcagtggcacg

SEQ ID NO: 46359 - DNA, 625 bp, Homo sapiens
actatcaagcacaaaatgagatgttttgaagtcttcaatatggctattgagttgactttccccgtaactctgataatttttactttatattgatggaggtttactaggtgtacattaagttcatgactaccatactgtcttggcagtccttacatttacttcctgtgtagcaagctttgtgataagcagcttgtattcataagtccatggaattaagagaaagctgttaagtggcaacaaggccggataagttacatttgtctaaatccagcagctgttggtagtttaacgattgtggaatctccagaggcaagggttgcatttagtgtttgctgaaaccactgttaattatattgaagtcaatggaaagtaagctgtggatatatttcctaatgactaaaaatcctttcctggaatgtggagctggatggaaaagcaaacacaactgttttggaagactcttctggactcatttcatttcgcagaaggcgactggctcctgtcccagtaattccacctctattcagggttccaacacaaaccagctcaaatacagtactatattctctctaacagggcatattctaatctgtacacttagccactaaacttaatatttgtcaat

SEQ ID NO: 46360 - DNA, 2484 bp, Homo sapiens
tagctattacaatgcatctgttttggggacttttacaatatatggtaggatacaaagcatacgtttccaaatctcctttcgttctgttttgctgaaagggagcacacatgggatcccttaacaacacaattcactaactaattttcttcaggcagtaattcaaattcccacttcctcctaaatacctctggacagcaactcctggcaatccatctgtctctttcgccacagcttcttttcataactaacgggtcaagttcctttccccatttcgacactgcactgtactgcggccctgccaccatagcccactgctgaatccaatataacatattggatttcactgtccttcattgtttccagtttaactgccattttaccaccatgcacacgagaaatgcattcccacaggcatcttatgaatttccaaagcagctactcttttgtggatttacaaaacatgtgcttctctgaattcccttcatcaccacagaaacggctttgggaagccgagatttttttttaaagtaccctacctattataaaaagaaactgattctaaaacattattttcctagctaatttaatcctaagagtcttcccacaaggcagtggaggaacgtcagggcaaaaatgttaaataccgcttttggtcttcccaattaacatgaaacattttcagcacacaaagattattatatcaaatgtcttttcttctcagactacaccataaaggctacccagcgcactgtaaaataaacagctggctatggcttatgcacaacgccctaaatcttccgaagacaccccacccccacccctcagctttgggctcacagacatataatccctcggcaaaccccaaacctgccaatgaagtgcactatttctctgccacaaaggccggcccgcgcctcgtgcacgccggcctccgcacacatgtgcctggctgacaactgcggagcggcccttccaggatcaaagccgttggcctggaccgaaagccgcactcttcccagcccactgccttctcccgcggccgctctccccggtaacaggcggcggaaccgaagcgctccggccacaagccggctaccccctccgcccggcgcgccctgtgcagccgcactcaaacccgcttcccctcagccccaacgtcctttctccttcccccttttttcgcctcaggaaattccatcggaacttcattccgcccgagcggggcggccctggcacaccctcctccggcggccgcgcccctcgcgcctccacccgaaggggccggagacccggcgaccccggcccgcccagcctgccgcctcacctcctcctcgctctcgctgcggaaacacaggcatgcggcccgcttcttgtagccgtcgccgtcgtaggtgcgggtctggttcgacttgagcttcatcatcctccgggcccgggtgggggtgcggtgcgggtcgcaggagtcgaggggtggggagcccgctctggacggccgcgtgcgcgcgcgcccccggctcggccaagggaagcagggagggggagcttctccgctacacggctccgccgctggcccgccgcggccgcctcattcccccaggcccaggtcccgcgccgccgctgccaccgtcacggctgccgtctccgctgccgccagggccgccgccccctctgccgccgccacccccgacgacgaccgcgccgccatcttgggcgcgatgcgtcagcggcgtaaggctgcaccggcctgcgggacggccgcgcgctcgcagcgcaggccgcgttcgcgaatcgcgccctcccagttcgcgcggtggaaaccagcatctgaaaggagagggacgcgcgactccaggcgaccgctacgccggcagcgtaggcgtagaactggtggggtgcgcggaggaagccgggggagataagaacagcggcgcaggacgcctagcggccggagcggagaccgagcggtccagccgcgcaagtctgcggatggggaagcggggacttggccaaggtcacgccgcgtctccgcggccgaggatgaaccaaggtcacgccacccgcccctgggccctgccggtcggtctcgaaggggttgagggggaaggtttgttggaaaaaggaggatgtagttaaaggcaacggaagctgcagcctgagacatctgggatttggaactgcaaggaaacggcgcatgggaggcgtgtgcactttgcgttgatagcctgaacctcaggatgtcttaggggctggtgcatgtcgcccattacaaagaacaaatatttattctgcaatcttttattgatgctaaaggtaattgcttcctcttatggtaaacaagagggccagaaaggaacacgcgcgcgtgcgtgcgtgtgtacacacataatgtaaatcataaaacatcatcgtttctggcaataaatgaggagtgtgtgttgtggatgtcaaacagattctccaggaaaagatatacagacagaagct

SEQ ID NO: 46361 - DNA, 1319 bp, Homo sapiens
gcccatacagccacccctgtcccttttaaccttctccaagtgacctcctcaggcacgtgtagtgggacttgaaatgttcctttttagcttcacttgaaaaaataaaagaacttaattttttgacatcagccagtttcataacctgacatttttattttccagtaaaacttcttcaagatgccctgactagtctcacccctccctgaccccacaactcacctctgggccacttgagccttcattcatttctcttgccctacacttccctagaattcagtctggacacgatttaccacttatggaatagttgttgttctggattcaatgtatagctttggttttgttttcccaactcgactgtcaggtggttaagggcaaactttgagccttgtttctcagagctcttattagcaatgatccttgagcagctaatgaatgattattgattggaaggtatgttttaacctaccaaggtagggacagagctggcaggcaccaagatccacttctacctgcatgtttttattcacatgctcttttatagattcctcgggtttccccagagtccatgggtgatcttggagtatgtattacggaactaatttgaatcacgaggaaagaagttggcaaagagccctagctgaaaaagtaacattttagggccagaaaatcactaagatcgtagaggaaacctattgactagctggcctcagtgggaaacagaaaggcaggagctactaacatttcacagtggaatccaggttaaacaatcacaaagcgtgtgaacatgggcaaaccacttgacatcactcaagccagcagaaaaattggataaaaagcaatctttgaaatgagccaaggccgtgctgaaacaagcttccccaaacactgcttctttctgccaaagcaagcttctattttattggtggctcagactccaaagttcacttcccaggactaacagttaagtgcatatttggagttgtcatcagctgccacctcgtggtctacattacaactgcctatcaatactgaaggtggtttagaattctgtgttgtttagaattatcatcaatctcatttgaccaattttttaaatttttttttttttttttttgagattgggtctcacaatggatggtttcgaactcctgggctcaagtgatccttctgcctcggcctcctgagtagctgggactacaggtgtgtgccacggtgctcagcttcatgagaccagtgattattattgagtcttgctctgtcgcctaggctggagtgcagtggggcacaatctcagctcactgcaacctctacctcct

SEQ ID NO: 46362 - DNA, 1378 bp, Homo sapiens
cttgtctgccagctccgggtgcttaggcatgtggacatccttcttggccaccatgactccctccttaaaaaggagttcataaatggcaatccggttcttcttaggcatcaacatctgcaagaaggagacgattgtcaagagcacttctgagtaacgaggccggggcccggtaatcaagttcttgatcctaaagtgacccacacaaaaccgtagacaacatgctggtgggaagactcaactccacaaaacagattcggcagaggccagctccgtcagtccccacccccaaacacaattcaggtggaaaagttgacagtatgttaaaaccaggatagtggtgcacattcgcgccaaacttccttaagttctcatcaattacaaaggtcaatgggggggagaggagcaaaccctgtattatcgggagcagttggaggccatcagcgaccgtacccagcgcggaatctcgcggctgtaccataaggtacgcagggaaggcccggaggggtaaagccccggcttcttgaaggcggcagaccccaaaccaaagggctaaggccttcgcaccctcgtctcctacctaccacttctcccccaaactagagctccagtgccaggcaaggaggcagtcgggggagtcctgttcccaagaaaaaagcgtgtcggtgggacaccgtctcgctagtctcacctggcaagtctccgccactcactggcttcatcctccccctctccctcggacaatcttcgcctaccagcggccccctaccccataaaataagcctccagcccctatcgctactcagaaatcggtgtgtggggagtgggagagaggccccctgcccgcatcctggggagaagcagccgctaaggcggcaggatagcccggatgggagccgatggaactcgaacgccacagaaactcacctctgcggctgcagggtccggtaccggggctggaaaggaaggagcatgcgcggtgctgcgtctcttccgggctggcgtggacccgccccccgccaggacccgcggggagcctggggtggcctcggcggtgcctgaagaactggcggatctgaccacggagcctgaccgcctgagggactcacgcacgcactaggaaaccgccgccgggaacttctgagcttgcgtgctctatcagtacagggtcacttattttgggctgtcgttttagaaacgcttcttctttttttcccggccaaaatctattatgcaagtgatatatgctcttggagcaagaaaagagagagaacatataaatcagatgacgataaaagactaaaaacataatcccatcaaccaaagaaaatagctattaacattgtggtatacacttttccaaattcatatgcactcacac

SEQ ID NO: 46363 - DNA, 543 bp, Homo sapiens
ttagattacacaggacaggggtgtgtgtgtgtgtgtgtgtgtgtgtgtgtgtgtgtgtgtgtgtgttccactctcattttttcggggcttgaagctgctaaggtctgaattcagctttagggaagcctcaactcctaaaggagtaagcccagctcagtcttctccctcacccctctccccacccacctcctccctctccctacctctgcccaatcaggtctgaccagccattgcccttccacactgtccccaagtggctccgcccctgggaaggcagagtcctccctgtgccctctgcattacaccctgtcccctgtgaacgtcctcttcctgctcttgccatcctccaccgaatgcctgctgccgaggaacatcgagtgtcctctctcagtcagtgtcctgtgctctggacttcactgccttttcaaaaccttccaggcctgggcttcattccgtctacatcaaagctcctgatgacacattgagccaggctaatgtattagtaggggaggggccaattgttagtccatccatcctagattg

SEQ ID NO: 46364 - DNA, 942 bp, Homo sapiens
tttcagaaccttcggaaatatttgagacctggagaaaaaaaattgctattggctccggaaacccaagacgaaaactgccaaacctaaattaataagcgtttaatgagatgtcgacaaaacataatattatgtcaagaagctgcagctcaactcaacgcttatatgactctatataaatataatagatttaactcgcaaaaacaaaatgaataattcattccagcccaagtccaaattctaaaaatccttctgcattttgtggcagcaaggaaatcatgtttaaattggggtgagggtgcgtgtagacggcggggcctgaggcagggtgctggagcctccgaaagttagtttccctggggtgttgccgctgcgccgcggggcggggggcgggggcgggggcggggacggcgaggccgtaagcggggaggcggggcggaagacagtgggcgtggccgtgctggatgcggcgggcggggctggggacgctgggaacccgcgggagtggtgctcgctgcttggccgccaggtggggaactacaagcggaccgtgaagcgcatcgatgacggccaccgtctatgcaacgacctgatgaactgcgtgcaggagcgcgccaagatcgagaaggcgtacgggcagcagctcaccgactgggccaagcgttggcgccagctcatcgagaaaggtgctcccccaggctcacatcgtgcgcgcccccaggccgtcacgagccccctaggtctgggtcctaggagccccggctacttgcatgcaccatgccctccatctaccagacacaggacattttcaggcgctgttccctcctagatcaaaccaggcctacctgttcatctctattttgtacaattttaggttgaattaaaaaaaaaaaaacactttttatcttgaaataattcaaactttgtgaaagttgcaacagtagc

SEQ ID NO: 46365 - DNA, 881 bp, Homo sapiens
ccttcttagaaaacagtgaaattttaaaaattactggcatataagaaaaaggcatacgtaactttaacaggacttttttttctctttccacatctctgtgaattgtttttcatcagtttcgcactgtccaaacagaagctactctggccccccagagatgagtcagagtgctagaattcacagcaaggttagccttgagtcaacggagtgagcacctatgctaccctaacttgatcgtcagatgctcttcagctaatcacataaaaagggatcattaaaacactttctagccttcaccagtacttgatctcactgttcacctgggacagacagttcagccacaactgagctgacaatgaggcaagccaatttctaacaaaagcagggagccagatttatgaatctttgaggcgagtcagcatatatttacttttctgactccttctgacagctctcccacagggagaagcccctttgcgttgtgggatgcagctagggcaggcgttccccccagggacggagcactgagttcagggagcttacgattcaagaacagctgggaaggactccagggtgtctgtttcctggcactgacagatgtgccattctgttgacatatccacccagctctcatagtgcaggtgcctgaagcaatctattaccttcatcctaccaaccttagcaagttaaactgtaactatggaggcagcaggaaactacctgcctactaaaactgtggtcataggcttccagagcatcacgttctttcccagccttgatggcaagcagagatctctctggagttaatcagatctattgccaactcagtgatccctgacactagcaccttaggcacccctcctccctagccaataaagatg

SEQ ID NO: 46366 - DNA, 1600 bp, Homo sapiens
atctcaaaaaaaaaaggtggggtggaatcttaaagtatcatacaaccataaaaacttagaggtttggaagctgtattaagaactggttgtatccaaacagccagcctggatgacagagtgagagcctatctccaaaaaaaagggaatcttaaagtattatacaaccataaaaacttaagaggtttgggagctgtattaagaactggttgtatccaaacagctaagagtcaggccctagtaagtggagatgcagtgacatctgctgttcactcctggaattagcaatttctttctcctctaagaagaggaaattaaagccaccagcagcagcactagtatgactcacaggaatgtacattcattccagatacacttatcatcaaagaaaatatggccgggtgtggtggctcatgcctgtaatcccagcactttgggaggccgaggcaggtggatcacgaggtcaggagatcgagaccatcctggctaacacggtgaaaccccgtctctactaaaattacaaaaaaaaattagccaggcatggtggcgggctcctatagtcccagccactcgagaggctgaggcaggagaatggcatgaacccgggaggcagagcttgcagtgagctgaaatcacgccactgcactccagcctgggcgactgagcaagactccgtctcaaaaaaaaaaagaaaaagaaaaagaaaaaaaagaaaagaaaatataaatccccatgtaaactagcaacataaaagttaaacctcttgacttaacaccacacatgtagtgtgccacttcccttgaaaatctgggacagtgccaggaatagtgggtcagaggacctgtgttcaaagctcaatctcataaatcaatccaatgaagtgggacaatccaatagcaggcagcctgagggagaatcattccatgctctcctatcctagctttctaacacaagacagcattccttcactctactatttgtttttcccaaacagataagccctgtcttacaatacaggctgagtattcctaatttgaaaatccaaaactttttgaccaccaatctgacactcaaaagaaaatctcattgaatcatttcagattttgaatttttggattagggatgatgaactgatataatgcaaatattcaaaaatccaaaaaaatgtaaaatctgaaacacttctggtctcaagcatttcagataagggatactcaacctgtagttttactcctccttgtctaccacccatctgttttaaaaataaattcttttgtaagtacatgatagatttggcacacagctactaagctacaggtcatatgcttcattcttagctcaggaaactaaatgcttatgagaaagctattctgaaagctgttatccataaataagactaataacctaccaccaccccttttctccctttagaactaaagcatctttaggctgggtgcagtggctagcacctgtaattccagcactctgggtggttgaggaacgaggatcacttgagcccaggagtttgagaccattctgggcaacacagtgagacttctttccccctccccctccccctctccttccctctcctttcctttct

SEQ ID NO: 46367 - DNA, 2558 bp, Homo sapiens
ggtcaggagttcaagatcagcctggccaacatagtgaaacccgtctctactaaaaaaagtacaaaaaattagccaggcacggtggcgggcacctgtaatcccagctactcgggaggctgaggcagtagaatcgcttgaacccgagaggtggaggttgcagtgagccaagatagcaccattgcactccagcccaggcaacagtgccagactccgtctcaaaaaaaaaaaaaaaaaaaagagccatttgtagtttcttttttggaagtatcattttgtaaatgttggtgttctttttaattactcacaaatcccctttcatcagaaggaactacgaagcacctaagccagagttcccaactgagcagaagcgcgtgattgtcagcttggttatcagtgccagaaaccaagggccactaaagggtttcagtaagctgcgttcattacagagatcaaggaaattgttggtaattacattaactgcttctcttctggtcttactcaaaccagtgacatcatctccacttcccacgctatgtaacaatccaaactgcatgtttctaaacataatccaaccataaaccaacgaatccactgagctgtttttaattatacataaacatagcatgaaacaagctctgacagtacacaactgatcaacagaaatgctaataacagcaaataattttctgttgggggcctgcctgctcctccaggtgcttgcagctgccagaaaggaaggctataattagagcaggtacctgaggtcaagcctcatgcaatggtggcctgtcatattagtcagtaatgactgaaattacaataccaatggcctgcctatggtatatgtgcttgataatatttacataaagagagctgggctggggccaaactgcacctgtttgcttgactattcaatacaaagcttgaacttgagtcttctcagcagtttcctgtctagctgacagtgatctaaagtgaaggatgtttgtgactggtcaaacttggggaaatccagcccctaccatccacaaacaggcttagaagtatatctggaattagcattacacttagggatcagggagaatatgggagaaaaataagcctagtttgcaatttgctcttttgaaaacattttggaaaagctgtatgtctaccgttttgaaaacagaatttttttgcagcaggtcttcagtaagtagcctgctgaattgttttctgttcacttggctgcaaaatatgttttggagggaagaaactatttgtgcactcaggacaattgccaattctcatccccagcttgtgtcatatttcaccctttggctctgccatcaggataggactttaagaccactgcagtaggaacactagtaagtgggaaagtcaagctacccaacttaggcagatccattcctatcctcaaatctcctttcacacctttccaacttatcccacagtcaaagcttatttgtatgtgtattatacaggtaattcagccagagaaagattaagaaacatttttaaaccccaaactgaaactgaaagcagcgaactggaatcctggcaggaagctggagaggatgacaaagcaaattcatttcccaagtacaaggcagaaagtggactttagcccgagtgatctaacccatcaagcaggtacacagctacaaatgtggggtacacagcttctcagagttcagagaatttaaattactggcccactaggctgagcaacagcaggcatagaccaaacagctccaattcagtgtcagaaagtagacatgatagcaggtattcctgttcaaaacaacatactcagctattattagccaacaagtaattcttcatgaaatggagctggctaaggtgatgggaaagggaaaacattgacccagcattcagtgcagtctgaaagtttaaacctccagattccttcagtttttctgctcaaaaaagttttaaatctaatttcagatggttaaaagtaccctgaagaacaaacagaggcaacgttaacagtgataaaaagcacagattaagatggatgctggtgctggatgctgtgactcacgcctgtaatcccaacactttgggaggcagaggcaggcagatcacttgaggtcaggagtttgagaccagcctggccaacgtggtgaaacctcgtctctacaaaaaatacaaaaattagctgggcatagtgcatgcctgtaatgagctacttgggaggatgagataggcgaattgcttgaacccaggaggcggaggttgcaatgagccaaaattgtgccactgcactcactctgacctaggcaacaaagtgagactctgtctcaaaaaaaaaaaaaaagatggatgatggtaatagttgcacactgccaatatagttaatgccacagaactgtatacttaaaatggttaaaatggtaaatttcatgtcatgcagattttaccacaatgaaataatttttctttttcttttttttttttttttttaagagtatggtctttaggcaggacacagtggctcacacccataatcccaggactttgggaggccgagg

SEQ ID NO: 46368 - DNA, 923 bp, Homo sapiens
caggaggcagagtttgcagtgagctgagattgcgccactgcactccagcctgggcaacagggcaagactccatctcaagaaaaaaaagactgtgatctttagagtcagctccaactcttggctgtggggttttgaacaagcagctaagcctttccccatcagttttactcatctgcaaaactgagttgatactacctatctcattataatgttggctgtgaagattgcagaggcaacgtatgcaaatgtcctggttggcagtcattcattcaacaaatatttaatgaacgagcatttacccttgtgccaggcacctggcctggagcattagggatacagcaaattgcaagacaggcatggcccttgccttcagtgtttatactctatagctaaccagggacattcaaacaaaggttaactccaaatgcctctcgcacagaggctatgggcccaaagcagcttttcctgcttagggtgaaagatgggcttggtacacagcacagtttcaactgcacagacaatgaagttaacccgaactggagaagaatttggtaacactgacatgtttcctgataaaatacaactctgtccaaccttcattttatagatgaggctactgaggcactgacaggcgaggttaatttgccctaggctaggcaattattagaattcagagccacacctattcaaaagttttaacctacccagaatttccaattatataacactctgaacatctgattttcttaacatactaattaccattatgaattctataaatgaattgtaacccccattaaactgaattctttaaagaattgatcttgcatatattcacaaacatagaacatttatttttgttgtatatatacatacataaggcagtcttttttttttttttttttttttttaacggagtctca

SEQ ID NO: 46369 - DNA, 1605 bp, Homo sapiens
gtacaattcaatgatttttagtaaatttacagaattgtacaaccatcaccatgtttagaatatcatgtttcagaacattttcatcatcctaataatgtcccggtccctggaacctatgaatatgttaagttatatcgcaaagaggaattaagggtgttaatcagctgaccttaaaatagggagattatccagaattatccagatgaaaccaatgcaatcacttccttaagagtggaagagggaagttaaagagagaactgagaaatagcagtgtaagaacgactcagctttgaagaaggagaaacagggccgtgagctaaggaatgcctgtagcctctggaagcaggaaaaggcaagaaaagattcttcaaaaggaacagagtgttgatgacgccatgattttagtgcagagaccatttgaacttgtgacctccagaactgctaaaattataaatgtgtgcgtttttaagtcacatagtttgtggtaatgtatcacagcaccaaaaactaatataatggctacacattgtattattctactttactgtatatttgaaaatgtttatcataacaagaaaaaactatgaatatgaaagcagaataaagactgcaatgaaaatggtggggttttgcgggttttttggtgacagggtcttgttatgttgcccaggctggtctcaaactcctgggttcaagggttcctcttgcctcagcctcctgagtagctaggattacaggagcatgccacagcaccgggatcaaaatggtgctgtttttttgctgagtcatttccttcataataactctgcttccaagaactcaatttgccatcaaagatacatatttagaaataactcccattcttgttgccccctgaattaaactgtcatggatacttcccaaaatgggaaacaatcactaggttcagtgttaactgtaatttttgaaaatgctggaccactggcccaggagagacatgaaaatatatgatacccaaaaagtcccagaatgacaaacaaaatgtgactgagaaaaagctatctttataaacaaaatgtctatggtttatcgttgctcatgaaacttcaggaaatggtttaaaatagcagttacgaaatgatcagataaatctataatgaagcatgcctttcaaaagtttgttaccaaacagggaacttacaataaaccagcagcagtcaaatgtatctcatcctggtcagagagctgttttctaaaaaataccagcaattttttgttttgttttgttttttgagagagacagggtcttgtgctgtcacccaggctggagagtgcagtggcatactcacagctcactgcgggtttgaactcctggactcaggcaatcgtcctgcctcaacctcccaagtaggagtacaggtgcacaccacaacatctggctcatcttatctttttttttttttggtagagatgggggtctcaagctaggcatggtagctcaccgcctataatcccagcactctgggaggctgagacaggaggatcactggagcccaggagttcaagaccagcctgggcaacacagggagaccccttttctacaaaaaaaaaaaaaaaaaaaaaatt

SEQ ID NO: 46370 - DNA, 751 bp, Homo sapiens
taaggcaaatacacttaggctcacaatgttaaactaaaacatgacctaaatttggctttattcaccatgaattccttccctaatttgatatgttctatttaaaaattaatatatttacagaagaatgccaaacaataaatgaagatggaacaacaaaattagataacaacctttttgcaaccacctatgcagtatcaactcagtcaaggatcatcaatagatactaaaacagtggagaggaagactgttgggaaaacagggtagtcccagtctgagagtcatccccacagattacttattaactataaaggagaaaaacaggtggacactatcttaaccaaatattcaattttagcatagtcagtaataggacaaactaacataatatgcctcctgatgtgacgcaatagaagacatagcatcatctatgtattatttccaacaaaataatctgattctaatcacgactaaccaacaacataggacactccgactggcataaactctaaaaatgtcaatgtcatagaatacccacaaaaggcgaaggaactgttctagatagaagtctaaagagacatgataaccaaagataacataagatccctgagaagatcctgcattaaaaaaaggaaggttgtaaagggcaattctgggaacaaatttagagatgggctatatattagataatacttttgtttccatgttaaattccttcagagtgacaatagtactgtagtcatgtagaatgatg

SEQ ID NO: 46371 - DNA, 2261 bp, Homo sapiens
aaggatcaattcaagaaattttccgataacaagagaagggagtttccagactgaaagggctcaccaaagctgaacaaaatataagaaaatgaatgctgaaatgcataaccgtcaaatttcagggcactagggacacagcaaagttaccaaaagttttcagagagggaagaaaacaggattcattcaaagaacaaagaatcagaatatttcaacattaccgctgaaaacacaagacaaaggatcagtgccttcaaaattctgagaaaaatattctcaaccttaaaaaactgctccccagcaaaatctgggatatcagctaagtatcaaggtaagaaaaatttcagaatgcaaaagtttcaaattttatctctcttgcactttcaggaagcttaaaaaaaattgggtccaggaaacagaggttccaacaaagaaaggctaaaagaaaccccaggggtgagatctgtgcagacctagagctcacccagtccagatcagggtaggtccaacgttctagaaaagaattcttcaaaaagataaaactgacagaacacctacagtgtcataacctactactgagaataaattttacatatatagttagtaaggagtttgaggatagtaaaaaaaaagactgaacaaaccaaaaatcaagacaattatcaccctcagggcagcaaaatattgtgctgagaaagaaaagtaatccaagcacacaaatggctcaagtgttgataaacatttaaacattataatgagataaacagtaagattggtgacacatgcctgtaatgccagcactttgggaggccaaggcaaaaggatggcttgagctcaggagttcaaaactagcctgggcaacacagtgcaacactgagtgtggtggcacatgcctgtagttccaggtactggagtggctgaggaggatcacctgtgcgcaggaggtcaaggctgcagtgagctgtgatcatgccgctgggtgacagagagatcctgtctcaaaaacagtaacaaccacatacacacacacacacacacacacacacgctgggtgacagagagatcctgtctcaaaaacagtaacaaccacatacacacacacacacacacacacacacacacacgaaaactgatttagccaaattacaaataactaaaatgggagaacaggaaatggggtgagtgaaacaaacaattactatgggtcaggcagaggtccaaatctttttttttgaaacggagtcttgctctgtcacccacgctggagggcagtggtgcgatcttgactcactgcaacctccgcctccgggttcaagcaattctcctgcctcagcctccggagtagctgggattacaggcacacaccaccacacccagctaatttttgtatttttagtaaagacggggtttcaccatgttggccaggctgatctcaaactcctgacctcaggtgatttgcctgcctcagcctcccaaagtgctgggattataggcgtgagccaccgcgcccggcccccaaatctttatactatcgatttacctaattcccatttaacaactggtgcccttatgttatatatgagaaagctgaggcacagagacagtaacttgccatatgtcacacagcagaggctttgaactttgctcttcaccactactttggctatcacaaagcaaaatccttatctccctgtgtaaagtcaacagataatgattaaaggttaaaaaaaattgagagagaggtaacaaaacccaaaaatcagttgaaagaattgaaacagattgcctctggggagtcaaggaaggaagaaaaaggtctagaaccccttgttgcttttaacaagctgacagaactactttactctttaaaccatacatttgtaatttggataaaatgaaaattaaataaggaaatgtacttcccctttaaaaacacctttaagtacacattaaaactctgagtttcagctgggtacagtagctcacacctgtaatcccagcactttgggaggccaggcaggaggatcagttgagcccaggagttcacaaccagcatgagcaagttggtgagatccccccatctccacacacatacacacaaaaaaatttttttaattaaattctgactgaggccctgaataactggacatgcgcaccaatgcaactcaaaaaaaagtgcaaaaacaggccgagcgcagtggctcacgcaagtaatcccagcactttcggaggcccaggtgggctaatcacctgaggttaagagt

SEQ ID NO: 46372 - DNA, 1620 bp, Homo sapiens
gttttgtttaccagttctttctaatttatctgcaatgaacataaatcatgtctttttttgttttttttggagacagagtctcgctctgctgcccagactggagtgcagtggcgccatctcggctcactgaaacctctgcctcctaggctcaagtgattctcctgcctcagcctcctgagtagctgggattacaggcacctggctaaattttgtatttttagtagaaacaaggtttcaccacgttggccaggctggtctcgaactcctgacctcaagtgatctgcctgcctcggcctcccaaaggtgtgagccatcacgactggcctattttttatttttatatttttttctattttttttaactttttgccaacattcggatcctaacaatttttttttcttcagagcaggagtgaaagtttattttaaaaggctttagaacaggaaagaaagaaaaagtacacctggaagagacccaagcaggcaacttgaaggacaagtgctgtttatgtcataaaaaaatacaatcattttaaaaatttaaaaataaggtagggcttccctgtcacagttgcatgcaaaccccaacccccagccagtggtttccactcttctcaaggcctgttatcaaagggtttaaaaaaaaaagtaaaaaataaaatttactttagaaaataaaatgctgaccagaaagcactttagaagcacatcatgtatcattcaatcaatcattagaaggtggttgcttcataagaggctgacctcttatgaatcactgacctcaagcacaataattcaagtgtgaaccctcagaaacacttgacagacctcaggctcaaaacacactaaaaaaagcacaactattcattttaaaaggtgggttttttaaacctcaatacatagtggggctgaccctctatatttgggaataaactgccccccctcccaagacaaacattaactttggcaaatgagaacaccatttactaaatcaattacccttccaacaagtgaaaaacgtattcatcttctctgcacaaggtgatttagaaagagtttaaaccctttcaccgggtgtggcggctcatgcctgaaatcccagcactttgggaggccaaggcaggagaattggttgagctcaggagtttgagaccagtctgccaacatagcaagaccccgtctcattttaaaaataaaaaaataaaaataaagagttaaaccttttcagttttagtcctgttgcattttgggtttcttgttctccaacaatattgtaaataatattgtcagacgagcttactactagatagtttacttattaacaaagcaaaactaagttttaataaaattatacataattactgggtaagaatttgttgcttaatcagaagggattttactatatttcaaatgaccaaagtccaccactacatttttttttttttttttttttttttgagacagagccttgctctgtcttccaggctggagtgcagtgctgcgacctcagctcactgcaactctgcctcccaggttcaagcgattcacctgactcagcctcccaagtagttgggattacaggtgcatgccaccacaccccactaattcttatatttttat

SEQ ID NO: 46373 - DNA, 3623 bp, Homo sapiens
tgcttttgtagccataataattatactaataaagactgactctaaagaacttaaaacttactagggtagtgtttaaatggtccaattcacaaggggttgggagaaataatgatcctctcctaccaaactagcagcaacaatatgccaagtttcctatgctgaactagtgtaaacaaggaagaaaaagagccagaggtgggaagcagtcaggcaagagaactctcttcaagatataactttacttctaaatttcaccagagtaatagcttttctcagtgtgttcaataacccatgtctctctgactaaacaccacaggttagctgtcagaaaactacagtaggctatattccctgcttgagatcatcagacgtaacagatacaaatggagattacaaatgattaattctaaagactatctcctgcatccagtcaaagagttttctaaacatctagaaatttaaacctgctcttgctgtaataattgaccttaaagataaaatagtaggacccatcaaagatgatgcacagaaaaaaaaaatggcggggcatagtggctcacacctgttcccagcactttgggaggccaaggcgggtggatcacatgagatcaggagttcaagatcagcctgaccaatatggtgaaaccccacctctactaaaaatacaaaaaaaattagccgggcgaggtggtgtgcacctgtagtcccagctgctggggaggttgagacaggagaattgcttgaacctgggaggcagaggttgcagtgaaccgaggttgcgtcactgcactccagcctgagcgacagagcgagactccgtctcaaaaaaaaaaaaaaaaaaaaatttacacattacctttggtgcagccacggctacaacactcctactaatagatgagcatcatccagggtagaactaggtaggagtgggataaaaagtaggcttacagcctcttttccagcgttgcttgaggcattcagtggataaggaataaaagagaggttggttgtgcaagtgatgccaagagaaacaagattccacatgtcaggagactgaatgcccaacagagcaaagggcactgaaccttttgccttttgcccaaagaaatattagttgcttcacctgaaatcctttcaaagaaagtctaatcgtctccactgcaactctgcctctgagtgaatccaacaacctctattcagagtacaaggggaagcgttgcttaacaacgacagcaagtgctacttccaaagccaagaaacactcctttacgtcgggtagtcttctgtcccaattcagccttctacaaggtgaagccaaaaatacttggctcccagcctaagttctccattttcccaaacatctgtcaacttagctttctttcagataagcccctctccattcccagcattctggtgaccccagatgaaccctctgccaggagtcctgtcccttcagaaagttccttcccccaagatcatctcatttcccccacttttcctaaggtggttcccaggccctgtcccaagtctaacactccgggtcctccatgtgtcgatttactagtagatcctactcctccctggcataactctcaagaaagtcatctccctcaccatacccccttgtcttcccccataatatcacccccttttccctatctatcctcagatggaaagagacagacacataaattaatctgttctcagctcctaactcccaagctctccagtgctcaggttgttccacagcacctaatccttccctatagtttccgcccaatcctggcatcctcagcccctcactccaaaccccaacctttttccccactccccaaatccagatctcctgtgctttttactctcagccaacaccataacccttttcctcccaagtctacccactatgcctggatgcccaagtcttttcccctcatcccacgtcccttggcccctaatcctcgaaaaaccttaggagctcgcccccaccatctcccttccgcccctcctgcctccgtggtccctaactctcctttagccctgctcagcccccaaatactccctatgcccacggggctccccgactcgtcctccccgtcccgggaaggggtggccctcagtacccgcctggctcgccctgccgccaagctcaagtgtcccttcccttcccctcggggcccccgaggccgctgccagcgctggcactgcggggccggctcaccagttggtcatgtccaggaagaaggcgcaaccggcaggattgagctggaagccgagcagcctctggaactcggagatgagcacgtccttgtcggtggtgcccaggcagctgaacttctgcatcagctccgggtccaggtctacgtccatgccctccatggcggggaccggacacccgcttccccgcctcttcacaaccaagccgccgccgcgccgccgggcccggggacctggaggggggccgctgctagctagcttcgcgaccccgctcctttgaggtaggccccgggcctctcacagtctcataggggtaaactcactctgccactcactcactctcccccccctcccaccccccccagctccgccgcctccgccgcctctcgcctctcgccactccgccgcctccgcctcctcccgcgccgcgcccactgcgcaagcgtcgcccgcccaggccccgccccttcctctcccggacgcccgcctcttagtgtcgtcacaaactcgtgacgtccccgcgtgacctcaccgctgcggggcgatggagcgaaaagtaggaaggaggaaagagatggtccagccgtggggggcgggggaggcttctggccagaccattactccgccccgtccccaccctcaaggagagccgttaaagcctggggctgcgggagaagttgagggattttcgtttataacaactctaccattttgcaggtgaggaaactgaagtcccgggagagacagtggcaaggtcaagtagcaaagtgcactcagccctcccagcaaggagtctgccactcgcgcttgaaggacgtgtttgaagagctgctttcccagtgggatgctgccttaaagtcttgattccctggcactctttcctattactacattttatcggtgctgtttgtgttatgcaacggtagcatcgtgtctccggaagataaaaaaggtctcgatacaaacatccataaccttccacccactccgtcaggaacaacccaatcaaaataaagtcatgagaatttagcatgccttgttctgtgtttaaaatagaagacaaagtatttctgtatatatcgtacaccttcccggtcaaggtctgtcaaagaatgagaaaggaagcatagagactatcttgtctaccctcttctgttaggaaatgtttttgaaatatcgcgaattgcccagcactgctagatccaaggcggggaggggtggggggggatgagtgagaaatggtcttctgccttcaagtagccccctattttgcaaataagggaagtaagcttacgtgcgttgtccaaaaaatacagagccccaaaactagaacccaggtttctggttccttatgaagtgtgttttccacaatttcaataacagctggaataagtagtaatgtgtcgggg

SEQ ID NO: 46374 - DNA, 1878 bp, Homo sapiens
ccaaagtgttgggattataggcgtgagccaccacacccagcccctactttctatttttaaaattgtagccattatggttgtgataatatctctttgtggttttgctttgcacttccataatgattaatattattttcaagtgctttttaaatgggctttttggccttttgtatattttcttttgtgaagtgttcaagtctttttttttttttttttttttttttttttgagacagagtcttgctcagttgctcggttgcccaggctggaatgcagtggcacaatcgcagctcactgcagccttaacctctgcggctcaaacgatcctcccatctgtttttattctgtagagatggtgtctcaccatgttgcctgggctgatctcaaactcctgggctcaagtaatccttcctccttggcttccctaaatggttggattacaggtgtgagtcactctgcctggcctgttcaagtcttttcccattaaaaactttttatgtttttttttaatttatttctaagagtttaaaaaatatattctggatccaactcctttgtgaaataaatgtttatgaatattttctcagtctatgtcatgagctgaagttttattaatagattctgatgaagtttaatttatccaattttcagatgactgttgttttctatgtcctaagaaatctttgcttacccccagattacaggtccctagtacttcacattagtgtcgaatcaaacaagcacccacttctttaaactcaggggttgagaagtccaaatagacttctttggtgagcaaatgaaggattttaaaggacatccaaggttaggaacaagagcctggagttcttgggacttaaatctaaggttgagttcactgcctcctttcccaagcagaataatcctcacgtgtcactgacacagcctagattagagtcatcaaccaagccgaatcacctgcactctgctgacccaacaaagcagccctgccccattgcacaattgcaaggatttgggaagagcggggagtaagtacaaggttgctagtctgggagtgagtacaaggttgctagtctgggagtgagtataaggttgctagtctgggagtgagtacaaggttgccagtctgggagtgagtacaaggttgccagtctgggagactgcatgtcacttcttccaatgatgagcctgtctgatgaagaaggcagtttgtagggtgtggcttttttttttttttttttttttgagacggaatctggctctgtcacccaggttaaagtgcagtggcgtcatctcagctcactgcaacctctgcctcctgggttcaagtggttcgcctgcctcagcctaccaagtagctgggactacaggcgtgcaccaccatgcccggctaatttttgtatttttattagggacggggtttcaccatgttagccaggctggtcttgaactcctaacctcaagttatccccctgcctcggcctcccaaagtgctgggattacaggcgtgagctatcacgccgggtctgtagggtgtggttctgggaaatggtcccacaatggcagccatgacatgtggtgggcccctcccaccatgttattttctttttatttcctttctttattgtttaacaatgattaacttaatttttaaaattcatagtttaaacatcaaacttttgaaaaagtatagagtgaaatatatccctcccacctctacccttcacaacagataaccactatttctagtttcttagctccttggagagttttttttttttttctttttgagacagggtctcactggatcagggtcaggatggagtacagtggtccaatcatagctcactgtaatcttgaactcctgggctccagcgat

SEQ ID NO: 46375 - DNA, 633 bp, Homo sapiens
tggtatctactataaacactgatctgcaccttgctttcttcaattaatatatctttgagagttcttcatgtcagtatacacagatacttctcattgtttcctataggtgcgtactattctgctatatgcatgtcccataatgtatttaaccaggcccttgttgatggggatttaagtttacagacttttgctctcttttccaaagagtgcttcaatgagtaatcttgtatacacatcattttgcaatcctgtaactataactgtaggataaattcctagaaatggaattggtgagttaccaggtatatacacagggaattttcgtagacactgtcgaactgtcttcaacaggaactatttcaatttacacatgtatgacggttcctatttacctataatcatggctattcaaagtgatatcaattttttggatttttactaatccagtaagtgataaatggtatctcagtaatttttaatttaaattcatcttgtagtgaggatgactattttttcagatgtataaaggacatttatatatacatttccttttcatttgtatttttctattgagttgatggtaattttactgttattttgtaggagctctttatataatatatccaacatctt

SEQ ID NO: 46376 - DNA, 826 bp, Homo sapiens
agccaggcatggtggcgcacacctgtaatcccagctatttgggaggctgaagcagaagaatcgcttgaacccaggaggcagaggttgcagtgagctgagatcatgccattgcattccagcctgggcaacaagagcgaaacaccatctcaaaaaaaaaaaaaaaaaaggctagtcccaaggtagtgagttaccttaatcgattgctcccactaagttacagatcaaactccttgtttactctttttttttttttttttttttttggtagagaagagatctccctatgttgcccaggctggtaactcccgggctcaagtgatcctcctatgtcagtttcccagagtgctggaattacaggtgtgacccactgcacctggctgttctactctttccttcttcctcactgctttgactacacttaaataaataggctgggatggtggctcatgcctataatccccaaaattcaaaaattagctggatgtccagccaggagtggtggctcactcctgtaatcccagcactttgggaagccaaggcaggaggactgcttgagctcaggagttcaagacaagcctggacaacacagtgagacctcttggctacaaataataaaaaaaactagctgggcatggtgacacatgtctgtggtcccaggtacccaggaggctgagggtaggggaattccttgagcccaggcagttgaggctgcagtgagctgtgatcccgccactgcactccagcttgggcaacagagtgagatcatgtctcaaaaaaagagaaaaaaatcctaaaaacaaaaaacaaaaacaaatgtggtggtgtg

SEQ ID NO: 46377 - DNA, 1958 bp, Homo sapiens
agactccgtctcaaaaaacaaaacaaaacaaaaacaaaaataaatttaaaaaagacgagataacctttctctatcctctgtaaagttggactcccctcttccctgcttcactttgctccacctaacccactactataaatatttaccatttttttgagacagggtaccactctgtcacccagcctggagtgcagtggtgcgatcacgactcactatagccacgacctcctgggttcaagcgatcctcccatctcagtctcctgagtagctagctgagaccacaggtgggcgctatcacgtccaatttttttttttttttttgatacggagtctcgctctgtcgcccaggttggagtgcaatggtgcgatctcggctcaccgcaacctccgcctcccgggttcaagccattctcctgcttcagcctcccgagtagctgggattacaggggcccgccaccacgcccagctaacttttgtatttttagtagagaccgggtttcaccaggttggccgggcgtatctcgaactcctgacctcaggcgatccgcccgcctcggcctcccaaagtgctgggattacacgcgtgacccaccgcgccgggccaaagtctggctagtttttaaattttttgtagagacaagagtttcgctatgttgcccagggctggtgtccaactcctgggctcacgtgatcctcccgtctcagcgtcgggagtacctgacattccaggcgcgagccacggcgccggctcctgttggttttagtatctgtcttgttccactagaatctcaaccccacaaggacaagaatttttatctgttttgttcactgctgttttttcagcatttatagcagctccaggcgcgtagcagagaatcattaaatatttatagaaagattaaatacgctcttccggaagcaccgacaaacaagattaaatgagcttggattgaacctcgtagcggcccgtagtactcctccttcccgccatcctatagatgaaaggaagaaaaggaaaagccccgcccctcgctcggctgctggaggcgagggcttcggaagtcttcatgctagtctcgtggggttccgcggtgtcgtcgctggctgtgcgcgtcatttccgggcgtcacgtaacggagtggccaacggcctgcagagcaacatgcccaagtgagtggggccccgaaatctgagggtgatcgtagtcactagttgtggcccccatgcaggagcggagagcgggttctggtttctgaaacctcgagggatgggagagtatctgggccgggtggacggaggcagggagatggagagcgctagacaccccattttagagtgcagatggatcccgcttaaggcaacaaaaaaaagcctggtttatgtgtcgacgctttgatgcttttgagtcgtgaggcggtctggctttttgttttgtttgtttgttttgtttttatcttccatgaacagcgcttccgtggatgggcatctcagtggttgtcgtctttttctcttcctttcacctcttttcaggttttattgtgactactgcgatacatacctcacccatgactctgtaagtggcatatctattcatagtttcaaaaagccttatgtgtaataattaaatgagttttgtgttttttttaagttgcaagttgtgctttcccacctgctgaggtttaaggtctactccttgaagaaaataattggaggttattttcccacccttccagtaactttgattaaaaactgcttaacaagtcaggcatggtggtgtgcctgcagtcccagatacgcaagaggatgaggtgagagaattgcttgaggtccaggctgcagtgaggcatgatcaggcactgcactccagcctggacaacaaaacaaaaaaagctgcttgtcaaataataacaacagttaaagcagaatgttttgttagtacttttttttttttgaaacgg

SEQ ID NO: 46378 - DNA, 2999 bp, Homo sapiens
gctggcctgattattcattttaaaaatttaacatatatatggtttaccgtgcttagactatctctggaattagggagtaattgttttgagggaaacaattgttttggagcaccctgaatgactgacgggggagacagggagacatggttgaatgtctttggttttatattaaagaatgactacatttaaaatgcaatattagctgggggccagacttcctataaggctgtctcaagaggtttttgtttttctttttttctccaagtttttgcttgaaggcttaagtccggagaactgtcacctttccatctttgccattgggtctacgggtgtcgccggcatgcgggttacacttttaagcatatggatgaaatagagtgcatctaacacttgactgggagtcagaatatttgggttctagtcctgggtggccctaagtaggtgaccttgggaaagctcttatttcccagggcttccgtttccgtatttgcacagtgaagaagctgatctctaaagtcctaggtcattttaacaattgaccgtctcagtttcttctgaccccacatttgggagggagtgcttctgcagtgagccgctcaggtcttgagtaaatacattttgcccatcggttcaggagacgagactaagggaggcaccaagagggtgacgggcgcccccttcccagctctccagcacaaagcccttcgcaggtgaccgcagcggttggttcgcgtgtcccatctatgggtctgtgaggtccttgatactacttttcagtccccagcccgatacctggagtacagctggtgctcaacaaatactgagtgaatgtgtgagggaaataaatgagaggcggacgctggcatccgggagctgcgcaatgatctaacgaatttctgcaaaaattacaactaccccgcctttctcctaggtttcaaggcgactgccgggtgcgaaaggaaccgcacacccctcagaggcgaaagaagcgtttcagacccgagaggcggacgggagcgcggagggaggaagctcgagccagccagccccggcgctgcgcgcgccgccgcccctcaccgcgcgcgcctctggccgccgcaagcaaggccggcgggtggcgcgcgatcttcgcgtcgctctgggcgggcggccgcggcgccgcgctggtgggtgggatcgtggcggagcgccaggcgcccaaagaggggcgagaaagcgccatggcggcggcggcggctgtgtccggtgctcacgccgcggcgaggtgaggggaccgcctcttctccacaactgaggaggccacagctgccggcccacccgccttccacgcgggccgcggctccggcatggccgggatcattaagaagcagatcctgaaacacctgtcccggtgagagcgccagcgccggcccccggcggtcctgggcccttcctaaccctctccgacctcctccctgacgccgcgctccgggcccagtctgcctctctccagcccggagcccggactccgtggcagcccctgcctaactcgagcccggacagcttccccccgcgcccgccggcgcccaccgttgtcgccgctctgtgcttcccccgcgctgggccctcctgtcctggcgccggtgccgctagtctctccccactctaacaaccccctggactttttctttcccctcaaggcccttctggcctgctgtccccacctcccacacctccaagcaggtcaccccgtgctcccttgaccgtctttccgaggcccccacgaagcccactcttgcctgcccgaaccagctgtcttctctctgctttctctggccttcgggcccctgccccttcctttgggcctctgaccgccctcctctcccagatcctatgcccctgcccgttctaaataaccctgctaccagtcctgctaagccatttccccttagatttccaacgctgaggctggttttctctttcccaggagctcccacctcctcctcttctgtctgaccctgttgcatcacccttggaaaagcccagcacccagggccgttcctctggacttctttttccctcttttgcttttcttttcattacatagcctaattggagaaaggtcatgagagttggggataaagtttccgcaaccttccctttaagatgtggaggtttttttgacagcctgtgaaaagaaccaacaacgtccgcttctgctttgcagccttttattaagcaatgttatgtcgctgagtaatttggcatgaggaggctggccggcaaaacagttttcaggtgtagccgagtgactgctgaaccccgtgttgcgattgcaggttgtcacaaccagtggccacaaaaattgggagctaggtttcacttagttttcactccttattccatgctggagttggtgatggttaataccttaaccagcctttgtatctcaagtagagagtgacccagggcttggctgcacagtggtcagtggttttcaggaggtaggggtgaggggagatgtcggtcaacatgggacacccaggcttgcactgatgtttctttctgggtcttctcattgctttggtaagcggtgtgtgagacacttttcctgccactgcatccccttttcctggctgacactttgatctgagactttaattagtaattagacccagatccatcttttggttaatcaccacgtagtaaaagaaaaagcacattggaggctggtgctggaaagtgcctttggaccttttactcagattaacgtaatatattctttttcaggtgatagtaatctagatgttccatgagtctggttttgtgtaaagatataatagtatttggggcatgaccaaagattgcagaatggaacagataacttaaccagaggagaattgtataatttgaaaggacatagaattttagggcttagagatgatctcacctatcatagcattgttgtttaagagcctgggttctttctgatttactttctctaaaatggggataagaac

SEQ ID NO: 46379 - DNA, 629 bp, Homo sapiens
aagtatcacagacattggggaaaatttctgattttctcagcattgggcaggggactgaggaagaggtcacattatagttgcaatttcaggactccaggaagaggtggtaaattatgagtcttgttaggggaaaggccaaactcctggggcttttgtgtttgtttagcttggaaaagctgcctaatcacatgtgacatttgtgtctctgtgtagtctttaccacatacaggctagcctgcctggggaggaactatgactctgtggcttcccaaacctgatggggaaagagagagacgggaaggcatatcaagttaaataaagatatagtgtattaaataaatactgtaggtgtttgataattacttgttgctgatgatgccatttgacctacaggagaatggcccacagcagagaggatacaccagtgagtcatattatgcttatttggacatgaagtttttcagatgataaagtatcttgttggaatgcaccctccttagtagtagagtattttggtaaacgagatttgaagagaatggtattcaatatgattttcttaaatgcctaccctaggccaggcactaatctgggcactggagatgcagtgaggaagaaatataaatgccttt

SEQ ID NO: 46380 - DNA, 1468 bp, Homo sapiens
tctcaaagtgctgtgagtacaggtgtgagccattgtgcctggccagttatcatttagtactgcatctttatatttgtttacatttctcctgactgcaaatggtgtcatgtatagtctgtaagtatttttgcacttaagtttcgataaatttcaactttttataatagattagtataaactttaggatagtaaatgatagactagtatctacatatattttatgcattcatgacatacctaaccttttcttaatttaaaaaatatttctaggctatcaggtttgtctgcaagttttttcaagttgtcacaaatctccaaaaatttttccacacttttatcgaatttatcaaaacttagacacacaaacatagactgtgcgtggtgacattggcagtctagagaaatgcaaataaacattcaatgtgtgttatgttcagggacgggctgactcattattgttgatatgtgaggtctccctaaattgagctaagattcactgtaatcccaatcagtttcagcagatttttttaaaaacagaaataggcaggctgatttgaaaatctatatggaaatgaaaaagacctagaatggtcagaataatctgaacaaatgaacacaaaggattttttaatgcctaaaatgaagctgcagtattaaagacagtgtggtattggcataagtatatataggtcagatgaacaaaatagaaagttcagacatgagtcatagccacgtgcgatggctcacacctgtaatctcaacactttgtgaggctgaaatgggaggatctcctgagtccaggagttcagccatggcaatatattgagactatctctacaaaagtgtttaaaaaaaggccaggcacctgtaatcccagcactttgggaggctgaggtgggtggataacttgaggtcaggagttcgagaccagcctggctaacatggtgagacccccccccccgcatctctactaaaaatacaaaaatttgccgggcatggtgatgcaggcctgtaatcctgcccactcgggaggctgaggcaggacaatcgcttgaacccaggaggtggtttgtagtgagccgagatcgtgccactgtactccagcctgggcaacagagtgagacttcgtctcaaaaacaaatgaacaaacaaaaacttagttgggtgtagtggagtgcacctgtagtcctagctccttgggaggctgagggaggatcacttgagctcaggaggttgaggttacagagagctatgattgtgccagtgtactccagcttcggtaacagtgagactctagctcttaaaaaaagaaaaaagagttaagccaggcacagtggctcatgcctgtaattccagcactttgggagtccaaggtgggaggatcacctgaggtcaggagttcaagaccagcctggccaacatggtgaaaccccatgtctactaaaaatacaaaattagccaggcatgg

SEQ ID NO: 46381 - DNA, 1517 bp, Homo sapiens
gagaatcgcgtgaacccaggaggcgcaggttgcagtgggccagagatcgcgccattgttctccagcccgggcgactctcaggttaaatcgtgttcgatataaaagtctatatcgatatagacttttcgatataaaagtctatctccctttgacaggtctgatcgaccctccttcctataaagacaaaagttgtcttaacatctaagaggaaccatattgcggtgaaaggggtgctacgaatcctgggttttagctcttgcactacgtctcagtgtgacattggatcccaatttcctcaccaccaaagccaacgggctattataactcccttagaagtagctttaatccctaaagacaagactaaaaatattaacagtgcttgagcctctggaaccgaaccagcactggagttttgtttggtcgtcccctctcttccccctcaagattaacgatctggagggaattctggtgagttcgagttctcgtaacttgttagggactaaccagaagcccggcgagcagccagtaacacaatctctgggtattccttcagcctcatcagtacatctcttcctacctcgccttcctccgctgcagcttctttcaagtccacatctgcgtctccgtcagtttcctctgggattccatcggtgtcggtagcccccgggtccccgggcacagcggccgtctcatccgactcccctgtctctccacctttgtcggagggcgactcgtgggcatcgtccatcacggataggattggaggggagaggagatcgcggagatgcctgaggcagaagctcggaaacccgagctgcacaggccaggatcttacttcctgtcgtcgcgcagcgatgacatcacccctaccgctctcctgaggggtcattttgaggcgcgcgtagaggactagaggactcattttaactttggtttggcgacagtgggaagcgggaaaattggacgtaaagagctcagactatggatcctcctcgctaggaaaccagcacttgtgaaggagcgcagttttgtttactaaataactttttccttttcgcctgtctaaaaatgcaatgtcagttaatcccttcgttaacccctcagagtaaagttgggggactgggagaaaactcagttccgttgtatggcggtgtcgtggaatgaggctccccgggactggtaaactttcaggcaaggactcaaccttgtatatttcaactggcccgaaaccgcgggcctgtgtgtacatagaattgctagcatttcccctccattccgcaagcaccttaacaacaaaaagtcatatagctcgagcagaatttatccaattcatttattcatccacaactattgactgcctacttcgatttagaaacagtgctagtaccagggaacaaaacacacatagtttctacccaattaaatgatttttttcagttcgccagtactgaagattgaggtttgtttttacaagtctgacacttttctatcagtttggttaatctcattaaaactaa

SEQ ID NO: 46382 - DNA, 1328 bp, Homo sapiens
gcacctattacatatttaatttatgcgtgctgaaagaatggacttggaaatgtaggtgcgcgttacatttatctctttgtttctacgctgcctggacgaattaccgtatttcctgtcccaggagctcccaaaacctttggggaaggagcgcacttcgggaggcgcgtacaggtgggcctgtttgtccctttccacctgcataatgggggcccacaaggcgctgtccccatgccccgagaggcgtgtctcggcacagcaaagtccacctgcgctggtccgcggagccccgcccagctaggtgagctagggggcggggcgcgggggcgcggtgacgcgtgacgccggatcccggaagtgacgcgctcgtggggaaaaggcagggagggggtggtgtccccagccggtttggggggtgcgttgcccggagacggaaagtttgggagcccgagcaggctcggctgcagcctcggggagggggtccagcgggtggcggccctggggatggggaaggagcaggagctgctggaggcggcccgcaccgggcacctcccggcggtggagaagctgctgtccgggaagcggctctcctcaggctttgggggcggcggcggcggtggctctgggggcggcggcggcggcagcggcggcggcggcggcggcctcggctcttccagccaccccctctccagtctgctcaggtgggtacgcgccagggccgggccgctgcctgcagaccctttctcccccacccgtctcttgggtccccagagagatcgggggtcctgagactcgggcggggtgggcttgtggcgtgcccggggcgaggcaggcggcccgcgggccagggtaccggagggcgcgcaggtccgagtccacgctgctccgggctcgcctggtctcccgttctgacccggctgcgaagaatggtgggagtgcccaggtggcagcctccgccgcatggcacagccagggttcactctcgctcgctacagggtgccagctatcgtagctcacaaaagccaattaagagcaaatatgtatatcttatatatatatatatgagatctccctcacctcctgcagaaactcctacgccttgtagaatctcgaggctcctctggaggaaattctattgattttcttctctgaggaacttggaaccttccaccaggctacacaggacctcgctttatttttttttttccctcgagacggagacttgttctgtcagccaggctggagtgcagtggcgcgatctcggctcactgcaacctccgcctcccgggttcaagcgattctcctgcctctgcctcccaagtagctgggat

SEQ ID NO: 46383 - DNA, 1013 bp, Homo sapiens
gagtctactgagtagctgggactacaggctcatgacaccatgcccggttaatttttgtattttttgtagagacggagtcttgccatgtttcccaggctggtcttgaattcctgggcttaagagatctgcccaccttggcctcccaaagtgttgggattacaggcgtgagccatcacacccagacaggactgaggtgttctgtttgtgaggcctttaagggtcctattttatgcagaatcatggctaccaaaaagacgtctgtggaagtataaggtggaaagtataaggagaaggtagtattctagctaagtagctctgaaaatacctatgggtcctatatacctaacagtaatagaataggcctattactttttacctacaaatgaaaatactttagatattgaaattggcagagattccacatttgttactttttaatctattgctatctccataattgtgtgtttaagactcagctggagaatagttttcttgctagtcactcatcagcagtctctcttgccatctttagcagacccagagcagagtttcaaaagacttttcaagtagatgatccagggcttagtgcttcattttaaggtttaagtttttcttttttgtttcttttttttttctttttgagacggcgtttcgctcttgctgcccatgctggagtgcaatgcgtgatctcggctccctgcaacctccacctgccgggttcaaacaattctcctgcctcagcctcccaagtagctgggattacaggcatgcgccaccatgcccagctagttttgtatttttagtagagacgggatttctccgtgttggtcaggctggtctgggactcctgacctcagatgatccacccgcctcggcctcccaaagtgctgggtttacaggcgtgagctaccgcgcctggcccaagtttttctttttaaaagaaggagtgtataaaaaatcaggtccagtacttttactagatatgttttgtcgaccaaattgacagagctgtc

SEQ ID NO: 46384 - DNA, 588 bp, Homo sapiens
agattcctgagtggctgggatgacatatgtttttgaccaagactctgaatataaaagtaagaagaacacagttgcaactaaagttgcttgttcacttattatattttaagcactgtgttgatgctttacatgtaccccatgtaaagccatatgcattggcactgttatccccattttacagatgaggaaactaaggtgagagaggctgcgtaatatgtctgaggtcatagagctattgagtggatgagtcaggattcattctggcaccagaggtcacattccaagtactacattgtactgtcagggctggagattttgtaaacctaccaattcaagctattgttttcacacgttgttttggccacagacattgccttcccacctcaatgagcacacctggctttgcattttaagcagttttgcagaggtcatatctgtctttgcaggatgaagactttcctccacacaacataaaagcccttatagctctgtgactcatcctgacagacgatgagataggttctgctgtgaggttgactgtgtccctgtgagcaaacttgtgcagagaaagagagcatggaggattga

SEQ ID NO: 46385 - DNA, 1411 bp, Homo sapiens
agctctaaactgagattgttttaatgaaggcaaagtacaaggagttctacaggaagttcttgaagagcctgacccggcctgggaaggtgaggaagaagttccctgaggagagttttgctcaacactgaatatcaattaaaaaggcaagatgggatgggggtctgggaaagaggcagaaaggagcttggtcttctaggaaagaaggttctgtatgtggaatgcagaaaactgggaaatgtctgttttttaaaaaatcaaccaggctccactgtgatcccacactcttcccactgtttgcaatgcccttgcttccctttttcttgctaatggcattccattcatccatcatcactttacagtataattttttgttttcatgtctctgacatcctttaggacagggacttggtcttatttactcattgtaagatgtttagaatagcacagcaacctttcttcttctttttccctctccccatagtgccaggtacttactgtgtgcttgctacttgggaagggggcacaagacaggcacagtgcctgttgtcatggagcatgcactgtaatgattgttttgctcattgagtaaatacgctgaatgactcacccttagaatcagaattgtggactctggaggccattttcatagagtttcagcagttctgtgccttctttacagttgtgcaacagaaacaatcaatgctcaagggttaagaagccactaataaagtaagttgaattaaataagataaaggccccccaaataatagtgaaggcactggagatataaggcttgttaaaaatataatgtatatgttaatcctcatgaatacatcctaattacagcagagaactcttgtagtgttgtccactttgtggtggtgtgtttctcaggctgtcctgtccgtgttcatattggaatgacaatttcacactgtactcattcatgtgctgttcactatccacctttctgttatggggattgagagggagccggtgtctcacttgcccagtatagcaataacttaaaataataatccttagagcaaatgtacaaggaggtttcaaacaattcgtcattgctcttgggaaacctatggatttgtgcgtgcgtgtgtgtgtgtggtattgtgtgtgtgcattcacattgcggacaagaaacagaaggggttagaacagaatagcaagaagagcaacattggatataactgctatgtttatcctgaagataactgtccttggcaggatagaagaaggaactccttgctggctttgtggaacaaggaggccatccttccaagtttctcgtgtgacttgtgtcacgtgtgcaattaaaatggagtgtcacctttcttgcttgtgtctctcttaagagggagtaaatttttccaagtcactgctttgcagaaca

SEQ ID NO: 46386 - DNA, 1705 bp, Homo sapiens
ggggtaaccactaagactcctcatctgtaaacatagttgacccttttggttctaagattctctgagctcatgaatagttcttgagagttttgagcaaactagggaattgtttggtataggtgcaatagatcccacttatagagaaggttaagttgaatattatggaatgtgagctagtgctggacatagtgttatttactctgatgatgtgggttaaaatctttaatggggctgagttcatgcaaggaaagcccctgggtgtgccagtgtagtgctgatgttagattctgatttggccaattatttatgctacttcagggcgaggtatttgagtgtacagtagtagctggcctcatgagctagtagtgtcagatttctaggatgttagggaagtctcgagagaactgcaaatgtctcctggcattgacaaattagaccattttgttttcagtggatcaactaaggttaaacttaaacaaatatgagcagctgggagattttggaagaagcaagatgtgcacattctcaaaaaaaaaaaaaaaaaagagagagagaaagaaaagtctgtgctccctgaggaaggaaggatgaggcgtggaactcggaatggccccctccgaggaaggaagcagttatttctctgccgttttgtttctgttaaggaattccagaagttgcaggttgtggatcatgacctcttttttttttttttttttttttctgttgctgcttgccagaggaagggagggcgggtggcctttaaataacactttggcctttatggaaatgtatcagatgttccaggagtgggtctccctgctcgcgcttgctcactggtgctcttacttttgcttcatgttcactcactctgtcctgacttgtgtcctttctctaggttatacttaacactcttctcgccttatatagcaaggtctggtcgttaatgttaacagaaatctaacaacagggaaggctgccagatagcattaatcaggccagtgtttggaatttcataaatgctctgactttgggtacaaattgaacattaagaacaatatgaaaactgtcttccttcctctctcttcttctctcctctccccctccccagcctatccagtttctctctctgtttctctgtgaattcctctgctttgccatatgcttgctgcattggaactttgttgatttttgccacgtttaattttttatttctctgtctctccgtccactccaagaccacaggcggagcagcagcagccggagccaggactctgcggaggggcaggacgggcaggtcccagagcagttctcaggcctcctccacggctcctccccggtgtgcgaggtggggcaggaccctttccagctgctctgtaccgctggccagagccatccagacgggtccccccagcagggcgcctgccacaaggccagcatgcagctggaggagacgggtgtgcatgctcctggagcctcccagcccagtgccctggaccagagcaagagagtgggctacctcacaggcctgcccaccaccaacagccgctcgcaccctgaaactttgactcacacagcatctccgcaccctggtggtgctgaggaaggagaccggagtggggccaggagccgagcgcctcccactagcaaacccaaagctgaactcaaactcagccgcagcttgtccaagtctgactctgatctcctg

SEQ ID NO: 46387 - DNA, 1192 bp, Homo sapiens
gaaaaaggaatccttaagaatcaaagtgctttgaaaaacagatttaggcaggaacaaccacccctgggtgatctaaacaagctaccaagttctaatgccagctgagacactcatttcctcagtggctgggggcaaaccacttaacctcagtttccccatctgtaaaatggggttaataatgcttacctgctgcaggagtgctgtgaggttttaattgggtaatggctgtggagccctttgatgtagtaagttttattaacttacaagggattccctgaggccagaaaaagcagttaaacccaagagagagaagaaaggcactgaaatgaaagcaaagctcagctaagcgtttcacctccagctccaatttcagaagtgcagagtccagctgctccactgtgagtggaaagcagtggccggggctggggactgtccgaatagcatctggggagggaaagcttcagggtcatctcagagggagcttggctttcagattgtgaagggtgaaggtaagcaagtagtcttgcttgatcaagccaggatcattctctggacccactgaggttctttgttaagaaccttctccagtaagagaattattttgctattaatccaaggtccttgtaattgaatttagaaacccctagcctctggcctcccgtttcccaacaattaaatagagaactggcctctagccagggttgctgaccagagaagaattggaaggacggcaccaaccaaaggtcagaaaactggggcattttccaagctccaccattcacagctaggcagaccaacctagactgcttggccagctctgtgcttcagtttcccactccataaaattgattgctgttaaggcccaaataattaagatttggaatgtgaaatgcactaaaatgatgaggaacaaacccatactcgcccttcagtaagttaaaaaaatcaattatttgaataattttactccaagccaactcattcagcataagagactccatgctcctcttcctcctttctaacttttgttgggtgcccaccacacaaccacagtcattcagcatcagctacatgaacacagcccaggagggtgatcaacttgtcctgatttgcctagactatcctcgttttagctctgaaaatctcatgtttcaggagcccctcctaatctcaggcaaacagggatggttgg

SEQ ID NO: 46388 - DNA, 2231 bp, Homo sapiens
atgcttattgcctctcattctagcacatggcttggttgcaagttacttaacctctaaatctcagtacctcatttgccagtggggatagtcagagtccccatctcgaaggtctgtggtgaggatttgtcataaacaggctaacagcaattgagcacttgctttacatcaaacacaggttctaagcattttacgctcatgaactcaataaacgctcatgcagcaatcccaccagggagggactgttatccccattctacaaatggcaaaactgaggcagagagagattacttggtagcttacccaaggcctgagttcttcagtgttagctagaccactgctcacgaagtggaatactgcctgttatgcttaacagagtgctggacacatcataagtgcacaacaaacaagttgcttgaggggttctcagactgcctgatttgcccagccaggaatacaggagctaggagagaagggaccagagtagacagagacaggggccccaagctgggggaagtcaccaggtctgtgtgcaacaagccaatgtgcaggttttaaaaggtgtaagtctgggcctgctcagggtgaccacatttgggacccatgatacttcgtcaaaaaattttcctaccaaatcatggtacctcaaagacaatctgagctatgagttttgaatgctgacctatgggaactcctgggattgtgccatggcttatggtggaggatcgtgctgtatgcagtgttgctattccaggtaattaacaaaccaaggatcagaatgaatcaacatacattaagactctggcccaagcagtcctctgcatccacctgaagagccagaagggagactgagacccacagaagaatgatttcatactccagcgctgtgacatcacaacccaggctctggcataggaagggaaccagctgaaacgtgggttgggggaagcctctggtcagaacagaaatatcttcagtaactgctgctggtgatagaaggggaaatggaattttgtttaaatattatgttgttttgaaaagtctgactaatgtgaaagtccctatttaaaaaggagttgactctacattgaaattggttggtgtttccacacccacatgttgactaaggccttgaaaaacaaacttcctggtagatcctgatgcaaatcacctgggagcaaatgcttcaaggtacaatctgtgagctgtgagcagatgtgcctagccaagaaaaatcctgggtctgtgtttatgaaaaggcaaacagatcccaaaaggaggcccaagccctagctggctttgggcactggccctccaggaaagaacacacagattggaaggaggccctagcacacatctctgggaccccagtgagcccctatttcagaccccctctcagaaacacagagaatgggggaagagggagggccacatggagccctctcttactgagcgtaaatgtgtgtcattcactgaatctttagcacagccccatgaagcatgtgcatattactatcacaatgtccattttcctgatgtagaaataggcttagggagttttaagcagtgtgacctatgtcccagtttgccccagagagttttgatttacgctgttgtttcagcataactggtaatagcctttcccttcattctcataagggccccatttggacattctaggttaagtgacttgcccaaattcaccccactagtgaatggcagaattgggattcaaatcctggttttcctctgctcagaaagcagaccccagggcaatttctcctcattcacaataacaaaggtggttcaggggcatgatttccaaagtctcagcagccctttgggagctgagtgcctgctctcctctctttcactgagggcctctccaagcctgtctgattgtctctctgtgcaggaaggagcctgatgggtggcgtcagtgctcagcagacaaaccaaacatgttcaccagcaccccaccttgctatgtttgttttgtctgctgagcacgtttctaccagctcctctacaataaaaatgcaagatggggcttccccatttggtccaccagcccagctcccgagccctagcctcggccagcaccacttcaaccgactgagtagacccctttccttggaagactgccctggggccggtcctgagctgtccggacttccatggcctctgtttctccaacacttgccttgagacacagtgaggatttgtctgttgtc

SEQ ID NO: 46389 - DNA, 1633 bp, Homo sapiens
atgtctgccctcaaaggtccaacagtctaagtgtcctcaggctgaacaccctggacttgtcattgactaatcgttgattcttatttctccagccagtcagccaccacgacctgttgattttctgcatttagaacctcctgcacctacctgtctttttctctgcatcattctcagcatggcacataaccgggggcttggcaagtgtgggcacgatgcagagatgttgggaactattgtcagggatgcccagctgggccaggagacaccaccaggggccttccctgggggtggtaacagttttctttttttttaatcagttaggactcttgtttaccctttgtacccagcgctagcccagtgcctgacacatagtaagcactcaaaaataatctgggggtttgattaatcaattgattaattaacttgatacacacacacacatgcatgcatagagatggcctctctttttgccgtccattcacatacacattacctttcattacagagacaccaggttacaaagaaaacccttaagagtttgctgttgacttgagccgtgtcacttgtaagaaggacaaaatatgtatgtggtcagttcgaatcccaggcctgaaactggaaataaactaaccccttgttgaaatcgcacaggaaacctgaagggaggtgggggagacgggtggcaggaaaaatgcctgagatcttacacaacttgtgcaaacagaatgacagggctaggcagccctgggagtccaggaattaatagccctgccgaggctccggggctctggagatggagctatttaaagtcaagaaatgtcatttccacccacagagcctgccccagttgcattatctggagcctcttcagccccggtgttctggcagcctcctggcctgacctcccagtggcgggaccacggggctcaaggccaacctgtcatcactgctctgttgggagattgtgggggggtggggggggctgaccttagcctctcccagttcctcctcttcctcttctctgctcaggcccaggacaagctgagtggacactcaaggcccagctcacccctctgcaaaggctactgagagtactaaggttgctgcccacatacaggggccagccagcctggccagcagggtaggtctggggtagtggatggggagagatggggtgtggagacatagacccttgcccaccagaatcatactcttgtcctgctatatgacctcaggccatttgcttaacctctctggaccctcatttctttacctggactgggaaatgagagtcttcctctccttgccctatttctggggaaggccacaggagatcagagaagggatgtcttttgaacctttaggaagaaaagcaccatagaaatccaggtattacctgcagctcctcctcccctcccttccaggcaaggtaatccaggaatgcttcctccggaggcaagaaggcaggaagctggcatttgaagtgtcagtgggctgtagactgtgtgacagagccatccagccccatgctcccaggagctgaggttcacattcttgccaggcacctaaggcaagaactccctcacatcctgtctgctctgatcttacatatctgttctggctgatgttgctg

SEQ ID NO: 46390 - DNA, 1099 bp, Homo sapiens
ctgggaccaagtgtggtaagggagcttactggggagcagggatgtaggaaagacccagtttgggcctgactcagagcaggaccctttgtggcctcagatgcatttctcaaattatgaggcagccaggatgctcctgcccgctgtcctcccttccttggttccaggctgaaatctagaaggatgccaggtggggccagcaatcctcctgcacacggttttgaccctcctatccccccaagtaggattgtgtttgttccctgacagagattctccctgaatcgggggttgtggcggggagtgggaaggggagtcccaggcctgggtggtgggaaatgcgggggtgggtggctagcgcggccgactctccctcagtcagctgcccgcagggaacgtattaccacggccagacggagcagtgtgtgccatgcccagcgggcaccttccaggagagagaagggcagctctcctgcgacctttgccctgggagtgatgcccacgggcctcttggagccaccaacgtcaccacgtgtgcaggtgccaggggaacaaacaatacagagtggggtagggtgggcactgggatgcccatgggcatgggatttcccaaagggcaggcccaggctccaggccactctcttagtcaacatcctgtttgtatacctttgtcccctgagatcgggtgaccccatggggatgactcaggaccatccccatcagagttgggcccttgattcattgcaggtcagtgcccacctggccaacactctgtagatgggttcaagccctgtcagccatgcccacgtggcacctaccaacctgaagcaggacggaccctatgcttcccttgtggtgggggcctcaccaccaagcatgaaggggccatttccttccaagactgtgacaccaaaggtgagtaagctactcacctccctgggggatgccccaaccccaactactcccaaaaaactctccaatttcccagaggggacactgacccaccattttctccaaaccagtaatgggcccagctacttgaccaaccataccatcctgcttccaggacccaccctgcccctccactagtcccaagcttgggaac

SEQ ID NO: 46391 - DNA, 2206 bp, Homo sapiens
aatcgcagcccctcccagcagggaaatagtaaaggggcttggtttttatgttcaacccaaagcaagcctacaaaagggagtagtcggtttcgagcctgacggtggagctgacgcgggaatgagagagaacctgagaagaccgccagggcgccctccctgcggaggcgagtccctcaccgcccctctacatcgtccttttcaataaggagctcttaatacctgcaactgcttccttcaaggggtggctggaagatcagtaggcaaggcctgcggactgcgcaccttaaagcgcttcgggaccgtaagacagtgagtgctgagcgcgcggccgggaagaagcctggaggctctgagctcggaggacagagaccgaagccccagggcctgcgtccctcacaacctgcgcctcctgtcctcccgcgctactcccgaagcgcaccttctcgcccgcaggccgcagaagtgatgacgcaaagccctcggggcctccgccacctcctcacgcttctgctggaccgaatccttggaatggacaggtagcggttcccgattgctatagcgacgacccggctccgagccgcgcccaggccctgacccgggcgtcgtgacgtcagcacgccttccctgggcgctcagcctcgctggccatgcgtcaccccggccttggtgggggcggggctccgaagagctcggttcagatcccggccgcctgggctccaggagccccggaaccaggataagttggatggctgccgcggcgaagcggggggcggggtggaccgtgcccggtattttctatacgggttccggggcccggtagaggcgcgccaagaggaaaggaaagtgcggcggccctggaacctggatatcgcgcgaggcaagctgcgcgcgggcgggcgggctatggcgcaggcgggttgtggggccggcgctggtggcggggcccggtgcatggcggtctgtcggcggagtcgccctcgggggctgtcaggttggtggctgcgggaggagtgggccaaccatgcccagggcgggaggccgggcgggcgcaggaccccgggaaggtcccgagcccggcgtgcccacctccctccggccctagcagggcggcctggccgctggaccgcggccgggccccctcccccacccagggtccctgcccctcttttccgccttgcggctcctcccccgtgactcccaaacctcaccccgtgacggcgcccgcctccacccttgtgaccccacaccccacccactgaccccaagacctcaccaggtaaccgttggttattattcattggctgctaacccaggaatttccccagcacttctcagagacccaccaaccagtgactccctcagttttaatccggtgactcacatgaccctgagatccccacactcctccttagtgacccccaaacctgggtaaccctcctggcccagtaacccccccgattctaccttgtgttccccacaaactcggtgactcccctcaaaactctgctggcgactcctaagccctactccaatagttttccacgcactcaccttgtacacaaccctcagtatctttatcctgtagccgtatgaccctcgttccacgtctgcctttatcctaaaatcacccccactggcatctctctctgcgatcccagcccttcagtgtcaatcagcacatgacttacaagcgtccagcacctttctggtgctaaggaggatatagagattaatatgaagtagtaataattggaggcatcagagaattctggatcaatccagaatccagtcaatccagtgtgtggtcccagctctgtcactgctgtgctttagggacctgtgagaagtcccctcctcagtctggacctcagtttctcatcatgactgtgatgaggttgggttagatgatctttgagtttccttccgtctgtgaaattgtgaaattatgcagttctcagtcaagataataattttttgcaatcatttttgtaccccaccctggaaatttcctcttgtaacctcatcccaggatctgcttgcatcatgaaccttactccctcattcccggatcaccctcttcactcttcatagtgcatacccatttcccttgatcaggccccatcagttaacatgtttgcaaagcagtatagcagagtgcttcatttgggggcattgagttcataacaaacctaggttccagactgat

SEQ ID NO: 46392 - DNA, 375 bp, Homo sapiens
cttagccccaggaatccacaagtctgtatgctctaaaaccatctagcccagttgcctttcatcctattttttagtctcagtgttctactcccaccaccccaccttctgccatcctcagccacattctgtgacctgaaaccttcatataatttgtccttcatttagtgacctcttgatgtgactagcttcaatggaatcggctccttccatcccagcatgaagcaatcctgtataacttgcacaccctcccattctaaggcctctcctctcatacccttgcccagtatcctgtgagatcctgcctctcagattcctccctcaccttttcaaacccggattgtctttcacccttccacagggcctcctcttcctgcc

SEQ ID NO: 46393 - DNA, 1423 bp, Homo sapiens
tggaaatccattataaaaagattaaaggcaggggcagctaggtgaacaagtgcaaatttagcactgttccttggaaaacacctcagagcaaatgagctactgtttctgaatcagtactgttatctaggttaagtagtatatttagtcctaacctttctctgacctcttctgtttgtgagatatcaggatgctaaatttaaaaattagcaccctgcagaattctgtacctagtggcctgggaattgtaacatcctggcatcaagcacctgttgcactgcttctcagcttaggtatggtttctggtggaatagggctggactggacctgagaagagggtgaggcagtaaggaggaaagagggactgagggctggagagagaccagagctctactagggtcttccccttcttgcctaaaggtttcaagttactgggagatcctaaaggtatatatattcattcattcactgattcattcatcccacaaatatttggtgaatatctgctgtgtgccaggtacttttctaggtactgggaatagagcagtgagctcactgtttgaggaatggacagggtagagacagacaataaacaaataagtaaaatatatattgagaaaattaagcagagaagggagatagaaagtgccaggagtaggccaggtgcagtggcacacacctgtaatcccagcactttgggaggctgggttgggtagataacatgaggccaggagtttgagaccagcctggccaacatggcgaaaccccagctctactaaaaatacaaaaattagccaggcgtggtggcaggcacctgtaatcccagctactcgggaggctgaggcacgagaatcacttcaacccaggaggcagaggttgcagtgagctgagatcacgctgctgcactccagcctgggcgacagagcgagactctgtctcaaaaaaaaaaaaaaaagaagaagaagaagaagaaaatgccaggattctgggtgttaaaattttaaatagggtagttgaagaggttcccactaaaaaggtaacatttgagcaaagacctgaaggaagttagggggtaagtcaagcatacatctaggggaaatttattccagtcaggaagaacagcaaacacaaaggccctgaggcaggaatgtgccctatatattcaagaaacatgaggaagccagccaatacggctgcagtatattagtgagagaagaaatggcagatgttgcggtgggggtgaattgggggcagatcacacaggccactggcttgtagtgtgagttgtgagtgagatggtagccattagagaattctaggcagataaataacatggcctgacatattgaaaaggtcattgtggctgctgtgttgagaataagctataacggggcaaaaatggaaggagagaaactggttaggaggc

SEQ ID NO: 46394 - DNA, 2333 bp, Homo sapiens
ggttgggataataggtcccttccaggtcttaaagatgtggattaataagaacagaattttctacaacaataaggaggatgtcccctattttaggtgaataagcgtattgcataagcacatgggaagaaaggttaagaactctaagaccgtaaatttccagttgtagaagcctcttgaaggcggaaagcccttttttgaaaattataggcgatatgatctcctccagtggacctagcactgggttaagagtctctccagacttgtcactgcaagtcacgtaccttttctaggactaagtttcttcactggaagatgaggaggttgcactagatgacctagaaattcccttccagctttaaattccctcttgtgtcacttgctggacttgttctactggacctggcgctcccctgctcctcccttagctgctacgtccgcatcccgcaccagagggcgccacaggctggcccggggcagcgtgcggtgggcggagaggcagaattaggggagtctccaggaggcgtggtgattggccgccgccgggcggaagggggcgtggggagggaaaggccgagcagcgcggtgacgtctcgctggcgggggcggggccgggccgcggagcgtgtgacgctgcggccgccgcggacctggggattaatgggaaaagttttggcaggagcgggagaattctgcggagcctgcgggacggcggcggtggcgccgtaggcagccgggacaggtcagtccgagacgagagaagcggtcaggcaagtggcggagggaagcgccgggcctgggccgaggcggccagcgggactggggcgcaaggcccggcggcggggaacggggtgcggggagctgccggggtccgcggacagcgtcacggcggcttcctgatgctccggcccgctccggtcagccgtcgtgcgttgccatgtaggcgccccgctgaccctgcgcccccccgcccttggacccccatagctgcttgagtgagtccgaaatacgggcctccttccaccctactctttgccccctcttgggcctggtggcttcgtcttctcccacttgtgagaaccccgtctcaggcccgggggcctctcccattcccctcccctgcctctgacctcttccttcacccgtttctggtgttcctgaatccactgccctatctagcgagagtcttctctgggatcttttcctctgtccccctcgttatccttgtctcctgccttcatcctcccatccttgctctctcaggctttactctctctccccatccctgtccccttcttatctgtggtctgatccctcctagtattatgggtccccatcctcttccccagggtgttcctaggctttttccaactccgtgcctgcagtccctgtctccctaagactctcaccttggttccctgagaggccctgtttttgctcctttttccgatttccttcgtatcaattctgtcccctacattcctgtcgcccacctccttttctctccctgttcctttcccctgcttcagggagaagccttagctccacactctactctactttcacttgacctgcagttgacataaccatggggtgggggtggaggtgttcagaccttgatcgaattaagaggctgattgactaaaggaaataacagattgtgtgggagaatgtacgtgggtgttgcatcagagatgatgtccaatttgtaggccattcttcttatctcagctttaatacttcccctttatggggctgttgacttccaggaacccttgggggagacggcgctgagctggatgtgtgccacgggtagccggaggctttgtccaattcttttccccttccaggaaccggggttttgtgtctttccactctggatgtgtggaatacacttataccatgataccccagcctctctctgccctcactcccaccctccaccctgtgctccatccgaaaggactaagagaattctccagaagctgtgctccagaaaatacttgtggtcctcaaccttttttctgtgtactggctccagaacttttttttttcccgtttgagttttgaaatagattgctggcctgatagccctggggctggcgggcatctgtccccttttattattggtggcttgaaacagctgctgattttctctcatatctctttgacaatctttggccaactgaatgtgcctctgatgttggtcactgaacatgttctcttggagtctcttctccctcttttttctttgttcttttctgaatctagggaatccaaattgtccctctttttccctgggagcttaatttcctctgtatccaggaggaacggca

SEQ ID NO: 46395 - DNA, 2744 bp, Homo sapiens
agctgaggtgttcaacgcatagcgaggaggccagcgtggctggacagagggagggaggagaccaggagatgaagttagagacgagattggtggccctgaagtgccataacagcttttactttgcttggcattttgccccttctttctcctctcctccccctcacaccacctcacgagttttaggcccatgttcctcagttcctttccatgggatatttatcccatcatacttagggactaccagcaggcaaacatagtcacttaaaaatattagaagagggggaaaaagcagcctcctctttctgaatgatgaaagcagttccatggcagtgttggcatggcactgtgtatctagcagtgcaggctggccattcaccgcgtagttctgggtggtttctgagaggttcccctccatggccttcttcagcccatgaggaagtccaacccccctggcccgctgtttctttccatttcacccctcttggtctccccagtgggactcccacagctgacttctatccccacctgtgtctaatcccctttccatggctgagccggtagataacctagtaacgatctgagtagaatatggctcccacatgttgaatgcattgtgctgatcactacatatatcactttgattcacacaacaaccctgagaggtaggaaccattgtaccccttttagagatgaggatactgaggctcagactggttaggaaaattgcctaaagttgcacagctaatgaatggcagagctgggatttgaacccaagtgattaaagcccatgtctttgatcactacatagcagggccttctaggaaggatggctggctggatctagttgttccagtttggaaagtacctgcttgactggccagactgctgttggcttcagaaaatagcagtctcttgttggtcactgagaagaggcaaaattttggcaggccttggggcctcctgcagagtctcattccaggtcagtggacagaggaggccctgagaatagtcgtgcatactggctccctggatctgctccaagacagtgagcagcccctagaaccacaagagactggccagccaagctgtgggcccggcctgtagggtggaaggaactcttaagagaaaaaaaaaatctctgctgtgattaatcaacagcttcagtctggtgaagtgaaaagagaaaagttggcccagatgtgcacatagggagagaaataagggagggaaattgcctttattcatgttctcccttaggccagtcgttaccccacggatgagatcaccttccttttacaccagcctgcaagaggtgtgtagtggtagtctcattttacagacaaggtgtaggatcagagaggttaactcgcccaagtcaaacagctaacaagtggtggaattggaatttgagccctgttcttctcagttcagtagccctgctgttcttgctgatgtcacctcagcatgggctctccaggtatgtgcaaatagttatgcaagtgttgcatccacaggcttgtgagcagaggctgaaagggagccagggctcttggtacttgccctctcaacatgggccctgcctaagctagcaggactcactatacccaaaccagcagtggcattatatttttctcttttcttgcaccttgccatccccgatttatttttagagagccttttctatttctgttcccatttcttggcttggatgcaggggctggggtgcagggatggcgctagaaatcagaagaggcaggcatagatggcatctcactggtggccttggctggtctctgggaactgtgcccatctgcctgccctgctggctcctcctcaggccagctgtaggccccagggatcatagagctcgggtagctagaggctgggagggcaggcgagacagagaaacagccacacttctcatttctttggcttctcagagggggatgagcttcctcctggaacagagaagggagtagctcactgcctgtttctcagggttaggttacggacttctagggaatatggggtagtgcttaagagccagactctgtgtggcatgggggtgataactgtagaccctccacctctggggattaaatgagctcatacatgtaaaggcacagaggaggcactcactgaatgatgattgtttcattagtgtctttagaccctcagcacccagcaccataggtggatgccagtcattattggttagaccaaacagaacttcaaggcagctgggcatggtggctcacacctgtaataccagcactttgggaggccaaggtgggagggtcacctgaggtcaggcatttgagatcaacctgggcaacgtagtgagacccagtgtctatttatttaaaaaaataaaataataataaaaaaagaaaaataactttaatgttatttttgtcgtcctcttcatctgaacattggcctgcgtaggtattaacctgagtccagtgattgtttgtggagccccacagggtacttcccagtgacagcagcctggagtgtgctcctgccagcccctgcctgggccctggaaaaggcagggcagtgcagcgaggaatcttctggcctaaggatgcctgtaaccaccaaaccttatgtttagttttacaccttgctgagggtctggcttttggatatgagctctggagtggtaggggtctgtgtcccatggggacaggtggttctgggtgttgggcacgaggtgatggaggaagggcctgccactt

SEQ ID NO: 46396 - DNA, 4942 bp, Homo sapiens
aactcacacaaccctattcaggttatcatcattccctatctgattgatgaggaaactaaggctcagaaaaatccatttgctcaaggagaaacagtgtttcagttacctactgctgtgtaacaaatcacctgtgaaactcagtagtttaaaacaaccaccatttatcctttctcttgattgtgtgaattgggtccagatgcttggttctgccccacatgatgtcggccaagcttgcccatttgtctgtgtttagctgcactgtaatgtccaaggcagcttctctttgcatggcctctaatccttcaagagtctatcctgaacttcttgcagcatggcatctgggggccaagacagtggaagccagtcgtgttgaggcctgggctcacgtcccagaacatcacctcaatcatgttctattggtcagagctgtcactgggccagcccagattccaggttgggaactagacgccacctcttgatggaaagagtggcaaaaggtttgtagccatatttaatccacagacagccggtagtggatacctggatttgaacccagatctgtgtgactcagactcacagtctgtcatgccatactgcatccctttctgcttctggttccttgggagttgcaaagcttgctggctcttttgtgtggttggagagggctgatttttcttgtggtctcccacagtggaagttgtactagtcatcccccttttcacagatgagcatccaagatcactgtgtcttagggaaccttccaaaataggtttgctctagggatttgctagcttcccccaagcttcagcagtgatagccagacatgcatggaatttccctgtggagtttccctttctgcgcttagtggccttttgatgcacagtgctcactgggtgggattcctgctgcattgtagccagatgtggaggctagccctattttgagttatcccagatggtatccagcccagtgagtcccatacttgactcaactggcatattcaccagggagttttggggaaaatgtagattcctgggccttcctcatgcctattgaattagaattcccagggatggcgtccaggaacctgcctttaaagctccccattgatttgggagtacagcctggttgggaaaccaatgacttccagaggctggcaccctccctcagcccagtcatttcagaaagatgcctttgaagtcactgatcagaggaggccacatgggagagaatgatttgtccagagggcctcacacttcacaaccaggaagtgactcctgaaagtgtccaggaagtttctatttgaatctgctcaaatctttgatgttgttttgcatgctttgatagtatctgagctttatggtggcctctgggtgtttttctttgaaagtgtttgcagagagtagcaagctcttccagcagtcagcagacactccctaaccaggagctacttggtctgatttatttgaaatatgaaattcctttgcttggctgtctggttggtatctttggtgtgaagaatatgacaaccctagagatacctaggttagcacagcagttggacctttctagtcttgtgccttggacatacttaaggtacacttggaaaagtagattttaaaaccctggataatttggtttgccagttaaataaacttctatattttagaatatttggaaaataaagataaatataaggaagaccataaaattacctagaactttcctctcagagaatttccacggttaatgttttgaatggctattcatccttcccctcatgacccttcacaccccctctttttgaaaaccatattgaagtcatattgaatgttactttttagcagttttgttgagatgtaagtcataaagtccacctgttgacagtgtgcaatttgatggtttttagtatttacagagttgtacaaccatcaccacaatctagttttagaacattttcttagtcccaaaaagacatcttataatccattagcgtgcattcccgcctcgatgccccatcccgcccttactccagcccaagactaccactcatctgctttctctacgtacagatttacctgttctggacatttcatataaatgggatcatacaatatgtgatcttttgtgattggcttctgtcactggacataatcatggtactgttttgaaacctgctttaaacatttatatcctagcaatttgaatatagttttcaagaatgcacttttaatagcagagcggtattcattcttatgagaatatctaatcttatttaatcagtcctgccaacagacgtttaggttatttctcatcttttgctcttatagccagtgctctctgcactcagaaattattttgttgatttattggttaattgtccgaatctgtgactagaacaaaagctctttgagaacagtcaccttctctgtctcccctactacttggcatagttcctggcacttggtaggtattcagtttttaaaggatgtgtatgtgtgtatatgtgcaaattttgaatgaatcaaaatgtaaggatattaataaatgttgccatattgccaaattctagaaagttgtactaatttaccctctcactgcagtataagggtacctgactccctgttcctttgaatctgggttaatttgtacaggaagtcctgtgatcttttgaatgatgatattctctgacctgtcaaccagttagtttgggaattgatgctgtctgtgtcctgaccctgtctgtgggccaggaagggtctggctgttgggaaagatggtggtgtgtgggagctctagctgcccgggtcctcattgtggctccgtggtattgtatcgtttcctgttgcccttagaaaggctgcatcgtgttgtctggccacttcctctattgtgtgcaggcatgttggggagtgagtagagttgggtggataaagtatgtgtaagaagatactggttatggctgctgattggagtgccttttgaagtcgtcaggagagatgtcactctggaagttcagtgtcttcaaaaatagaaatgaagaaatgcttccaggaagtctgatgcaactggcccagtctgcccccatctgagggtggtgggcacccacatggctggtaaacgcttcatgagtcacccactggccacagtccctgctcctctccacacacttcctgtctggaaaagcctgctacccgcccatggtgaagagtcaccccagagaacttgccagggatgcagggcaggtcttcccaggtcacagcagcagcctctcgctcatgggtttcacagcagttcttctccccaagatgagttgtggtaactgctttttagataaatatgtggaatggatggttgggattggaaaaaaaaagagcggctagatggcaaggcagctcttgtgtgtagcagggagctcacacgagccccatggtggggcagttaaggccccagaattcaccttctccagcagctggctgctcattcttttcttcttctcgtggttttcccatcacatttcccttggggtttcttccaggccttcccctactcaccccacaccctctcagaagatgctgcctcatgtaacttggccaagctctcaagcattacagatgcctttaccttcttttctttgcatcttagaaatcactcacatgttggtctctctcacataattgctttttattattacttcagcggttgccaagtgcctactctatgcctagtaccttgttagactcgggaatgatgcagaagaaagagactggaccctgccccctaggagggtaaatgtctgttctcccatggcctctgtttcccttcctctctgactgcgcctttgctgccctggttcctcttcctctttccgctgcctgagtgtcaacattcttcaggcttctgccctctctcctctccctccacgcgcttgtcccttcctgtggctgtgaccatctgctcttatagctaccaaatactaaagttcttttctcctgaaaaccaggtccctgtgtccacctgcctgctggagtgtgcagccttaaaagcagagtccatctttgtctctgctctttgcatatcccctttctgttaataatccgtcattctctcagtttcccggagccttactgacagctttaaacctcattcctctgccatgcacaggtcgttcctcccgttcttttgagtgtttctccccactgattttcctgcctgtagtgagttggatggttgcccctccaaaagatatgtccaagtcctaacccctagaacctgtgaacatgaccaccttgtttggaaaaaaactcattgcagagattctttcctatgctgcagacgtacatgaacctgtgctcattgacctcctctctgggcctggccttgttggtctctggcttgaaatagtgactgtacttctagtccacacagtgattacatatttattactctgtttgagctcccctagtccaaaggcaaagttcactgcctgccctttccactaactcctaggtcagacttgctaggttgtgtgcacagcagctacaagtgtggtttctaaggtgggtctgggtttgaatcctggttctgtcatttattagccaagggcctttgacagattgtaacctttctgggcttcagtttcctcttctggaaaatggagctaatggattgttgtgagaattagattgcatagtgtctagcactgtgcctgacactctgagctttatttttatttatttttattttttgagacggagtctcgctctgttgcctaggctggagtggagtggcatgatctcggttcactgcaacctccacctcccaggttcaagccattctcctgcttcagcctcccgagtagctgggtttacaggctcccgccaccatgcccggcaagtttttgtattttttagtagagacggggtttcaccatgttggccag

SEQ ID NO: 46397 - DNA, 4044 bp, Homo sapiens
tgtttctgtaaaaaaaaaagaaagaaaagaaaaagagaaaaaaagatgtaacattaaatgcgtggtttggtggtttggttgggcacagtggctcacacctgtaatcccagcactttgagaggccaaggcaggaggatggcttgagctcaggagtttgagaccagcctgttaacagagaaagattttgtctctattaaaaataaaaaaaattagccagcatggtggcatgtgcctgtagtcccagttactcaggaggctgaggcaggaggatcactggagcccaggagtttgtggctgcagtgagctatgatagcaccactccgggtggtgacagtcttggtgacagagtgagaccccatctaaaaaattaaaataataaaaataaaataaatgcatagtttattgttattatggacaaatatattgtgatatatgattgtatatatttcattagcatgtaaaaatgatctctatctgatatagacatctgataatagaaaatgcggaagagagcattaacacaaaatgaataccaaataaaaatcacttaatgatttaagagtaatactacacatatttaatatttaaaagttactcttaaaggttaaaactagagaaaagttaaaagaataaaacaatgaatttctgtatttccttcaccaagattcaccagttgctaacagtttggcgcatttgcttgatgtgtcatagattgtccacattccatatctgttggattgtttccttgtgattagattcgggtttacgttgttggtgggaacccacatagatgaggtgtgcttcctgttgcttacatcaggaggcacagtggtgccagttggccctagtaaaagtgatgctaacttgattcacctagttaagttggcatctgtgaaggctacttttgtattaaggcagtgaacttcgaaaggaacttttccctgactttgggaattgctgacagccatttaggaaaagagacgactgttttctctgtcacgtgtagctgcagttaagaaacatcctagtatagtcagacaagctctggaagccagtatgtcaggacctgggaccaagctctacagccatctctccctgtgaccatagccaagtcatttctgagctatgtgagactgtacgtataaggaaatagacactcagagaagtgaagcagtttgcccaaagctactcagctagtgagtgacagagctaggattcaaacccatttttgtctggggacaaagccctgcccttgtccttatgccaagctgcctcctttgtgaggcagctggttgttatgattgtggcactgaccactcagatgttgtgctcggaaccaagcagaagagcaccaagccttataggccctgacaggtgagagggaagagagaggtgccttccttcatccatctggactgcccttggaattcctgggccaatttggggaaccctggcaccaaccctaacatgggccagtgccagcaccaggtatatgcagcctgtacttcccagtctgggcaggcaaaggctggaaccgcaccagcagctctcctctgtaacgcagcacggaagtatttatttcaagggtggctcagagaagtgaagcagtttgcccaaagcaaactggttcctcccctgcatgtggcaggctgtcctgcaagctgggaggcgggctgttggacgctccccagccacccttgaaataaatgcttccatgctgtgttgcagaggtgagttgctggcaccgttccagcctccgcctgcccagactgggaagtacaggctgcacatacctggcactggcccactttagggttgatgcatgggatccccagattggcccaggaattccaaggccagtccagatggatgaaggaaggtattgcctcagcctgcctgggttcctcgggggagagagggagacaggaagcattaatgggggaaaggtgtgccaagccttgccaagcaggtcattgtgggtggggagacaccgcctacgtgctcgggacgccccaggatttgggtggaggttcttgaggaggcagcgagaaaggagagctgtgacagcgactctggagcactctagaatggctcttagtgaccttctgctctggtgacccaccagcagcccaccaacctgtcatcttccagttagcagccatccccagggccagtagcacctgagcacttggtaagtagaaagacccagtgtctgctcctcatgttaccctggtgtccttccccagagcagttgttttgggaaaaactggctccggctgaagcaggaaatggtgctccttgtcaaggtcatgttgtcctgttgctatagaactgagagaccctgaggatcagccctctgaggttcctgttacctctctttacactattcatcctcataggcctccaggaagggggccaaattcagggccaggaccagggccagtggcttggtgaggcataggctttgctgtatgggccctgtggggagctctggggagttcttattcccctggctcatggccaccatcatggagagacccccagggctctggcagccaagtgggcaggagcggagggagggggcatcttgggagggagagccccgaaaggaaacagggtttatagacagactcccggtcatcactgcttgtaatgcttgctcagtgaacagtggcagtgcttttcctgactctttcaagagagtcccttctctctcctgctaggtgggctgagatccagactggttagaagcctaacatgacctggcgtgtgagaccttgcactctctgaatgtattccccaagtgtcatcaataagtcactccggttctggcatttccctatcttatcctgcatacccctcctcctggctctgagtcctgaggagtgagattgcagtttttgacccatgttcttactgagaagtgggctgtcatgcaggtataatataaaatccagaagctgctgtcagaattatgtgagaattgggaggtgacagcatgggccaattttctgaatctctagggtgctttgatgcttaagaagtctttctgggctccctgagatttgaaacctcttgttttatctgtcctttcactctggttcttcctttcctttcttggggacttcatgcttctcaaatatttgttaagtgggtgcttatatgggaccttagaaagcaaccagctaggcatgcacttggaaagggacaggaggactgagaacaagactaaacatttctgtgagattgagcagcaggagagctttgcttctttactggtgtcagtatgtgcctgcagctcctgggctgcctttactcgagtgagatccatttacaagactcctgactcttctactccactttattacaaaagatgttgatgctcgttttaaaaacaatttaaactacaaacatgaataaaggtatttatctccccaccagtccccctcattctcccttccctcctgttcttagactggtttcccctcccagtagtttaggttgtggggcaagtgtgtgtagctctgcatcagtgtcttaaacaaaatgagtgtgtcgcggatgcgcagctcggccacttcctgttttcttcggctgtatgtcacggccatcctgccatggcaccatgtctgtgccacctgctgctcttgggcatctgcagagaattccatgacatggatcttgaggtagtcttcttcagctttttctacttcatcttattttctacaatcatttatatctgcttgtaaaacctttttttaaaaaacttgcttactagacacagcacatgttcattttagaaaatgtagaaaaatcagataagcagccgggcatgatgactcatgcctgtaatctcagcactttgggaggccaaggcaggcagatcacctgaggtcaggagttcgagaccagcctggccaacatggtgaaaccccatctctactaaaaatacaaaaattatctgggtgtggtggtgcgtacctgtagtctcagttacctgggaggctgaggtgggagaatcacttgaacccaggaggtggaggt

SEQ ID NO: 46398 - DNA, 4016 bp, Homo sapiens
tcttctattctttttctagtcattttcatgagaatcatgatctttatgtaaattcgtattgtatttttcacttatgttattaaatattctatgaaaacatgagtttaatgactaggtaatactcagttgtctgggtgtgccctaatatatttaaccattcctctattattgggcattgggccatttctgattttttgttattataaataacattgcagtgaacagctcagtgttttcctataaggggaagtatagggtcaaagaacgtgaacgcttttaggtgagacttgaacttgagatccctgggttctcctggacagaccgaccaatcacagcttaactgtgggatttttccatgtctcctctctccctgggaaggttgagaagtctctctgccctgcagatccctattcctgcctccccgctgcaattgcacgtcccatttctcctgggccagtcagagtttcattgcctctcatggggcctgctggccacccactcagtggctgcccttctccttaccaccagccttcgtcccctcacctagagcattcacaggcgagcaagagccagtcagagcttccctcagagtagggggtgtagtgataaatgaaatagccctgccttcactcatctcactgggtcgattaagtgatgtgtgatgtacctgaaagcacttcaggaacttaagagtctcatgctctaccaactgagctagccaggtgcccttaaagggctgtcctagtcttaattgtttgtaaagaaataggtagctgggcatggtggctcacacctgtaatctcagcactttgggaggctgaggcgggtggataacctgagcccaggagttcgagaccagcctgggcaacatggcaaaaccccgtctctacaaaaaatacaaaaatttgccaggcgtggtggtgcacacctgtggtcccagctactcaggaggctgaagtgggagaatcacctgatcctaggaaatcgaggctgcagtgagctgtgattgtgccactgcactctagcctgggtgacagggagatcttgtcttaaaaaaaaaaaaagaaaagaaaaaggtataagtggtggtgtccacattgtaaccacagagcccctaaagcagggctgttgacctatggttggcatcctggtcacaagagctctgtgtcagatgtgtgaggggcttgggtgtagttgtcaagcctgggaatgtggctgttagtatcgattggcctcatgccaagcagtgccaagcgccacgtctgctccccagatacctgtgtttgtatgtgtgtgtcatagtcgggaatcactgagaccaggacctctgggaggctgaaccctgggagggcagagcaggaacaggccttggagatgatctaattctgacattttactcagtgaggacacaggtggggcagccagagaggtactcagctctgagtcagggccccatccctcaactcctcagcctgagtcttcccaggaacacaacaggcagctgcttcccagaccttgcagggctccaggtggccttcccctcctgccgactcccttgccaggtttgctgtaactattgctcctccgagcctggctgaaatcatcttcagtctgttatcaccttcagtctgttctcatcttcagtctgttctccacagcagcctgaaaagtctttgtaaaaatgcagctctgttcctccccatcctcttcataacccccttggctctctgctcctcccagaataaatacccacatcctcagcttacccttcaagacgctgagtgacctctagccacagcccttctctctacccacagacagcccaggtcctcattccttgggccttttcacatcactgttcccatcaccctggaatcccactcagcctgcctgggccagaggctacgtaaggtcctcaggaaagcgtctcctggccactcgcacctgactcatgtgctctgagtgccacaccttgcttggcatttgtccttcatagccctggtcattgctggctaatgtagcctggcacatggtggtaggtacttgacaaatatttgttgaacaagtgaatgaaaccagctggcagggaccagaagggcagaggggcagggacagtgtccacaaccatagcccctgtggtcttagctgagaagggctctggctcggtctctggtgagtctctctgctggccggcagaaccaccctaccctggaagccctctccatgtagtgtgaggggtctcaggcccattcaggcttcagtaggagagatctgggtctcttctgggacctgagcaggcctttcctttacctcgttggcatctctcagcattttatttggttttaaaaatgtctcccccttcccccgaccaaccccagattataaaggtatcccacgctcactgtgaagaaattggataacataggaaaatataattaagaaaatcgaaatcacctacagctccacccctcagagaaaagtacccttaacatttgtggccatgtcttttcagttttgtttttatgcatgtgtatgtgctttgacattgctgagcttctctttgtgaaaaccacagatttttcgcagtcttcagtggctgcggtcagaggtggtcagcacgttagtgctcccagtggagaggtgatgcagggatctgggtgcccctttctccctactgcaggtgggtgggtgggcacacccaaggcccccttctgtggcagctttcctatccctggtgaagagtaccctcctgtctctggtctcttctccaggacattctccagccctggaggctgttcctagggggctgcctcttggggcaatgggaagaattgtggaatgcgtgggtggcctcctggctgtcttttctctggttccagcactctctgaacaaaaccagccccaggccactcctggggattggcctcaggtgactctctgggctgactctggccagctagaaggccacccgggcttctcctgtgtccttaagagggtggggtgacctggattggcaaatagtaagcagagaacacggcagagttgctggcctagaaaaccaggtcactaggtcagcacttggattaatgattgataagaaaggttgggagagaatcagccagacccattctcccatgacatccctcacttctgatcccaaaagcacctgccacggagacggggcaacctctgtcttgtatccagaggctgccccttattccgttgcagtatgggaggaaggaggtgacagcaactgggtcacctgcatgtggggcgagaaggggaggaaggtttaggcccttctccctgaaaaaagaagcatgtgcccagagtagggggctccctgccggttctctccccacaattgatggtgaggcagggaactgggaagttctgtctgtggaggtcccttgggtttcagcaggctagcacatttctaggactggaatatcaccatacaatcccttaacacaagccatgggtgataataatagcagcagccactgtggtccttatttgtaggacccttactatctacctggcactgttaagcagttactgcatcgttatttattccacacagcagcctctcaggttaggtggtagtattccagttttaatgtcttccccaagtcataggatgggagggatgagccagggtgtgaacccaggcctgactgaagccggtggaattcacttctttggagtattgcatctcgatggcagtaatatatgaaaactgatacagtggcaagtgctacaactcagaatagtgtggctaaggctcatgtttttagtatatttattcatccagcaaacgtatgttgaggacccactaaatgccaggcaccgtgccaggtgctgggacctacctcagtaagatacagggcattctctgggaaactgataacatggtgaggccagagcagttagcagacattgcagtttggtgtagtgattgcagatctggagggcccgggtcagggttgtggtgagaaggaacagaatggagctag

SEQ ID NO: 46399 - DNA, 2516 bp, Homo sapiens
ctcattctcttcacctttataggctgtgtcctacccagcctgagggccagccaggtgagagtcagtgggggtatgtgacacatcgcaggtctcagcacctgctagttctctgccccatccccatgagttattactttggcctcgggagtcccctgagggacccataaggacagcgcacagctttgagccctgaaacagcaggaaggctccacagtcacccctgaccaccctcctcagcagttcagcactgactctcagtgcagatattgagctcaacacctgccatgcaccttctcaccctccccccagccaggcaggacagaccttcccatcaacaaggaaactgaggttaccagaaacccacttgccagggtcccctgggcgtgtaggagtagagacagctagagccaggattcacctcccattcccattctcatccctcctgcttcagtgacatccatcccaatcacccttgagaaagaggaagataaagtgtccttcctcctggcctcagcacctcctcacttggcaagcacttggtgggcatcaggctgggcccagcactgtgcccagggctggccatacagtggtggacaaggctgagtgcctgtcccaaggagcccacagttcaggcaaacaggacagcagaagtaaagaggctgctcagtaacccagcctcaaatccctgcagaatttggcctgacttcagaagctgctgggtgcttgtttgcctgtgagctctgccagcaaagtaaatagaccaatcgggcgcctcctggctgtcttcacagccatgacaacggcattctcccagcattggaggctagatatgcaggagagctctcagccacaaatgatgtgaataaggtcaatagtgtctatttgctgaacttgtcatcaaagatggtgaaactgatactttactctctgggtgagagggctagtgtttacactgaatccaaacatttggataatgacatggtgcctcctcagcagtgactgtgtcttcttgttcatcataataatgttattgattagcggtactgaacatgtaggtatgcgtagtagtgagatgccgaggttaagagctcagctccaggaattgcatggttctaggttataattcttgctctgtcactgtattagtcagggttctccagagaaggagaacctgtgtgtgtgtgtgtgtgtgtgtgttgaaagaaagagatgtgttttaacgaattggttcacacagttgttggagtggcaagtccaaattttgaaaggcaggcaggctggagagccggggaagttgatgttgcagctcaagtccaaaggcagcctggaggcagaatttcctgttccacagtggggccacggtaggcactcagtcttttttcttaaggccttcagttgttggatgagggccactcacattatggagggtaatctgctttactcaaagtcttctgatttaaatgttaattgcatctaaaaaatatcttcttagtggccgggcacagtggctcatgcctgtaatcccagcactttgggaggccaaggtgggtggatcacctgaggtcaggaattcaagaccagcccagccaacatggtgaaaccccatctctactaaaaataccaaaaaaaactagctgggcgcctgtaatcccagctactcggggggctgaggcaggagaatcgcttgaacccgggaggcagaagttgcagtgagctgagatcgcgccattgcactccagcctggggaacaaaagcgagacttcatctcaaaaaaaaaaaaaaaaaaaaaaaaaaaaaaaaaaaacaccttcttagcacattgtttggtcaaacaactgggcaccgtggcctaatcaagttgatatgtaagaccaacatagccgctgccagcaagttactaacacttctgagccttggagcctcggcttccttgcctgtaaagtgggggtaagaagaccatcttgaaaggttgttttgaggttttacgtgagatgaaatgggtgtccaatggagtgcctttagcaggacacctgcttacccccacctctacccaggacatcatgatgcgggggaagtggtggaaccttcagaacccagcccctagtatgagaagaattctgccatcacctttctttcagcagagagggaagcagtccccttccgtgacagtcacatgcgtgagtgatggctccttccaatatcctgcacttcttactgccccttacctggcgttgctccactctgtctcatgttctagttttcttatctctttctctttttttttctattttatttttttcctgtaggcacaagtgagttacagtaggttaagttacaccttacctttccttgtttttcttgtttatttatttgtttatttatttttttgagacaaggtcttgttctgtcaccacaggctggagtacagtggtgcaatcacagctcactgcaacctggacctcccaggctcaagtcatcttcccacattcaggcaatcctcccacctcagcctccca

SEQ ID NO: 46400 - DNA, 916 bp, Homo sapiens
gttttgtccacgccccctcccatgggcacgccccaggccttggccccgcccacctactccggctggacttgtgcccggccctgccccttgcgaccggccctcgcgccggcctcacgttcaggctccgcccccggccgcgcctccctccttccctttccgacagcgcgggaacggctgcggcttcgggcggccgggtttctccggtctcccaacgccgaggagagcttgtaacaggcgctggagctggcccgccaccgccgcgtcagggacggcgctggagtcctccgttcccctcagcctctgagctgaggccccacaccagagtagggggcggcgcggcacccgtgccccggcatggcgacaccggacgcggggctccctggggctgagggcgtggagccggcgccctgggcgcagctggaggcccccgcccgcctcctgctgcaggcgctgcaggcggggcctgagggggcgcggcgcggcctgggggtgctccgggcgctgggcagccgcggctgggagcccttcgactggggtcgcttgctcgaggccctgtgccgggaggagccggtcgtgcaggggcctgacggccgtctggagctgtaagtcctcgcccgcggccccttagcaggtatgggaggcggggggctgtcgggggaacgacacacacagaggtgaaataagccccttcagcgacggcctgccgcgcaccctatgagcaggggcacccttcactgagcacttgctgtgtgcgggacatcgaggatccgggaactcgaggcacacgccttctgttcgctgtaaggtatagtgatgataagtggaggcaaatcacttttgatcgcgtacttccatctctaaaaaactggactcgtacgtccagtgtaagtatacttatgtataaagtgtacacatg

SEQ ID NO: 46401 - DNA, 1889 bp, Homo sapiens
atcaagtgaaagttcacttaaggactttcccagctcttcccctctgcaggcgttgaaaggacaggaacagaactttccggacacttcccttaccacgagtccacgttagagcaaggtgctgagggagggaggtcgggccaggcttccttttgagaacataagctggtgcggagggcgcgaggggagaggggtttgagggacaagcgtgccggaatccacgctgtcagtgaacatcactgggctgtaccagtacgtgtgactaccgaagctcgagccccgaacccagccgcttccctaggggtccagcagcagcgggcgcgaatcggcacattaccgggggaccgcggggcgctcaggactgcgacaactctgtgggttaccgcgccggcctagcggcccagcgacgccccccagcggccagagaaggccgcgcttctcggggttggcccacccaaccgctctgcgggtaggaccgaggagcaaagcattatcgcgagatcagggccactatttgagcgcatgcgcaagacatgctagtctcttttccggttagcgcggcgtgagaagccatgaggtgagttggtcctgaaagccctatccgcgttcatccgcgccttcaggtgccccgccgagggttcggatcctgtaggccgcgccgcggacccttgcgccacctgcgccgcggggcatttctcaaggcgggtcggcctgcgggtcgcccttcctaccaggtccgatcactgagagcctccctcttccaccggggcttgggtctgggtctgagctcccgtcgctctacttggtgtccggaatctacgggggagtccgccgtgggccgcccgcccgtctcgaagcctagacctcggaggcttccaggcagtccgagcgtgtggactccgcggccctgagcgccctgtcgcttctctcccgcagcagcaaagtctctcgcgacaccctgtacgaggcggtgcgggaagtcctgcacgggaaccagcgcaagcgccgcaagtgagtgccgaccctggggcacggcgcgggtggcgagggccggcgggtgcttaacccccctcctctctcgaaggttcctggagacggtggagttgcagatcagcttgaagaactatgatccccagaaggacaagcgcttctcgggcaccgtcaggttggcaccgttctgatcccacccagccctcagtgcccccgtgcttgcccctcccctgcaggctcccgctgagccggaggcgggcacgtcggtactgatgtgctagggtagttcagaccccctgctccgggcaggcgcggctggacggacccccaccctgggtcttaaaacatgaggggaggcgtgggtaggcctcggccgagcccgccggccagcctgagaagccaggctggctgctggtgaatgtgaacgctccgggtaaggctcggtggctgctgcggtcccagacccttcaccggcccttgggacccagggctaggcgtaacctgttggtgctgtcccccaaaacgcaggcttaagtccactccccgccctaagttctctgtgtgtgtcctgggggaccagcagcactgtgacgaggctaaggccgtggatatcccccacatggacatcgaggcgctgaaaaaactcaacaagaataaaaaactggtcaagaagctgggtgagtccggccgctgtggttttgcatgtgagatgtgtggtgggggcggtagaaaggcttttctgccattttcgatttttaaatgatgaggggcctagaatagcaaaggatcggcggtggttgcctagcttgcctgagtgctgttttagctttggggtggtttgatgtttgtattgctatgaggattccagttgatgagggaggccaggcattgtaagttgacca

SEQ ID NO: 46402 - DNA, 2904 bp, Homo sapiens
gggtgaggatgggagcagggctcaggacccatgtgatgcttctgtacacttaatgtgctgctctgtcctggcaaccactgaccactctaacaagccattccccagcccagatgcgctcattagcattaatgacgttccctccctgggggggtaggggaaggcccaagagcttgggactcatactggctcctaccctctccctgaggagggggcatccagggcccctgaagttacccttactggacagccttgtcctggaagatctgtgcactctgcccactgggtgagcagggacccagaagaccacagaaccacatcctttagggagtgcccctacgagaggggtcttggtgggaggggggctacaggagtctagaagggagaggacataattcccccaaatctccaacttttgaggaaagcctcccctccttgccccaggtggccccagcactggggtggaacatgtgtacagagaaccaggccacaagagactggatacgcagagccgctatgggcaccagcccctctgagctgtgtccagcccctacccctatgccctgttcttccggacaacaagtccaggcctgacctggttctgcccctacctggaaagagggaagacacagaagaagacagcccctgagaagtccgccccaaggcctccttccccctcgcactgaaagaatctctcagccctggatcagggcccctcaccaggaaagttgacagagcggggtctcaatgacactgccccagggcccagctgggctggaaaacagatccagaccagcgctcccagccctccctcccctagcaggaataaagggcatgacagacaatggtggggaccggggtaggaagcgggagaccagccaccctcaaaccttgtcaagtctaaacaagggccctgagcaagtgtggggaagaaaaggccccaaatccagacccctccgagccaagctcacagcgctcagggctggaactctgaatcagcaccccgacgcaggcggcagaactgaagggaacgtgagcccctccctgcctctcaggggacacacggccggggcgcgcggctttggtcccagacaccctccacaacccagcgcagccgcggcaccgcgcgcagaaaccggcctgggcgctgggaggccgggcccgaggcctgcgtggagctgaggccgggcgggctccgggagcgcgcgggccgggagtccaaagggcggcggggcccgggactgggcgccccggatatgagctccagggtggcaggcaggccctccacactgtgcggcccccggatccccgccccgaccccccaagcacggacggcgggacaggcgacggcacaggggacacggtctccccggcttccccaccttcccggaccaactcgtccccgtcgcgggggggtggggagggcggggggcggggcttcccggagagattttcccccttccctctaaacttcccggcaccccgatccggggctccagctccggctggacaatagctcggggacccagtccccctcgagtgtcgcccccccagccagcccagccgaccaaccaaaccacctctcccgagcggggcctcctcccggcgtccgcccggcttacctggtccgagctcgcgggggcgctccggccgggccgctccgccgggcccgagggagccgcaaggggggccggggaaggggggtcgtggggagggggctggccggaatgtgcggaatgagccgggctggagcgggaggcgccgagcgcggaggagggagcgagcgggacggaaagtttgtgttgaggagccggggcgggggtgggggctgcgggaaggagggggcggggcgcgcagggggcggtgctggccgggaggggcggggccgtccagccgcgctcgggccgcctaccccgcggcctcgcgacccggccaccccggctggcgcgcgcctgggcgccccgctcctcgcccgcccgtgcggagctgccttcctccccctgcgctccgggcctcgccccgctcccgggcacccgccggaatttggggctccggcctggggcggggccgagggcggagccctcgcctcgcgggcagggctcccgtcggtgccgggggccgtgggtgccgcgtcacgaggagcccggcagagccggagcgcacgggccccggggctcccggcccctccaccctagtcccgagccgccaaggcggagcgtaccctccagctcgcgggcctgccccccactcccggggccccagacccggctccgccctggcggctgcgcccgccctgccgggacccggtttgtctggttctccccgcgtggctagtttctcgaatttcttctccctttctccctcttccccgacctccgggaccctccctttcgccccggctccccgggcccccacggggggcgtctcgacgctgtgcggccgccgagtttcggtaggacccgcgacgggcgcggggaggggacgcgggagcgcccggggcctgggcaggagtgggacgggggttgagacttccagctcgcgcctcggacgcctcctgccgcctcgttctccgcacgcgctgaggaaccaccgctccgcttggccaaggacgcggctttattggggatgtgggtgcctggccctcgtcccccatcacctaccccctcctcctagcccgccccagctcctcggagccctagcgcggtcccggggagaggggaggttaaaacaacaatgactactgctcccggacaggaagtgactggggcgcggggaggaggggggcacagcggcgcaggcgagctccgagaccagatgtgcggctccaactccagatgttcttcatctccgtcctacccgccgtccgggctcctcctgcctcggcctgtgccaggctggggagaggac

SEQ ID NO: 46403 - DNA, 3343 bp, Homo sapiens
gatattaaaattaaatgagtaatttcagaagttctctttagatgtgataacccatcattagtgagggaaaaagattggctactaataaacatgttgggaaagataaatgaagtaaccatgccaaaaaaaagtcaaactgtaacaaaggcataattaagaaagcaaaacattcattgtagctagtcttctcagagagacaataaatgacagaactagtgtctgatgctgtaataggacagtaaacatttgtgatagctcttataaatattttctactttacatgtggactaatcttttttttcctggtaaatctaacccttcacaattggaccctgcagtactataaaatcttaaacggatatacatccagacatatacaccccagtttatataaaaaaccaaaaccatcgccttgtaatactgacaacattcggaatgtcagagtaaaaggaggtatcacagcctcatggtgaatacagcccattgattctctacatctacaagtagcaaagggcattgctgggttaactggtttctaaacttggaacactgatgtgaaaagttctacgagactgctgacaagaactcacacaccacttggagccacggaaagactgctgattgccacagtaggggccctgattgcagtaacagatgcagatgagcctagctcctatagctccacttattctttttaatgttatcttaaaaattcctaccaaaacaaaacagaacaaaaaccatggcagctctggctgtggaagccctgtggttgctttttgacctggcatcttttagtgcaaatactaacttaataaatatttaataataaccatcgtgactcactgggagtgcagcctgtagggctcaggaggtctgttgctaatcccaaccagcatgatttacgggaagtaaatcatctatgacatgcccaaagagaataaaagtacatacaggatgcttctacttagggcttttttggtagagaaagaaataaacaagttaaaaagagacaacatttttttcttgacttaaagactatgtaacttaaagggggagggaggtcctccaaatccccacaaagtcaaaccaaaccaaattacccaagcttagctgcgcaatcggagtgtaaccacatcaagcgagctgcaaaacatcacttaaactggagctctgacttattgttctcttactgccctagagcaattttgttttgaagagcacagaacaccctgttctgaatgtggctggcacatgaactcgatgtgctgacagcaatttgtactccgattaaaataggggggaaaaaaggaaagagagtgcacagcagtaacaaaaatgaaatgcaagaacccctaaaccatgcaatttgtattttaggaagcaaaactgagaaagaggctccataacttaaaaaacaaaaaacaaaaagctgtaaatgctccagcctaaagacattagctctggtaagtgtctatttttcccttttctaattatagtagttggtgtctgatagctttgcactcattctcaaaacaattactgggtcatgaggatctgaatgggaatgttgtaatggcattactactcgacaagactggttatctggccagagaaaaccaggttgtgacaggttactcccactgagcaagagttttctctgttgcctaattcatgccaagtgagcttctttctgcctgtgtctcctgcctaatagagcacagtatccaagagagtaggatcttaataaccccctgaaaaagcaagcagagatggctttctaaaagcaggagaacaagagaaatacttccaacacgcatggtggtcagatttcccctaagctgtccgccttcctcctctgcactgttttgtactacttaggatgaacacacaccactgtaagattgcttacagaactgacggacagatgctaacaggcgtggaacctggctcctggaactgaataacatttatgcaaatgatttcttttggttgatcaagtttgaatgttttcaaaacaggaaatctaaacaagaagtatacacccagcaacaaattctccatgaacaccaacccttaccagtcttcccttcacaccactatagcacttgagttagacctggattccagtcccattctgccacttcaattatgactttgggcaaggtaattaaagtgatctgaagctcagtttcttcactgatagaatgtggataatacactagctaaatgataattgttgagaggattaaattagatactgaattagagcttttaatctagcacctgatattcattcattcattcattcatatgtcagggtgtctatcatgtgaaaatgctgttgttaagtgtggatatacagagacaaactaaaggaatgttagctataattattttcctgtgcctagtggtaaattataccagattaaacatgttttagagctctgtgtaagaaaacatttactggttcaacacagaaagctgtcaaagtatgaataaaattcttagtaggcaaaggcagtatcttgtacttcttttgtgcctcacagtacccagcacagagttcagggccagcaagtaaatatttatttaatgactaatcttaaaatagggcattaaggacagggtggtaattttcactaatttatacaaattttcctttttgaatctattagtattcctattttaataaattctaggaagctatacaaattttatattgatatggaaactttgttttttaatactattctaaaataaatggccaattggctggaattttttttttttttgtaacaacaacaacagcagcagcagcaacaaaagactgttttctttctttttttgagacagagtctcgttctgttgcccaggctggagtgtagtggcgtgatcttgcctcactacaaccttcacttactgcaaccatctgcctcccgagttcaaggacttcttgtgcctcagactcccaagtagctgggactacaggcccgcaccaccatgcccagctaatttttgtgtttttagtagagatggggtttcgccatgttggccaggctggtcttgaactcccgacctcaagtgatcctccagccttggcctcccagagtgctgggattacaggtgtgagccaccgtgcccggcctctttattgtttttgttttgagttgggggtctcactttgttgcccagcctggagtgcagtggtgtgatcatggctcactgcagcctcacactcctggactcaagctactctccttcctcagcctccctagtagctgggactacaggcacacaccaccacgcctggctattttgttgttgttgttgttaagaatgg

SEQ ID NO: 46404 - DNA, 2035 bp, Homo sapiens
atagaatcccagactattaaaaatacttaaccaaaatatgctttaacttttcccttgtccacaatctaacaaaatgggaagacaatgaaaataaacactcctgtctacactcagagaggcaaagaaagctcccattcagtagtaagccttattccactggaaaacatactcctgaaaagtaaatccaaaaccacgagctcaaactgcttcatgcagaatttactgaacggcggccaaacgctgaacacactgtcctgaaccacactgaagggtatctacaattctgcatctccgcttacaacttgaaacttactacgctttcgccaccactgcagaacccgattttagagactacgatggtcctgccggttcgttaatcgaagaaagccactctgcaccctgacgctcgtagtgtctttttggtaatactggtttttgactcttatactgtgaccggtgcacctttttggacgaccaataaggcggaagacgttttcacgtcccagaacagaagagcataaggagccctggcacagcgttcagccgcttcggtatggcctgggagtgacgcggatcacctgttagacggcgctgcgcggactcctccacaagcggccgacagcggcgatgcggttccccaacgcttgtcccgaggcggcaggtgaaggcggggaccgcccgtccacacccggagcgcggccaccccgccaccatccccttcacagccccgccaggtgggcgaatccgccccgcgcccgcggcgtcccggcgctcggctcgccctggggtccggttgtcccggcgcccggacccgaaagcgaagtttggctcccgcccgcagcggtgccggctgagggtccggccgcctgtccggggagagccgggggccagagaccggaggcggagcgggacctgtcatcccgggcgggaaacaaaagcccagtgaggacgggcgggcgcgacccgcctcgcctctgccgggagaggccggcgggggcggagagcggcgcccgcggtcactagtctccgcgcctcccgcggggagcaccggccccgcggcccctggggcgcggcgaggggcgccgcagtggggccgaggcctcccgcgcgctcccctcgaggcttccggaccccgctcccccgcgacacgcggctcctgggctgcgaagccgcgtgggggtgggagctgaggcagcgagtgcgaccgcggcgggacctggaaggagggcgttcggctcccggggcgccgcggccggccgccccatctccgtggccatggcgccggtacctgtcgccgcgggggctcgccgactccgtcactctccgccttgcccgtgctccgctaacccttcagcccgcccagcaggccgcccgcgcgccggacaccgccgcccgagactggcagcgcccgcgagccggcccgaatccccggggcagcgcccggcgccgtcccgccccagccggccgcaggacccgccttccatagggccccggggctgtcagtccgcccccaaaaggcgcgcgggctgtcgatccgcctgtccggattggtggccgcgcgccgtccatgcaaatgaggccccgcccccatcatttgctcctccacctccccacgccagcccacgtgtctggcccttgccctttgtgggggccatagagaagggatggtggaaactgacaccccctcacatctcttacctcccgagaaattaatgcctaagcaagctagttgacttcccatctgtatcgtctctctgaaggcactgcccctcctatctgtccacagggcctacctagaggccggagaggggcaggccaggctgtttgttaggtcagctggccaggttagccctaggaagcaaccccattaagtctaagatgcccagtcgggactggggaaatcccacctcgagaaccaatttagcagatatcacctccctctggacacccagtgactgtaaagaccatactttctcttggcttgctacctttcaagcaggagatcccaggagattaaaacaggaagaggccttac

SEQ ID NO: 46405 - DNA, 1370 bp, Homo sapiens
ctgaccaagcctcagtttccatctctacaaaatgggtgtaataatccttgcagaggattactggagagtagtggatttgaactcagccttttttctaaacctggaaaacacaaagctctttcttgccttgaggactttgcatgtgctgtgctgttccctgtgcctgaaaccctcagcctccagatgttaacgtgactagtttattcttgtcatccaggtctcagctcaaatataaccttcctcatagcagccttccctgagtactcagcagaccccccatcacactccatcgcatccctattcattttcttctttgcacatattgtgatctgaaattttcttacttatttgttctgttttttttttatggcctgtccccttcccaactgccaaggatataagtttcttgaaagctggaacctctgtggggtttaatgacccattcacggtgctcagagcagcacctggcaaacatcagcgcttgctaaacatttatgaatgaatgaatgaatgagctttggaaatagcattatatttaagtgactaactctcacaggccttgctgagggctgtgaatgtgggctaatgggggatcggaggagagtgctttgggcctggctctggcccaggctcagccctgaagctcccgggctgcagggaaccatgaggctgcctgggcttccggctgctgcaggataaaggtcaactcttgctggaacacgaggttctgcaccatctgggcttgcctgcctctggcctcatctccccgggctctccaacctgcactccatgtccagccagaccaaacaactcccagtgcccaccagagaacaccgggctgcttcacgcctgtgtgcttttatacacactgttccttctacctggaacgtcctgcacccttgctctgcctggccaattcctctctccctgaaccttctgctctggccacacccagtccccaacttcccaagacattataatgatccgtttttgtgcattttcccaagtaaaccagggactcagactttccaagtagcccataggagggcagcgaccaggttttgtgtccccagtttgtagcacaatacttggcacacacacacagtaggtgcttaatcaatgctcaggcatggccgggcgcgatggctcacgcctgtaatcccagcactttgggaggccaaggcgggcggatcatgagatcaggagatcgagaccatcctggccagcacagtgaaacgccatctctactaaaaatacaaaaaattagctgggcgtggtggcgggggcctgtaatcccagctacttgggaggctgaggcaggagaattgcttgaatccgggaggcagaggttgcagtgagctgagatcaca

SEQ ID NO: 46406 - DNA, 1437 bp, Homo sapiens
ttaaaataaaaataaataaataaatgcccaggcacaggtgtaggactttggttcccagggcattaactcaattcctgggacacacagtaggtgctctgtaagtgcccactggattaacaaggctgagcaatctgacactggcagaagcttggggcaaggtgaggcatagggcgtggaggtaggaacaaatggaagatgcttcctgggaaaaaagatggtgtcagagggaagaaggcagaagggatcttgggaaaattcccagaagactggaaatacaaaaagcaaaaataaaaagtaaacaccgatagatggaggtaaacaggactctcagtgaacaaggagagagaaattcagaaggaaagataaacaaagaagaatgaactcagagaaagaagaaggtcagaaagacaaaatgtgcccatgagagccatattggacagattgccagagaccaggacagaccaactaaatacattacgtctggggtccctgcttcatcccctgggggtaggcagataaggctggcacgggcagtgtggtgctgtggtcccttccttgggtgatagggctgagtgaaagcccacacatcatcaggacatcctggaaaacttttcctctcttagctcaggagaggccctgtgataggaaacaaagtaccccagacagcaactacaaacctagtttcttgcccttaggcaagcaacttagctgctcttgcttcagttttcccagcaggaaagcgagtctgattcttactttagaggcatattaagatcatactgagttaaggcaggtacattaaatgtacacagcctgatataagtgccagggattgacataatggtggtgctttctcccaaaggcctgctgtaaacgggtcctaagagaggccgtgtcactgtcactgggtgctgcagatagacctgacttcagagccctggaacccaggctcagcccctggtttttggatcccagagccaaatcaatacaaccaggaagtttattcctgggtgaagggtgaggggcagcaggcatgccagccagccaagagacacacggagcccacagccagcaggcctgactgtccaactccactgctgagactgtcctctggggccttgctagtatccagatttcagcctgtcgaatgggctaaaaacaattttctagctgtcagatcacacctcaaggcatgcaggagctccaaggaggcagagttctccttcatttgaagggagaagggagtaagactctgaggcttgagaaatggagaatttgcattttagttacataatctgagcaatcttgaagactattttgaagtgctggctttggccaggtgtgatggttcacacctgtaatcccagctacttgggacgtttactcaggaggctgaggtgggaggactgcttgagccccagaggttgaggcagcagt

SEQ ID NO: 46407 - DNA, 5457 bp, Homo sapiens
actgtcaaagacggctaacaatagcacccacaccccagaattgttgtgaggagtaaatgggatcctgtaaataaagacctgaacctcaaccttgggtctagtagtgagtctcctgtgccacagtctttgggttccaaacgctgttgggggttggtgtgcagagatagttctccatataagcaatcaagattagccatcaatgtgaataataatatcccatgctcctgggggagaaaggccagatcataaacgtattgatctctcaatatctaagccactttgaggagattaaactggtcacaactcagaaaatcattgagaaatcatcaagtgtcaaattccattaggaatgtgtgactcctgggggtgagaggatgggtagatccccctccctgccgcgaggcccccacctctgcctctgttctctgtgactgacaaggaaggatctgtgattaccaggtctgccgagctcttggaggcaacttacatagtgctgtcacttgtctagctgggctcaggaatattgctaaaaggcttgggaaacaaggctggcaaggggagagggatcagcctcaagggtccagagaaactccagacctggtgtggagactccacagctttagaggcagtttcaaggctgggtgatgggagagagaaaggactgggggcttcacccttctggagtctaacttctccagggtctctctgcaccccaccttcccacccccagcaagagtttagaacctaaagacggggagtgggaagcaggagactcatttcttgatccatggggagttggggagcccaagtggaagatggggagatgagagcaggggtaactgacagcaggatgccacagctaaagaaggaagtataaatataaagcggccagtgtaggactggacagaggccatatgaaacacacggtacattccggtcccagcgtaacaaactgtaccagcctttttgagagctgtgagcactaaaatggggagggaagagagcagaggttccttcgaggttggccctgcctcctcctcccccacttctcccacagctcggggcaccgcagggaaagtcctgatgttccttttgcaaccacaggaaacctaccatccctgctcacactctgtaccctgttcctctcagcagctccagactgggagggagcaatgagtgtgtatgcatgggggtgtttgggggaatgtagggtgcagacagccccagcagcccaggtgacacccggaaaggcggcaagcatcacttggatactgactggaagtcacagcctgtaagggctgcaagagaggtacagatgacggtgaggaagtgccttgtccaaggtcacacaggcagttgttcaccagggtgggaccagagtgcatccagaactaggcagtgctgggcagctctcttgggtgtagtacgtaggagtggcaggccagagaacaggcagtgcccagggactgagggtggggagcccagatccaaggctgcctctatgctctggttggctttgggaaggcaggcctggcttgggcactgtgccctccaagcctcccaatcctatccccccaaccttaaatattagagataatgcatgtgaagtgcctagcgtggaggttgttttgtggtgatgtcaagcagaatgagtcacgtccacccctcccatctcctcctcctccacacacacacacacacacacacacacacacacacacacacacacagctcaaggcctagaacctcctgggatctttctcccatatctttctccctagaaccaccttctttcttctgagtccctatagctattacacacatttggtactcaccacctgctggcttgggttattatttaacctaacatccagcgtgtttgtctcttcaattgcccaaggggaggatatcatttcaatacacccaatatttattgaacatgaactccggtgccaagcctggcctgtgggggatgagttggaatggtggtgggaggcgggggcagtggaggagagggctcaaagaagaagcagactttgtttctgcctcaaggactttctaatctggttagaagaacaggattagtaaacagatcgctagaatatgagacaggccacacgctgtgccgtgagaaaggtacaaactgagtgtgctgggcgttcagaggagacaggaatcagatttggctggcactgtttcaaggaagctttatgagctggagcagcagagatgggtagacagggaggacaggcactcctggcatgagaaatggcacagcaaactgtggaggtgggaaggagggagaacaaaggacttcaggactgtgtcttaacctcatggtgacattctttagcaggacccaatacagagccttccacacggtaaacgtgcgatataaatgctttgttccctccttggtttggagagggtgggatctttaggaccagcacttagtgatgtctttccacagaaggatgggtaaggagaaaacgtggctctgaataaaccaggggtttggagctaaacacagggaagggtcagattccaggggcagtttggggtcgtcttccttggccttgcccttctttcaccctgtcgtccacacccactcgccagtgtctgggctctccctactcccggcgtcgtgccagggatttcccaaaccgtccaaaagggctgggcttggtttgccagccccgggaatccctggagtctccgtgttccaggcttctgtgaaggatcagggaaggggggctaggaaaggggaggctcctcctggggattgcttgaattggccccctcaacacgggcttccgttgtcacgtgactgcgtcccaggtctcgcaagtctggggctggcgagctccagctatcctcctcccgccccccggactgagcgctggagaagcacggactgagcgctggagagcgctggcggcagcctgggtggctccttctgctcgtagagctccccacacctgctccctcccccagctgtgctaatccaggcgccacccaagcctggggtacccaagcaggggcaaatgggggatggctaggtctgggtgctccaaggccggtgagtgggcagggctgcggggcccacgcgcgccccggaggttgctcgccaacccctgccccagcgtgcaatcgcatggttgcggcggccgggaggctgcgcgccgagcgcaagccgcgagcacaaacagggcgaggaggctggtgtgagcgcctgggcccgctgccagcgcgccggggctggaacacaatgtcccgagcgggcgggcgggcgggcgagcgcgagcgagaacagcctgactcagcagctgggtaagtgggtgtgctcgctcaccagatcaaccgctcttgcagcctgcggtcagcgacgacccggcactcggcagctccctggaacgggaggggcaagcatacggcccgctcctctgctcgcgccccagcctgccgcgcgagacctccacgtggccggtttgcgcatccctctgccttctcgcccctctattaaagcgtctcccagcccccagcctgagcgcagcaggctctgcccacctgggagaagcactctcctcaccccacccgacaggtgtggccaggcacacagctgctgtgtacatgtcctgttttccccaaatctcacccctttgggacgcctcggaaggtcttggcatgggggatgtaactcttagttgcaaacagaggtaggagtttgttctggggtagtggtggagtagggagccgaggaaggggatcctaggagaaaagagggacatagggcaagaggatctcccctatctctgtcctcagctgacccagagttcagagtctcttcctgccccctcccctcaaaaccactaggcccctgaagatttcctcctcggagggagggagaggcaggtggtgtggtgttttgaagcccgagaccctgcttttctgcccccacccccaaaccacaataaagacccaataaagatcctgccacctagccacaaagctcctccttccccctctatgcaggggaaatggggtcccatttggggtccccactggggacttatgctgtccctatgctgtctcctggcgtcttgtggggccattgtgaggatgacagcagcccagagcagggttattcctgggggtggggacctgtctcacgtcccagcttcctggggtgcctgcgcagtgccctgagggatgctttgtgcctggagagtgccaggacaggcggggaggagtggttccgggaaaggccctggcaggcagcataggcctgggctccagggcctttgagagtgggcctaggggagggacctcaggctgctgaagtgcctcacctgggcctcctgccatctggtggcatctctggcaccctctgtggctaaagatgccaacacaggcctgggccgtggacccccttcccatacacacatcacgcttcccacacaggctcttacccagccaatgcacactgcatctcccagtcgagaggcaccttcactgccatctactcccaccttcttcctgatgcttgaaatctgtccgtgatcccaggtcagtgattgctcgaggctgtgacagggacactctcagacagcagcccactgctcttctggacttccctatctccaagtccagtcacctacaggacacctgcccttacatggcctagaagtgactgaactcatattcatgcccctcataccagctcctccccattgcccaccatgaccctcccagtcctaaaactcactgcaaaggtagattaatttttaactgctttctctccttcaccatccttatgtctgatctcttatcaaattcttccctttgttgcttttatttcaaaagatattgtttgttcattacttttctccttcaccctttcccctccagccccatagagtccacctttggcccaaattctcacagcatctgccacactgtcctttctttttccttcctcctacacaccctgctggaataatctttctcaaacatcatttattgtgtatgttatcaacttcagactcctcaaccaagcacagtgagtacactagctaacctgtgtactctctgtgatgggacctgagttcattcatggcatgtccaggccacggggtttagtgcagtgcctcctgcacagcagtagggcagcaaatgttcctcgtgacccattcatttggtggtgttccctttccatccttcctattctctctcctgccttggtctccccagtcccatcaagcctattggcttactggtgctcactggggcccttttgtttgaagtgccactatttttcatttccccaaaatctttggtggggggcggggggtggtggctggtggggaagggagaggctgacatccaagttaatatcagggaggttgtggcaaataccaactgcaaaaccttgggtgcagagtagaatgagggcagatg

SEQ ID NO: 46408 - DNA, 2581 bp, Homo sapiens
ggtgtgagccaccgcgccctgcctaatcttttctatattttattgcttagttatgtcctgcagtattttaaaccctttctcccatgggctgtaggctccttaatggcagggacagtgtcttttatttatttgataccatttacttattttgagaagtgggcatgaaatactttggagggcacataaaacttgggtctggatcctggttccaacacttagctgtttggccctgggtaagtctcttaacctctctgagccagtttcttcgtctgtaaaagtcgctagtgacacttgttttgcagaatgaggggcaaaaattacagagaatacaaagcaccaggaaagtgtctgttgtacccaatagtttatattccttccccgtatggttagagcctttcctaaattgggaggaaggtgttccttaactactgcccatactgggacactttaaacttgaaaaggggcactgttaataattacgtccgttccagggacgcagagccaccctaccctagttcacaacaactggcagggttcggatagcacgcaatatcccagtgcctaagcacagccccaagcataacgctcaataaatgcctgttgaatcaacgagcgaacagaagctgaccctcactccgttttttggacatcattgagtgaagcaaattgaaaagcccgcccccgctgcgcccccacccccaccccgtcccagagccaccagcagcctcaattccccgaggtctgcccttctctagcccaccgtcccgcccccagttgccttgacatcagtgacgtcgcgaggggcgtggcctctctccatcgtctcctggtgccctgggcccctccgcatccgaacctggggggaggatgaggttggtggcctttgaccgtactcgcctcccgccgggccagcatctaactaagcccgcctggccgcccttctcgggcgcgcagttgtctcgagtgtgggtacccacctccacccccaccctcacccgggtgaactagcgggggttctagagagtgccggctcccagtgagccctctccaacagctgcgggccacgagatcctgagaacctgggcccagcgctcagcccaggcccgccccttcccgggcagccccgtcgctccgcgtcctagggggcgggcgggaaggatgggacccccgcctaggaggcgcgcaggcgccgccgagcgcgggagagaaagagttaaactaggtgccggcgccgggcgcggcgggagtgggggaggggagcgaagagaaagtgagagcgggggcggagcggggacgggagcgaaagaacatcctgtgcccgtcgccggatgcgcgcggggggaggaggtagtccggggagggagagcaagaccgggggaggcccgggacggggaaaggcgcggcctccttccccccgccgcaacctcctcctctgggggcgctggccccctctgctccccgcgccttaggctgagctacccggaggccccaggatctggttcctgggcaggagtaagcgctagctggggagatgatctcggagagtgtgggatccacgttaaggcaggggcggcccccagcctttcatctcttggctttctgcaagggaagctcgcacgtgttgagcgtcccctgtgcaccgaaagtacacacattatctcagtcctgacagcggcacttccaggcagtagacaggaattcatagactcgcattctagaggaggaaacagactcagattatggaatttgtccaaaccccacactgttgggatgtgaatgcaagcctgtcggactgcaaagggcttttcactggagtttagggtagggtaatttccccttagcttctatgcgcacaagtgctgggccgctgcagcgtcaccctcgggaatggcggtgtcttttcgtagaggacccccaacagtatctgtctggagcttctgtcattaactaggcttaaacaaccattgccaggatactggtaaagagaatgaggaaggggccttaggattccacaggtagttggatggttcttaggaacacagtttaggggaatgtgttgcagggctcctgttcctcatttaggtatttgtgggggcttcaaagatggctccagagtcactcaaagcagttacatggattacaggagttgggattgattgactttaagaagaccagggaggcctggtgtggtggcgtaagcctgtaatcccagcactttgagaggccgaggcaggcggatcacctgagtgtaggagttcgagaccagcctggccgaaatcgtgaaatccagcctactgaaaatacaaaaattagccgggcgtggtggtgcgtgcctgtagttccagcaacttggtaaactgaggcacaagacttgcttgaacctgggaggcggaggttgcagtgagccgagatggcgccactgcactccagcccgggtgacagagccagactccgtctcaaaaaagagagagagagaaaaaataaaaaagacgaccagcgtgagaggtagtgggtaagtggaaggaagggctgactcatgtgcttttcaggctgggatgcttcgagggctaccatctgtgtt

SEQ ID NO: 46409 - DNA, 912 bp, Homo sapiens
tttaatcctaaatgggtcccattaagaattccttcgtaattttgtcatgctttaaggcccaggaaaggcctaggcaaaactcctggtgggcttttgttacattccagcctttgtataagggcactggcttttaacatttaacttaaccacgcagtcagtactgaaacagttgttatggaggcctgccacaagctcacttcaggagtgccctgctgttcccagcacctccacacgttcagcaaccaggaagctctttgaaccccattggtcagaggtttttattatgtagtcttgatgaattaaatcatgtccagctgctcacccctccccagaagttgggagcaaaactgaaaatcccaaccttctaatcatgctttggtctttctggcaaccagaagctatccaaggaccctgcctggagtcacttcattagcataagctctgttgtgaccaaaaagggttggtttgcagtaacaaaggacactgctgtcactcaggaaattccaaaggtttcaggagctctgttcctggaactagggacaaagatcagatgtattttttatactctatcccctgggcctgtgttaatcagaggttggtgtcatggccacggataacttctccattactccatagacaaaatgtaaaacaccacatgtcacttccccctttccctgctatcatacccccaaacttacagtatccacacccatcctccctgctttcctgctgctgccatgaaaaaaatggctttctcctggtctgtggccagtgatagtctcaatcctgcctcccaccccttccttaagggcctctctgattgcttacgctccgctcccccatcagcatgcagtaggctccaacccctcccatcttacaaagcaaaaccaaaaaagcctctcccttgacctc

SEQ ID NO: 46410 - DNA, 653 bp, Homo sapiens
tgtgagccactgcacccggccataaggccttattttaaagcaaatgtaagttcgattatcagcaaatcaccaattttctgtgatataataatctaagggcaaagcagtttccttataaggctaaactggtaagagtacaggtttcaaaagaaaagaatgggcagtaacgaagtccacttataagctgggactgctctgcagcagctaaatagtttccctgtggacacgcagagcaaattcagaattaaagggggttgtaaacccacctgtttgttggctcttttgagatagctacaagctctcctgtaacagcactaaggtttcccccaattctgggaattctaggtccatatatttaacacaaggtgtaggagggcctgcctaggttggtcagtctggtgaacaaactggtttcatggattccaataggttacattttaacactatgaaaacactgtgttctaagtattgcacaattaaaacaaattaactagaacaatttatgtagttcaggtgtaggtggggaaagatgaataacactaaaaactaccacaaataaaaatgaaaagtaaattaaaaactagacaagtgtatgaagcaaaaaataaattatctctagtatataacgagtcctgaccaagtcatcaaatacg

SEQ ID NO: 46411 - DNA, 2799 bp, Homo sapiens
aaagtaacatttcaagtcctactgcacactagaaccaagttagcaccttgctgtttctattaaacgatctaggattaaaaactggttttgaataatcccatatatggataatccaaaggtaaacagacacacacaaactctcatttacaagacttcgtcaccaagcacttacaaaatacatttcataagacagaagagaaaatggagcaagaggtgaggtcacctaccactttagttctattgaaagagagaagtcattatgtgctctccccaaacagtaggtagcctccaaaaacaacacacacccctacacccccctaatctggtattgtcattcagtggggtgacctaggaaggcctttgaaatgtgttgtatcagctcagagggaattagaccgcatacgatgccacaaaacatcaaataaatgtaaaactataaagataatacatctaaaattaagatgtattaataactaggcatacaagctctctctgaatacaaagtgtgtaagagctgatttccaagatcctttgcaattaaacgttagtacatgatgaaagttcttaaggcttagcctcacttgctgctaagcctgctacctgagtttctactaggctgtgaccaacttttgaacttgccacgatagcactaaactactgttatgcatcctactgataaaactggacatgtggcgcttaatacgccaaaccagaatcatcaatgtttgttaaagaactctcccgttactattgtgatgtccactccggaagattatctgcatctggttgaggtttagacagaagagaagcagttaacagacaccgactgtatacacagcggtctgccggcacactgcaaaaaagccgatacgccttacaggctcaggaagttgactaacccagggaaaagccccatgccctcctctatgaaagggagtgtgtggttggtagaacccaaagtaaacacggaaaaattcattcaagaatttccttaaggcctaccgtgaagacgtcggaggcaagttaagacgttggggagcaggtaagagagaccagagttcagaaacagaccgataatgatctaccagctccggtggggaggtccaagctaggggagtttgtgcctcctctgtggagttggggaggaaaggtaccgggcgggctctggtcctcctccgacagccctttccagcaggcccggggctgctaagacccaggcctggcgttgagcaacagcagctctcttccacatggttgctggagagcgaccctccgagctgccccgaggccatgtggctgcagccacagggtgcccaaacccggtgcacgttcaagacgtgaaaccagagcagagaaggtgccggaggaaaatccaaagaatgggatgttggggtacaagactcacttcctttgggctttgtccttcttggccttggtccttttctttcgggcctggagcgcaagcactgcaggagagagggatggatgaagggcgaatgtggaggaaaggaggcgaccaaggtgagggtggagacccagcaggggcgccaggcccggctgcggggcctgcctcgggggcggctgcgggctccggcgaggcggccggccgtggggctggcggcccacggggcgcagagcagcgcccgggcgggatgcgccggaggggtctcaggccgggtcagggggcgggcgggtgggggtctgcgtcgcccgccaagggccgggccctggagtggccccaaggcgcgagccggcctggcggggaacaaggggcggctacggccggcgccagaggacgcccggactgaggggcgcggacccgcagcccagaggcagggggtgtggggcggcgccacctcagtggaggggcgccgcacgtccgggaaccgaaccgcggcagttaagcgaagctcccggcgctgacccgggcctcgccccggcgaccattgcccctcgtggcggaggccgctccaccgctcacctttccgctccatggtgagaccggtaatcgccaggcgcctgcgcactcgagtggcggcgactcccgctcccgccgcggcccaaaaccgagcccgctcacactccgccctcagtcccgccccacccccgccccacgatgccgcgcgcttgcgcgttgggcgcggagcctaccacctgctcccgaggagggggcggcaaggagagggagggggcgcagcggggaggaacgccggggtgaacgttgaaggagtgttagagatccaagcttggaaacctggcaaggttagttttgttctatttgtttagaaaaggcgcagagagcggcagggctctctgcatgctgctgagtcagagcttcggaggcaactgggatctgcctcagtttcctggcctgtaaaatggattaatcaggcatgtcccagtttctccttccctgagctattgtgagcccagttgagatactatttaaagaaaatggaaaaaaattacatgtgagaaagaaaagggagtgggagcaacacaaaaagactggaaggaaagaacctgtgaccctattatcacttgaaaagtaaaaacttcaaaagtgaattttctcttgaaatttcaagtttaagtgaaagctgtaaaggaaagaaggggaaatgagaataaaaacgtttaatgttttcttattctaccaccttcaatacatgataaagctgtcttgtttataagttttttttgtttttattttctaagtgcattatctcatttgatgtttatggcaacttaaaggcaaaatagttattacttccattacacaaagacactaaacttaag

SEQ ID NO: 46412 - DNA, 1508 bp, Homo sapiens
taaacaaagtatgtcataaaaagttagtggaactaatctctggaatctccatttccatttcttcttctaaaactctccaagtctctttggagtctctttgactccaaagtttttgcatgcttgtacaaaacactcttcttctgaacatagcccaaatttctctgtctattaagcagtagtggaaaaggccaatgtgtccggaagaagctctgtgacaaacaaaacttggtccacataaaatggtacaatgtagtcttattctagaccaaacttgtccaacctgaggcctgcggggccacatgtggcccaggacagctttggatgcagcccaacaaaaattcgtaaactttcttaaaacattataaaatattttagcgatttttttttttttagctcatcagctattgttagaattagtgcattttatgtgtggcccaagacaattctccttcttccagtggggccagggaagccaaaagattggacacccctgctctatacccaggctctcacccctgcctaatctttctgacttgtattaccttttaccttatgcttcaccacatatttgcccatggactatgacactttgtctttccatgtgaaagttgactgttcattctgctgacacattcgtttctgaccatggctacaccttttactatgtttctgcagcagaagcttgtctttgacctctgccactgtttctctggcgtctgaatgctgactcattccccgggcaaccccagtttcaattccgatagctctctgacattttgtcactctgcatagttgagatgggacacctctcaggttagcctgttgtaattttatctagtcagttcaaaactcatgaacattgggccgggcccggtggttcatgcctgtaatcccagcactttgggaggccaaggcaggcagatcacttgagttcaggagttcaagaccagcctggccaacatagtaaaaccccatctctgctaaaaatacaaatgttagctggatgtcgtggcggatgcctgtaatcccagctactcgggaggctgaggcaggaaaatcacttgagcctgggaggcggaggttgcagtgagccgagatcgcgtcactgcactccagcctgggtgacagagcaagactgtgtctcaaaacaaaaacaaaaacaaaaaacaaaactcatgaacattagacttataaaatctcatgcctgcaattagacactttgcctctacagtcttttcgaccaccattctctctatgtatgcttaacacatgcctaaacatttagtttactgactcagaatacctgcagaaaatctgacctagataattttctcttatacaaaagtagaacaattatacattctctaggctctcctagacaaagacctgacaccctgtcatgaaagccccttgccatgcccttttgaagaagccaggaaaatttttgctttgctgccaaggtgtgtagagttgtattattgcttttccagactaggtgtgagaatgca

SEQ ID NO: 46413 - DNA, 2651 bp, Homo sapiens
gtctcgaactcccgacctcaggtgatccgcccgcctcggcctcccaaagtgctgggattacaggcgtgagccaccacgcccggccacttgtctcttttttatgcaagtgttttttggaatttgggggttcaggtgagcaggtgctctgctgctggtaactactcgcagttaaagatcttttgactctttccccgacacgctatttgtcagtgtcgttttccaccacagagccaggtatttgccccgccggccacggtgaggcgcgcgaggcgtgtgctgccagcttctctcttccttccccggtccgccttcgcgcccttaaggagacagtccctgggagtttctgcctttggtctccagttattgttctcttctcgcgagaactgctcctcccatcctcttctctcacgaagccccgcccgcggagaggttccatattgggtaaaatctcggctctcggagagtcccgggagctgttctcgcgagagtactgcgggaggctcccgtttgctggctcttggaaccgcgaccactggagccttagcgggcgcagcagctggaacgggagtactgcgacgcagcccggagtcggccttgtaggggcgaaggtgcagggagatcgcggcgggcgcagtcttgagcgccggagcgcgtccctgcccttagcggggcttgccccagtcgcaggggcacatccagccgctgcggctgacagcagccgcgcgcgcgggagtctgcggggtcgcggcagccgcacctgcgcgggcgaccagcgcaaggtccccgcccggctgggcgggcagcaagggccggggagagggtgcgggtgcaggcgggggccccacagggccaccttcttgcccggcggctgccgctggaaaatgtctcaggagaggcccacgttctaccggcaggagctgaacaagacaatctgggaggtgcccgagcgttaccagaacctgtctccagtgggctctggcgcctatggctctgtgtggtgagtgtcgctgggcctggggccgctgtgggcagggtggcccctcgcgcccgagggccaggcctgctccactgctcagcgttgcgtcaagtggcaggaattttcctcgggggagggcattgctgccccttcgagctctgcccgttctgcacctccagcacccctcgccctgcactcacgcaggtatgcggtccaccgtgtgcagcactcaggtccgctgcgagaggtaggtggtggtgctggagctcggttctggctagcaccctgcgccttcccctctcggagggttgctgctcggcaacaggcaccgggggaagggccgcttccttgggggtctccctgcctacctggagcagaaggaccctctcccgtgatgcgcccacgctggggctccggaccctgggtcctctgagcagacaagctcggggaactgccgggagaagcagaagggcacagcccaacccgaagactgcggtcatctgaacaaaactgaccaggaagggagctctctccgggcctttttttttttttttttttttcaaaactctgtcgaaatcccatcttgaaaagcgttctttttgaattcgcacttgaattaacagcgatccatagagcttaaaataccgactttatctcggtgagcactgtgccagcttgagtggtgtgtttccgattcggttgaaagcgtatttcctttccgtggaggggcggcggtggtagtgcctgcaagaacactgcagcttgagaaactggcaggctcactgattagtcacataccactgctcatttaagtattgttcgacaaaacaattttctcatttggagcaagaaagattcagatctgtaaggcgccctcaagatcaaaaagttattaacagtgctgggaggtattgtaaatattttttgagataattcctgcgaatactgtgttttaaaagtcccttagagagcttgcagggagttatctagttatctgcatttatggcctgaggtacacgatggttttcgtaaggatatggaaccacatagaaaaggaagggaagagatactttttagctttaatttacaccgtgagtgtgttttaaattaagtcgatagcatataatttccagacctgaaatatttcactaactgctctcttaacttccaaggttttataccctgtattttagattttctataatttgaaagctacggatcttaaactaagtatcagatttaactgttagctttttctgtgttttagtaattcgtattgtatgcgtcatttgaaaacgggcctgtaaaatcgtttttttgttttggaacaaattccaggcttttggatgtgttaatctttaaatatgatttctgtgtttcccaaagtcacatcatgaatttcctgtttggtagaatcttctgggtaattgagattgtgcaattgtgtccagcaacagatcatattgcattttctagttcaagttgcttaagttatgttgcagatagcaccgtgcttgacatctttctcccatttttacagcatggcagtttacattttaaaggaatttgcagcattttacattcagagagtgtgtgtgtgtagttggtttgcagcattttacattcagtatatacatattatataggtatatacattcagtatatacatattata

SEQ ID NO: 46414 - DNA, 556 bp, Homo sapiens
atagtctctgaggaatataacagtaaataagagctgaggctgttaatgggagagaagaacaatgtaaatgatcaaacaaaataccatgtggtaagacctgaaaggtcctacatgagttggtctccggtgtactctctaatctaacctcacctagtcctctttccactctgtctccaccccagtcactctggcctcttgttctttgagtacagacaaccacatttgcaataagacctttgcaccagtttctgttattgccctggaactttttccccacatacctacatgactgtctcctttccttcaggactctacccaagggtcttctcatcagaagctcttcttttgttaccattctaactgaaatagtacccctactgtcactgtttactccttaccctgctttgttcttagcaaattttgttattgtctgtcttctccctttctttgtaagctgtgttcaagcacggagtttgttttcttcgttgctgaatcattattggagtatatgcactccattgtttgttaaacaggtgaacacaagaattgccattat

SEQ ID NO: 46415 - DNA, 585 bp, Homo sapiens
gtttatgtgcaaacctttgtatggacgtaagttctcattgcacttgattaaatacctgggagtgacatttttgttttgctttttgtaatttcattttaagttcttgctgtatatttaccatacattctaagtatggaccaggaaatctctttatgaaagtgctattttgttctcctttttaataaggcaacagaggtttgtttgttgttgttgttttgtttttttttccctgcctgtttctaagtcttagcagtttgtctgttcctcttctgccctttagattctggattttggactggctcggcacacagatgatgaaatgacaggctacgtggccactaggtggtacagggctcctgagatcatgctgaactggatgcattacaaccagacaggtattactcgccttggttatttagggccttatttaattccatgttggatgcatttgggattctcagaaatagagatggtgggagtgggaagaaatgtcttttcttccctcagtgatccttttaaagcctgcaagtaaaaatatttcacttcctcagatggggaagtggggttttatacacagcttttaaa

SEQ ID NO: 46416 - DNA, 2914 bp, Homo sapiens
tcccatgaacatatgctataagattttttacttgtcaacatcttgaactgagaagccagtattaaaatcttaacctttataacacaatgatttttgccatttgcagatgacaaaattccctgttattcttaatttagaaataatgtgagtggacttgtttctagtttgtttttgcttgctaaagaacacaagttgtttgggtttagggtggggtttggcgcaccttttctgaaagggccaggtagttaatattttaggcttgggaaccatatggtaactgtgcttgttgtaattggaaacacctatagactgtacataaatgaatgggcatggctgtgttctaataaaactttatatataaaacaggcagagcctggggtttggtgactccagcctagaattttcttccatttaagctgatttcatgtctgaaagaaagtaaaagacaggatgtcaaattactgcattaagttattcctataacgtaggcacctgtggcttatagagactgttgtttttaagtgctgctatgttgcctttatatgtataaccataagcaaaaatttctttcatcctgctctaccttttcctcaaatattttgactacctgtcatgtaccagatgttaggctggggataaatggtgaagaggcagagtggcccctgtcctcgtagagctgtagaccagtacagggggcagacagtaagcaaataaagtaattctaggctgtgataagcactatgatgttatcaagcatggtgctgagagagaattggggggtggggtgttatgtatatagagtgttgaggggaggcctcccttaggaggtgaagttgaagctgagacctgaagccaagaggatttagtcatgtgaaaaacctgatgggtcagaagacagtcatcctccccttctccctccctggaatgtcagtcagtataaacgtggataaactgttcacattttcagaggaaatattaaaagctattttataatatttttccccctctttttaacttcctttttaggtaagattaaaagcaatgagaacaaacaaatttttgtcttctggttaacacatgcacatacattctgagtatacattgaagtgttagctaccaggataaaagttatggcattgtggcctattatttagagcctttgggatgtgtgaagtttgttaagcattgttcatttgcattttataaggttgaaaccgcctgtatttgcgttctcatggcgctcctaaaggaacatgcgatgggagagcgccctctgctggcgactctccctcatagtgcctgctatagccagtgtgagaggcgaggcttccctttccagagggtgtgctccagtggtcaggctttggggtctcacaggccttccactgtcatatcacaagctctttaggtcacgcttgggagaatattcataaatagacttgtacatccctagctcctgtcttctgctgcttttttccttatctgtggccctctaattatcagtgcactttgctgaactggttactgacactgtgatggcagatgaagagggcagtgtaaactgagtgaagctcttgtgttttcacctgctgtctttggcagctaagaaccagctaaagttgcctcactttactgatacatgctgttgacagatgcataaaatgaatataaagtggatatgtgtttggtagcattttgaatctttgtacaggaggagcatgccctacgtgaagtgatcatcctgcaggagccttgacctagagggattcaccgtgttggctaggtttggggtgtttcatttttgttctcggtgtgttctgtttgtttgtttttgttttgtttgtcattgtttgtttttcatttttattttgtcccaacattttcctttatggtccaccattagatattgatcagttgaagctcattttaagactcgttggaaccccaggggctgagcttttgaagaaaatctcctcagagtctgtgagttgatgctttgtaattatctgccctgttgggagcctctgccacttgccttctaccaatctgtactttgacctgggtgtgtttgtaagcacacatgccctttgtgtgctgacttcccggatgagtgaggtataagacagtgtgagtgtgtgtgtgcgtgcacgcatgtgtgcctgcttgcatgcacaagtgtgttttattctctatctgggtacacactaagatcacgggagcctccattagacaatagtatcccagtaaagcaatgagatttgagattctaattcattccaagagattaatgtaaactttgtgtctctgtcctcaagacctgactttcttctttctcagaagtttcacgtatgctctagagctcttttcactgtttctagtgtttgttctcagagcatgagcttcaccatgtatttagtttaacttaatcactaaaagaataaaatgtacattgtctgcacactgttgccccttcccagaagttattttttattgttttagaatagatactcacatatcctatgtaaaatgtttgttcccaacagagggacctttctacccagtccctagaccccactcagaagaaacagcttcactcctgatacctcagatacacaggaatgtggttataaattttcctcctattgccttgtaattataagttagataacctgagacagagtttggaactagtgctttcttgcttctaagcagggacttagacagaagccatgggaatgtgagtctggcttacttttgctatgatttcctgctcttggtcattttcttgggccagaggcatgagagaagccatgaaagcccagcttttctttttccctcgatctgctgccaggcagttgaacaaaagaaaaaaagagctatggagccaagctccagttatgccttcctggattct

SEQ ID NO: 46417 - DNA, 1806 bp, Homo sapiens
tatccatacgtcctttataaacatcattatgtattggtgcttaagacttcagtcacatgaggtaagctttccagtttacaggcaaaagggggtggcaatggagcccttttctttatttttttgtttttttagatcaaaacaaaagccagtttggtctgatgctgccatttgtcaagcatcttttagaaagccgcctaatgcattaaattaaccaagtcaggtttaaagtgtttcccatgcccacagtgacagacgagttaccaggcatgcttaagcagactgtcaaacttttgtttactccttttaaacggaaagtcagattttttttttttttttttaaaagatgtgtggtgcggaacaagacgctcacctgtacacaacaaaggcaggtctttcccggctgtcctcactgggggaggggatggacaatcgctagacctttgtcctcaggtcctgggcatgggggttaggggagacgcgactttctgggagtcgtgcaggcacctgcagtcaagaaactacatattggttttgacctcaatgactgccctggcttaacctttggagaggccctttagttcggggagggggcttgctgctccaaaccgtagccacgtcacccacaaggactggggaggaaatgactgaccgctcaagagtcagggacccctgtctctcccaactagacccgaacgtccacagccctcttatcgggctcgccccgtggcgggcagggccgtggtgcgcagggatcgcggcgggcgcagacccggtctcttgctcggtgtccccgccgcgcccgcaccgccaccgtgaggccgagccggggatggtgccccgtggcggcggcggcggcgcctccgcgctcctctccgcaccgccccggccgccgccgcgccaggcacgggcggggggatttttttcccgtttccccctctttcgcgctctcgctcctgttcagcgggagagcccgcagagtcagggagggagcgagggaaggggtggaggtggcggggggaggccggaggggcggatcctgcctgggggctgatccctccctcccctcggccgggctccgtggcggcagcggcagcagcggcggctccattccccctcctcccccgggagcggcggcggcggccgggccggggccccagcgcgggccgggagggggcacggcggaggccacggaggcaggcgcgggagaagaccgcgctccgcttcccgggccgcgccgacctgctcggcggcctgcccgcccgcgcccaggggccccgaacggtggggccgggcaggcggctgaggtaatgggggcggcagcggggccggacagagcgggggcgggggcatcggggccttcggggaccagggactgcacggggggaaaccggagaagcggggggctttccgagcagggcgggggcggtgcgaaagctctctcctggagcgagggcggcggcagggaaggagaaggcgggtgagcgggggagctgagaagcgaggaccccctcccgcagccgccatcttgtctccccccccagccctggattccgagccgctaagccccgcccccgccacgccttccaattggcctggccagacgagagtcccgccccttgagcggccctaggtcccctgggtccctctgacgggcaggtgacgcagccaatgggttctcgcctctccgccccgctcattcgctggcgctcgctttctctgtctgagggtcggactccacgtcaggctgtctctggtgcgctcgcccctcccctctgaggagatgttatttccctcctttcttctccg

SEQ ID NO: 46418 - DNA, 896 bp, Homo sapiens
aacaaacaaacactattttcaaaagagaaaaagaaaggataaggatacatttctgaatcctaaggtctcaccacgggaagcctgtatctttacaattcaacaatcagcatggcccccagagatgacggggttcatccattcagatgagaaaatgaagaaagtggcaggattttgtaggaataggaagctccttcgggctcatgcccagccacaggctgccacagcacggaaaggaaaagtgaaaccagctccatcaagtcatttttcactctaggattgtcaaaagctttacattcatctcttgggatccgaggagagatatctgccgagagagaatttggatcggagccagcaaagcaaactccagaagccttggctgctgcgaaaggggattcaacacctttccgggtcgttctcacttcatttccagccggtccccctttggtgctgtttcccaagtaatcagacctcaggggttgcctcctggtggggaaagggaagcttgccttgctggagaaggggctcaaggcacaggacttgcctcggacttgccaaggaggcttgcaggaggctctttgtctactcctctgtcctcatccaagtaagaggagcggggaattccgaggctgtaactgcctgggaaacgccagccacggagctgctgaggatcagactcctgggtttcagcatggaggccagggaagggtctgataatgggtatgggtcctggcgagaggggagtggagaaaggccttggagtgggacggggcgccagctctgggggcagtctcgaggcacctagaaaaccggcgagtggggagaggctgctaaagaggggctccctgcgagaatgcgttcaccagctgtgaggacctggctggcgcacgaacttccaa

SEQ ID NO: 46419 - DNA, 1210 bp, Homo sapiens
ggagcgtttaatgaagacatttgcacacatgcaaggactcaggaatttttcttccatacaccatttgttaggaagcctcttgaggaagtattccagtaaaacacaataaatagagtaagactaaattaagaagaaaaaaccacaagatttaacaaaaggtggctccaacccatgtgtagggaagtcccagaatctcagtgatgcagtgtgcctagagagtaaccagattggagcaagataacaactctcaaagggaagttcccagtggaaagggagacttggtggaagtgattgtatggtttagaacttagggaagtttgaggatgtaataattacaaatcacatggaggaggggaggaaaggaaatgagaaagtccagaaaacaataaaagatcatataggaagcttatggtccaaatatgaagcaaattaaaatgtggtttaagtttaaactgaagggattgttttatacttccttccaaaaagatattcctctgtgttaaacctggcagggctttatctgtataactaggcataattttaggtgatttttctcaaggtaaagtcattccaggacagagtcttcgttgctggtagccaccacccctaagtcccagactgttaaaggaatttcaaggaagtatttgaacattacctttggaatgctgacacaacatggaaaaaaaatgaggttgaaagtactggaagtcttggcctctccacattctgggccatctgctgccagattggaaaatacatgtctccctttctcagagataaaccacctcaccagagctcaaggcttcatctcaaactcaaagtgacctcttcttttagttggggaaagtggtttcttttatgaggattttagagcattagctagtgctttaaattcaatcgctttgaagatgcaaatatttcaagtacaaaatcaatagttatggcaccaactcaaagggcatgccctttcataatcaaatttatcatagttaaatgtttaattcttaacaatctttggtctgaataataatttcgaaataatttgcttaaatttagcaggcctacaaatcaatctcaggaaggctcaaagtctcttgccaaggacaaattgatcctttaaaaagaattgccggccaggcgcgggggctcatgcttgtaatcccagcactttgggaggctgaggcaagtggatcatctgaggtcaggagtt

SEQ ID NO: 46420 - DNA, 935 bp, Homo sapiens
ccccttgtcaaatcactccattcccgcacagcaatggtgggcagggcctccttttgcttttactcatctttgtttccccaggagtttctaatttcccttaaatgatgtgtatcaggatggttgctctggacttcccacgaccctcaactcttctaagaaaatgtggctttgaattccccatacaaaaattatgtattttcccccgaagagttatgtttgtatgtgtagagcgcccccaaagagataaatcttggcttcagcgagtcacattcctgccttgtggtttccattttcagtctgtctgtgtcacagccccggacagaagccactgaggggagaggtggacctcctcaatctcctgcttcctcagtaagagttttcctctggacagtacttaggcattttctcaggctccccgccagagagcgccgccaggtcctcggaaccacctcgcgcactttagctgggcgcgcgacccgcgcaaccagtgagaaccccgctcccgccctaggctttctgtggtggaaaaagcgcgcgcgcggacgagcaggttaggcgatagaggtcacgtgggccagctgtggccaatggggagcgcacatggcgacgcggccggcggcggcgcgcgcgtagctcgcctcgggctcctggcgggagcgggagttagggaggccgggttcccgaattacacacaccagcgttatttattctatcagtctttggttactctatctggcgttctcgacgccgtaataacaagttcgtgccccctcacaccgccccctcattccgcacatccctcatttcttcagtggtatcataaagatgaaggggagaaacgcgctgctgcctgaacagaaaggcaacccaggtgtcctgggccagaagtgggaggacatgggagacagcactttattggaagatccctggtttct

SEQ ID NO: 46421 - DNA, 3618 bp, Homo sapiens
atacaaataaatatcagagactcggggtcttgagatacctacattaaattagaaataaaatgataaaaaccagcaaacacctatgctttctgtgaatatacatttctcatatcccgtctccttgatgtctgcccaaaaaaggtacccagtctgatatgctgttcattatatgaaattttagccaaaagttgaaccattaactattaaaagtcatgttatcacttatttattttggatgatggataacgggtgtttattatatctttctgtatgctttaatttccaaaatgaaagtgtttaaaaaataataataagactcggtagttagcctgattctccaaacttcaggccagatttttgtataccacaaatctgcagccagtgcagtggctcatgcctgtaatccccaaacttagggaggcagaagcaggaggatagcttgagcctaggagttcaagacctgcctgggcaacagaataagaactccattctccacaaaaagaaaaaaaaaaaaaaaaagaaagacaatatacaaatctacgggaaggaatctttccagaaaggaagaatttgtttcaagaactgttttgcaggaatatcagaaggttttttatttttctttgactcaaaggctgtaacactgtactttataaaaatggaaataaaggcattagtttgaacaatcctctatgctgctactgttgtaaagtttggagcctataactcactcaaattggtttatagccatgtgtttactaaatcttttttcatattccttttctccaggcatacaggaatttatatctcacagccttcttagagtcagtcaggttgagcctggtgactagttcaggacagtgaaacgtcagcagaagtgaaaaggccactcacttctggcagaggcaaaggagagcccttacaggattctccaatctagctcttctgccagcccggaagtgctgggagggcagagccactgacgcaagcagcagggaagctgagtcaccatggggacgtgagactgacttacagatgacgagtgcagcctcacagcctagtccatgttgagataaacacaatacagtcctgcatactttatagtcataaacgagggagaatagaaatggaaaatgaccctctaggcctctaagaccaaattataatgaaaaaatttatgtcttcagttttgaaaattaaattttttgaccctgataaaacaaatttgctatacaagtatccgttaaccgtgtgaaacctactgagtcaaactattttcttacattccttccacttcaacaccaattctaatccaattccaaattagttttcagagagtctcttgtaaggaaaaggagaatcgacttcgaattttaaaatttgtgctattattagtttatagagctttcaacaatttacaaatagtttgcataatcagtatatttaattagtatatatagacatatatatatatatttgagagggaacttcactgcaacctcccagttgcctcctgggttcaagtgattctcctgcctcagcctcccaaacagctagggttataggcgcccaccaccacgcccggctaatttttgtatttttagcagagacagggtttcatcatgttggccaggctggtctggaatgcccaacctcaggtgatctgcccgcctcggcctcccaaagtgcaaggattacaggcgtgagccaccaagcccggcctagtgtaatttttaaaagtacaaaagccactagaaaccgtgacaataagaacttccttttgggttttccagcatttggttcataggacatggaccatatatagatgttttttgaatgctgaaatcttttactcataacacagttttcccagtaacttgcttccggttgatttaaaatttgtaatacacctttgtaatagcaggtaccttcatgaaactcagtatttgagaaaaatgtggagtttttccccctttcttttggccagaatgtatatccagggtagtgactttcgagcaaatgcgtttaagcaactccagtattcttactacgctacctccaacctcgctccacgcatggggagatcagggttccacattttcgggtaagcattagccgtcctggcgctgcacgagcgtattctacaattccgaaaactactaacttttccgtctgcaacctttaataattgagagggtatgcgcaactcagaaaagtgcgcccgctgaggttgggtgcagagtggactggaggaaaggcgacacccatttacggtgcggccccggacggggtccccagacacggccttcccggcgtgccacgcgcggaggggactcttaacgtgaagcgctgggtgactcagccgcgtggccgcgcggtccggggcggggggcgcgcgccgctgcggcacagccggtcccggctgcggcttctggctgcgcggcctgcgcgcgcctcccgggcggattccagccccgagcgggacagcgcggcggggagcgacgagtaagtggcggcgcggtacggtttcgggcgcgaagaccgggcagggagagtgtggcggcgggcgtggcccgagtcttccctttgtggccgagggggcgtctcctccggacgcggcggcggttcggacccccgagtcgaaaggccgcggggctgagctgggcgcgaggaacctgtgggcagcggcttgatgggctcctgtttccgcgcggagggcagagtctggtgatcctggggagggaggcgacgctgcgcccaggtggtgggcacagctgaagtgtaacttgactgcttgactgctttttgcaggcctcgggtggttcatcccgccggagaggaatggcgagaacctggagtgttgactggcaaaacatttgcagacgcggtttttctggcaattaattggctccattaaaaattaggtagttggtggggacttcctcctgaactctggagccgagcgcattttgctcggtcttttcagccctgtttccgcgtcttccttccctgccacccgcaaattgccagctttcatccgtggctctgagtgcaaaagagctggggaaagccttaaccagcaattttcttttaaataaaactttgctttttatagcagtgtcttcaggtttagaagcccagttctgcactatgagaaaactcttctattttggagtttgtgattctttctgaaaattcctcagttgaagagatttatttttaaataagaatctagtgaacaaactaacatgataaacaaggctgtgaaggaactgtttaaccagcttatgaaaatatgtcccagagtccttagttttgttcctgttcgctgtgcgagaagttgaggtagttttttaatggtcttcaaaacaaagtgttgtagtagtgtctgtcggatgtgatgaatccagagtcagaggacttccgctcaaggcccccacctgaaaccccaattcctaggccatagttctgaaacagaagattgttccttagtaataaggttgcagtaccctagcacctcttccataaatttgattctagagatttgtgatgggtccctgagtctgggatttaagcaagcacctgcactcttggtctgttactgatgatccagggaccgac

SEQ ID NO: 46422 - DNA, 971 bp, Homo sapiens
taccctagaaaataaatttacttttcaccttacaagaaaaattcagtcaagacaacaagtctgcttaacagaaaacaacattctagagttttagaggtgaacgggattttaggggtttcctagatcagtattttcactttacggataagaacagtgagatccaggtggtaaagagatttgccaagggttatctagcaagttagttggcagcacagggattatcttctaatttgctgtaagtttaggaactaggcaactacgcttatctgcatgtctaaaaataaaaataaacaggccatttaagaggctgggcaggggcgtggtggtgcatgcctgtaatcccagctacttgggaggctgaggcaatgagaatcgcttgaacccaggaggcggaggttgcagtgagctaagatcgcgccactgcactccagcctgggcaaacagggtgagacttcatctcaaaaaaaaaaaaaaaaaaaagaggctgggcaggactcttctttaagcagagagcatgatttggaacctggactttgttacaggttcttgttgttactgcatttcctgcttcttggctgggttcctcattaactgatgaggttgcccaacagaagggctctagataggtgatgtattagtaacacagttaattatatgctaagagaaggtgactatctttggctttattacaaaattgccctctacatcaattttgctcttattttcaagtttcctttatttttaagagaaatgttcaaccaaattacagaaccatagcctttcagagaaaggaagtgacagcaaacttacctgtttaaaaaaaaaaggaaaatcatgacaaggcaggtcacagctcgcccactgggatgaccacaggggtgcaggtgttaaagcagaggctgctcagatcagtaaacgtgcatagttcatgccaatgcccccccaataccttgctgtccaaaagaaggttg

SEQ ID NO: 46423 - DNA, 1542 bp, Homo sapiens
ccaaaagaaaaatttcactgcaagttcctgcatgtcctcccctcttctcccaaaataagtaggttttcttctccctgaacctttcttcatgtttttcctaattgagtaccacaacccttccttgccaaacagaaagctctttcagaggtggtactatacttttccctctttcaagaagccaataggaattctgaacactgagggatcaatctatcacctgtgcctctgaatactattcacatttccccggggtaccaggttttttgtttttttttttttttgagatggagtcttgctctgtcacccaggctggagtgcaatggtgcaatctcggctcactgcaacctctgcctcctgggttcaagcaattctcctgcctcagcctcctgagtagctgggattacaggcacgtgccaccacacccggctaatttttctatttttagtagagacaaggtttcaccatgttgtcaggctggtctcgaactcctgaccttgtgatccgcccgccttggcctcccaaagtgctgagattacaggagtgagccaccgtgcctggccccggggtaccaggttttaataatatactgctccttttatacttgcaattattgcgtcagtaggtcatccagtttgggcatttttcattaacaggaatgaccttgcatgggctctttcaagctctccccaacagattgctcttgtgcccaagcaggatcatttccaagaattgcggggacaaagtcgcaaatgctttcaactctccaccactacctatataactcctttctgtaaatcctccctcctagggtcatctttttagagctgtatcaatctggtggggagaaataaagggtggagatacactattagtttccttctcgagaggcagtgcagtactgggaaaagcaagctctttgagttcaggaagtagagcccaacttttggtcccagtactcaatggctgtgtgataacaagagacattatatatacctttagagtcttaatttcaccatctataaaatgggttactgtcctgattatgggaaaaaagcagcctgtaaataataaatgttgatttccttctacctttcaactctccccctaagtcaatatttaaacaccaacaccatctctggcaaaacagagaacagagatctgggactgcggagagaagaaaaagagaaagcagacagacaaagcaattaggatgtggggctggcatgcctgactcatttaattccatatatttgttatatcaacaatcatgacttaatggtatgttagaagctttgaagttttgcaatatttttctacttgacaagtagctgtgatttttacctcaccaaatgctcctctgcctattacttttaaggactcaaaatcttccaatccaagtcttgttctcttcaaacgaagaaactctgtttccttccgagcatgtgctgatctccggagtcgtttctaatatttaaataaaaaagggaggagacgggaaggaactgaaattctgaaactctgtaacaagtcatgtttgtgact

SEQ ID NO: 46424 - DNA, 1435 bp, Homo sapiens
tgggacatgaaatggtttgctatagcgttctctcctcttaggaggaagctggtatctaacgtttagggtggggaggagagcctgttatcgaggtggtggttgttttatgtttagggaaaccaaatatattgcctggctaattcagaggcagggtgagctcaaagggtggagacactcagggtctacttcactccaaccctcctcggtgcatttcaaacagaacaagtttctctccgagtcttttagtcgtttcagaatgaactgagagatctggtctctctgccggccgttctgcccgctttctgacacagactttcctctaagcccttaccgactttttcctctggctgttgcttttccactctcttcttaagaattttccctgccttttcctgtgatttgaagcttatctgaagcccagtatcctaagactaacggagaaaggagccgactcaaagataccacaccccaaggggggctttcgacatctctgcctcagaccacagttcacagaccccagaagaaggaaaaggagataaaaaccggtgatgaccgagatccctgagggactgactggtggcagggagcagacaaaggtggcaacatggaaaggaaagcctggctcccgctccaactgcaaaaggagaaagataaaggatggggtggaaaggctgggactggaaaaatgtggagagggccaacaaggggcatctggagacgggggaagaagggggttaaggagaggggcggagagaggccaagaggctgagaggttagggcttgaaagagggcgccggcgagcaggagaaagcccaagaaggagtcggaggttggggaaggaggagataaaggaaaaaccccgggatggagtgaagacggcggcagcaagcaactcaccagagcccagggagaggcagggctggggacggcggagagccgcagacgccccttcggccagtagtctcgacttgaaggctggcgaagccccggcggcggcagccaacgagccaaagacgggaggggacgcgtgagggactctgagacagggggcaacaggcggttacgggtgaggacaacaggaagcgttccaactgccggaaaagacgcgagcgctgaggggccaaggcagcccggtcccccgccgcggagacgggctggcgcggcagcccggggccgagactacgcatgcgcgacttcccggagcggccgggattgcggaactgcgcttgcgtggccccgccctgcccctcccttcaccccctgcctagggctggctggacctgggtgaggccagatgtgtgagtgtgaggcggtctcgaagtaggctgggctgagggggaagttccattgttttcttttgttttactttttacttcgaaataattatggactcacaagaagttgcaaaattaatacatacaggttccctatacca

SEQ ID NO: 46425 - DNA, 437 bp, Homo sapiens
ttattaaaatatttaaatagttgtgtgttcattggtagacagcagctgctctgagacctcaagccagtgcttatcttccacccacccccggcacccagtctcttctcttgccaccctctgatgactgttttgattagttaggatccaggctgaactgtggttaaatattttgaataacttccctgggtgtggacacaaaccagactggaattctaactagtgtgacctggcaacggtattcttttttttttctttctttctgagatggagtctccctctgttgcccaggctagagtgcagtggcgcgatctcggctcactgcaacctcctcctcctgggttcaagtgattctcctgcctcagcttcccaagtagttgggactacaggtgcatgccaccaactcggctttttttttttttgtattttcagtagagacg

SEQ ID NO: 46426 - DNA, 2779 bp, Homo sapiens
ggaggcggagtttgcagtgagccgaggtcgcgccattgcactccagcctgggcaacagaacgagactccatctcaagaaaaaaaaaaaaagaaaaaagaaaaaaaaaaacataataattggcatatctttcagctaagagggaataaataaaaagacaggttctttttctctctttttttttttgtgcagtggtaggatctcagctcacggcaacctccgcctcctgggttcaagcgattctcctgctctcagcctcccaagtagctgggattacaggcgcctgccaccatgcccggccatttgtatttttaatagagacgggatttcaccatgttggccaggctggtcttgaactcctgacctcaagtgatccgcctgcctcggcctcccaaagtgctgggattacaggcatgagccaccgcgcccggcccttggtgatttttctaacccaatcacagtctctctccccttaattactcttgcggctctgtcttcgtaagggaagtggcccggacaaaatacatgccaggcagtgcaacggctgctaggagaaaggctcgagatacccctcctggcatttgcttgggggccagaatttacattcaatcttcttcagaaacttccctttccgggtgtttgctaaaggtgatagtttccaggtcacctgaccggtctcctttgctgtcggcgccaagtcctgcaagtttgcttgagagacgagaaaccagcaagagttgggcaaactttccaaaccaggcttttccttcagtgtggaatctaggcggccacagtctggtgccagctgggtcacaaacagctccgtgacctgtttgtaaacgcgatgctcttagttccagactaaccgctcacaagggtgaagcacttaattaattcatctcttaatcttgttaggggccaacggctcctattagtgtttgagcgtgacggcgacggtgctgtttatgaagccctagcctatttggaggtgaggaagaggagtctgtgggtaacctggaggtcgacagaccgggaggaacgctcgagggagcaccaggcctgttacaacgagcgcgcgccgacgcacgtctccacccacccggcgcaaccgccagagcgcgctcccagcaaccgcggctctcgctgcgtttgtagccatacgtcacggcctcttctgcttctcattgggggagcccgtccaatcatgtgattccagtatggcgtataaataaaggcgaggagaaggcggtggtccgccatttcgtggacgccgggtgagtgagagagttggttggtgttgggccggaggaaagcgggaagactcatcggagcgtgtggatttgagccgccgcattttttaaccctagatctcggtaagagaccagcgaaagagggaatgaggtggaaatggaatttaacagtaccaaggagccaggcccaatggcggcgccagattgagacaaagaggcgccgccgccattttgtgacgttcagcacggggcggtggcgggggctcccggcccatcggagggtttcctagtcttggagtggaagtctttatattcctcattggggcatgagccaggatgggggttacctgggagttgggaaccacaaaggggagccgatagccgagttgtattccaggtcacggcctttttatttttatggcgccttttttttttttggcccctcatttaattgggaagcttctcagaatgtttttgtaaagtcactaaccaagaccggacctttcagttcatattaaatggcccccgtagtcaccttactttcatgtagtttcagattttgcagcctgaatctaatcacctttttctaagaccgaaagatcttccttgaacttaagattcgttctttcatcgcttcccattaaaatggaggcttaagacaggtgccagcagtgtttttaaaaattttcaccagtggtttggtcttagaacttactcctgggcacagggtgtggtcacggcaaataggatgtgtctggactggatattttaattagacaagcccagagtaagaagaacgtggtgtttatggaaagcacttcagctgaattattgagtagatggtttttatgtaattgaaactggtctacaagtttatcagattcatcgtcgaagtgactcagtaataaagctttatcaaatacaagtccgccaaggaagaacaaaaaaataagtccccaaagtgcagtaaattttttagtagcaaatatctctttgtaattttttattaaagtgaaattatctttaagtggtatttagtatattcagtgttgtgtaatcatcacttacacgtagttccaaaacatttccgtcacctccccccgcaggagactactacccattgagcacttactcccagattccctgtcccccttcctctagtccctagcaaccactaatcttcctgtctctctgaacttagctattttagatatttagtatttatggaatcgtgtacttttatgtctggcttctttaacttagcgtaatgttttcaagattttccaacgttggaggatttgtcagtacatcattctgaataatactcattttatgtctataccacattttgcttatccgtttctgttgatggacatttgggttaacatctttgggctactgtgaataagtgctactatgagtttacattttttaaaaaactgtaaagttggtctcgttgcttgataaatttttaccgcgtaagactctggtctatctaatgacatttgatactagccttgttcctatagtt

SEQ ID NO: 46427 - DNA, 614 bp, Homo sapiens
aagctccattcctttcctcaagtaattttgattaattctcaacagaagtgggtggaaggaaaggtttttacttactctgtcatccaagactggtacctgagccactgccagctcttgggtatgacagcagttgacaggaataaaatgattcaaaagggtgttagtagtaaggttaatgtgatcatctccatttattgaggaagagatttaagttcggaggggcttggcaagttgtctaacttcgcagcccagtggtaatggagctgaaactataaacttggttacaggaccaggtgtagataaactggaaagggcttcagagtcgatagtccaaattcttattagtttagagataagaaagtggatttgttcaaggtcacacagggacacagtggcagagcagggctctggtgcctcaacagcaaatccagggcttgttatagggagcagtgtaacgttaaggccgtcaggcttggaaatagcagcccagatttgaatccttgcttccttacagctctgtggctttgggccaattgtgtaatgtctgggatttcatttttttcatctttaaaatggtgataataggaagcacctatcccctattgttaatatca

SEQ ID NO: 46428 - DNA, 1402 bp, Homo sapiens
caaagtgctggaattacaagcgtgagccactgcgcccggccaatttttgcttttttagtacagacagggtttcaccatgttggccaggctggtcgggaactcctgacctcaggtgatctgcctgtctcggcctcctaaagtgttgggattacaggcgtgagccaccatgcccagccagggatggtgattttcaaactttaaacatagttaaagtttttggaatgaaatcttatgtagaatacagaaaacagctaaaaatggtatagctataaaaagtataggttctaataatattggctcataaagacaagagaaatccaatttccttctgttattttggttgaatagagaagtgcaaatggtaacattttttaacactttattttgcaatccccgaggtgacaggataggaaggtccatcccataaacaacctagaagcacagacgtcagaagaacatcaccccaacatgtttataggcatttggttgaataggttttatgtgggggaaaaaacagaaaacttaaaaattgttagacctgtatatattttcaactcaaccaagtgcctgtgagccctctgcagccatagtgggaaaagtccttatactgcccacaccttcatgctacagatgaagagcctgaggcccagggaggaggagggggtggctgagactcagggagcctaggggggccatctccaggggctcggcctcctgccaccccatccggtgccctttctgagtgaccagtcatgacatctggtatggcagtgtgctggagcctggctgttcaacccctcaccctgagagggctctggccacttgcccatctccctggcagataaagcctcagacagatggcaaacagtacttggctccaggaatcaattcaggtctgattcaccagtggtttgtgcccgagccagcgccacaggctgtctcctttcccctgttctatcactcactaccctcactgtggccaggttgggactcttgagcaacaggcagatacctgtgatcttgagaattgcactgactcttttgagggttttccaggccacagcaggacttgtctgcctcattcctctgggcagctcagagcattaccccatcagctgcagtttcagtatcagggtggggcagtggtgtggggtggggcaccgtgttactaggactagccctgttggctgcagacacattggcaacaggtggtggctcaggggcacagaacaggtggactacacatctccaggatgaagtgtcatttattggcatttgccttttgaaagaagcaatctacttataaatggcaggaccctttttattttcttttttgagaaaagcattttattaaatccatatttggagatatgttttagcaaagtataattagcattttttg

SEQ ID NO: 46429 - DNA, 1381 bp, Homo sapiens
atggatatagggcaacaatcctgtgattgtatgatgactgtaggcttgatcatcataagggtcctgccatatgctggtccagttggcacacccacccatctcctgtgccagtggagtgtgcctgtgaaacagcagtcagctcttctggtggccctgaggatcggggtgaaggaagagtggatcttcatttagttagtttgcccctctgcaggaggaggggagttggatacagacctctcctaacaacccgcctggctactggaaccttcctgagaaatgtggttaacctctgggcgcagagccagcagttctaggctcccgtcacaagggggcaggatggggaagaaaacaggttctcaattccaggccttggacctgtcaggtttgctggcaggggcaggaaggagggtggggtcgggagtgtgtggtggttgatgagggatccaaccatcgttccgcaagagcggcttgtttattaaacatgaaatgagggaaaagcctagtagctccattggattgggaagaatggcaaagagagacaggcgtcattttctagaaagcaatcttcacacctgttggtcctcacccattgaatgtcctcacccaatctccaacacagaaatgagtgactgtgtgtgcacatgcgtgtgcatgtgtgaaagtatgagtgtgaatgtgtctatatgggaacatatatgtgattgtatgtgtgtaactatgtgtgactggcagcgtggggagtgctggttggagtgtggtgtgatgtgagtatgcatgagtggctgtgtgtatgactgtggcgggaggcggaaggggagaagcagcaggctcaggtgtcgccagagaggctgggaggaaactataaacctgggcaatttcctcctcatcagcgagcctttcttgggcaataggggcagagctcaaagttcacagagatagtgcctgggaggcatgaggcaaggcggaagtactgcgaggaggggcagagggtctgacacttgaggggttctaatgggaaaggaaagacccacactgaattccacttagccccagaccctgggcccagcggtgccggcttccaaccataccaaccatttccaagtgttgccggcagaagttaacctctcttagcctcagtttccccacctgtaaaatggcagaagtaaccaagcttaccttcccggcagtgtgtgaggatgaaaagagctatgtacgtgatgcacttagaagaaggtctagggtgtgagtggtactcgtctggtgggtgtggagaagacattctaggcaatgaggactggggagagcctggcccatggcttccactcagcaaggtcagtctcttgtcctctgcactcccagccttccagagaggaccttccca

SEQ ID NO: 46430 - DNA, 580 bp, Homo sapiens
cagagggatgaccgtgtgaggaggcagtaggaggacagccgtctgcaagcagggacagaagcctcaggagaaaccaaccttgctggcacctcggtcttagatgcccagattccagaactgttagaaaataaatttctattgttgaaaccacccagcctgtggtattttgcaatgacagtcctggcaaaataatacagtccttcagaggcacctattctttctgcctttaatttgctttggctttgttttatgtgtggccttgtttcatttgcttgtaaatgacttgagggcgacatccaggaaggagtatcttttcctgtgtccccacagggtgcagttcaatgccaggcacaaagtgcacagaatcagacctttgtcctcactgccagctttgtcgacctgctgacaagggtcagggggacccaagctgctatccacccagggtgcttttcaaaattcaagtcatggaaataatttagggagccacttgagtactttttggaaataatgagacagaagagcagataatagaaaatgccagcgtgtttctcaggcagtaaaagtgttacttcatgcaact

SEQ ID NO: 46431 - DNA, 2134 bp, Homo sapiens
ggactttgggaggccgaggcgggcagatcaccaggtcaggagattgtgaccatcctggctaacatggtgaaaccccatctctactaaaaatacaaaaattagctgggcatggtggtgcatacctgtaatcctagctactcaggaggctgaggtaggaaaatcgcttgaaccagagagtcagaggttgcagtgagccgagattgcgccactgcactccagcctggcgacagagcgagattccgtctcaaaaaataaaataaaatttaaagataaagctagtcagctcttggggaggcttggagtctatgggggtgagggctgggcctccagggcaaggacttgaaatggatctaagtcactctgtccaggcaaagagccatggagccctgtccttgggttctttcctctctgtgtcctggggcaagtgacatgacttgcctgtgcaagtgcttcaatgtccctgtgcctcaatgtccctcattgtgccccaatgtccctacctgtagaagggatttaaaaaatctgtcatggagtgctgtgaggattaccaggagctgaagaacctgaaggcccttgctgatgtcagaggtggtttgttatttcaccatttcatgcaagtctgtctgctctaggaggggaattgttttcttgctcttccacctcaggagaaaggaacacacatgtccctcaccccttggaatccctggctggggctaggccagggggtcaagagtacccagaaaagtatttcaaaagctcaattccaaggtgagactctcctaagggtttaatgcaggtaaaatcaagttctggaaaactttcaaagcagcttccaaaggggagtcaaagtcctaagagatcaggaggaggagtcatccaccagcctctgtccagggaacaggagatcctggctggctgccaccccttcctactctgttcccaggaacactgcccatgagccctgagtcactactagaagccaccctgggcccacggggagcacagagctgggtccacggggagcacagagctgggtccacggggagcacagagctgggacagctctccctcaaggtggtccttgggcttggttgcccagcaaccccagcctcggcagcctgcttctctccacaccgtccctcccttctcagggctgacaacacttggaaacccatgctggcaaacctgcttccaagcagggaacttggacataagtagaatatcaggaattcctggaggacttacaatccagaaactgggacaggtgtaggtagatgattcctacccacgaccccagctctgaacctgcctccagctctggcacagttctcttctctctggtttcccagagccacgtctaggtcaccatcccctcccccaccccctcgttcagagcagagagcactgggtacacagccaggagccctgtttccagatcttgctcagccttttaccctctgtgtgacctcaggcagcccacttcacctctctgggactcagtttcttcatctgtaaaacaggggtggatttgattggttcttgattttttttgtaagcattatatattttactgttctttctaaaattctagggcatgaaccagaggagctgaaactacgctggtttccttctccaaatagagaaatgggtacctgcattcctggggatgcagctggagtttccaaactgtcagatcaatttccggggcttggaatctcattggtggggcaggggatgggcatcctttccatagcctgcactaggagggtgcggactctggactgcaaagggtgtgctctagtttgcagcgggcagggagaatggttgttccccacacagcagctgcattccaccccagagtggggaaatggggaacttctcttgggcagctctcactagtatcctcccttcttcacctctgtctcaactcagaggtcgtctggcttatttggtggagatgcccattgtccagggttaatcagaggacctcccaaactccactcactcagatctgcctctagatcattcctgaccttcacacctcctcaccaatcaaactgatttttaattaattaatttctgatttttttttgagatggagtctcgctctgtcatccaggctggagtgcaatgg

SEQ ID NO: 46432 - DNA, 2136 bp, Homo sapiens
ctaaatgttcacccgtgtgttgaagtccaatgcagcagtaaaaaggaaagggcaggatttctatgtactgatgtggaaagccactaagataaattgagtgcaaaaacaatgtgcccaacactgtgtttccattcaagcagattaaaaatatatatgtatattgtgtataggtccccagcccctcatccacaattcccaaatccaaaaggctctggaaaccaaaacttttttctttggtttgtggcaaatttatttggtagcaaaaccagagctaaaaggatgtgaagccatttgcagtttttaattgtccctgttagtgtgaatacattacagcccacagctagcaggacctactgtcttggtttgcctgggattgaaggggttccctggacatggaactggaacagtctggggcaaactggctgactgctcaccctgggcggagcccgctggtgttgtggaatacaggctgtatgcactttattacctgtctaaaatgggaaaagttctagattctgcaacccatctgtgcccaagggtttcagctgaaggacctggatgttcttagactatctgtgggaaggggacacaagccaccagccacagcctctgggaagaaaatgggtagctggagggtaggggtaggagggagagttttcactgaatagccttttgcatcttttgactgtggaccatgtgaatgtattatctactgaaaaaataaatacaggaaactatggacaaacaaaacgctctgcacttttgactaaactacaaatagaattttaaagattttggaaaaaataaattactgtgatgctgtcaaagcaatgcttgtcttttggattctgctgattccagtgtatcctgttctcagagccacttgtctattgaaccctagtctgggagtctggctttttgttttctgagctcagggggctgtgtaggtctctcctagagcagcaggtagactaaagctcctacttcagcagcacgctccacagtcaggggtgatttttttttttcctggttggtagttattattattttgaaaaatccagaacaatcatgcaaagcaagtagaaacaggctgggccagctgagagtgaccatatgccctgggtctcttggtgatataattagctgttttcttccagtggtgagtgggtggctcactcttctggcaccctgcaaggccgcatgatgatgcaacaatgcaacaaaagacaagcccgggcaaggccagcgggagctctgccggccagagttgctgatgcgaggcgatgcacgggtgtggggagggtgtttcagggctgcagggaagtgggaggccccaactgcccaggaggcaaaactggcctcctgctcactcagccatgagcttttctaccccaaaccctggctcactccttccttccctcctccctgttcagtggcagaatctattcctagttcactcagtctcccaggggttaaagggtccgttgagacttctagaagtgagatagaggggcctgtgcaaggagagactaaatcaggcttcccaagccttgaggatggagggtggggagctttcaattacctggggagattttttcaaaatatctgtacacttgtgcagccggcagacccttatccaattttaattcagtgggttgagatagggctggcacttggaatatgtattttaattgtgttaattattatctaagatggtattaacgatttaaaaatatatattaagaagaataagcctactttacaccccaagacagacaggctgtgcacagcacaactccactggtgggtgctgtccacccaggcttcctaatggtgccctggagggggtaacacaatggacctgctcctctctccagaggcagccattgccactgtttcctgtgtctctccttttttttttttttttttttttttgagacagggtctcactctgctgcccagactggagtgcagtggcacaatcttggctcactgcagtctcgacctcctgggctcctaccttagcctccccagtagctgggaccacaggcgtgtaccaccacacctggctaatttttgtatttttttgtagagacaggttttcaccatgttgcccaggctggtctctaactcctg

SEQ ID NO: 46433 - DNA, 5756 bp, Homo sapiens
cgcccggccagtatatatttttaattgagaagcaaaattgtacttcagatttgtgatgctaggaacatgagcaaactgaaaattactaaccacttgtcagaaacaataaatccaactttttgtgcaaaaaaaaaaatacaaatattagctgggcatggtggtgcatgcctgtaatcccagctactcgggaggctgaggcagaattgcttgaacctgggaggcggagactgcagtgagctgagattgtgccactgctgactttgtctcaaaaaacaaaacaaaacaaaaaaacaaaatgaaaacaaaaagccagggctgcctctgctcaataatgttctatctttgttccgcctcttctctggggtctcacttcttgggagcctgtgtgaaggtgaattcctctgaaagctgactgcccctatttgggactccccagtctctttctgagaaatggtgacattgttcccagcacttcctctcccttcctaggcagcttctgcagccaccactgagccttcctcacatcctccttcttcaggcttgggctttccacctttcaccattcccctaccccatgctgctccaccgcactctggggagggggctggactgggcactcttgtcccccaggctgagcctccctccatccctatgctgcctgcttcccaggaacatgcttgggcagcaggctgtggctctgattggctttctggccgtcaggaacatgtcccaacatgttgagctctggcatagaagaggctggtggctattttgtccttgggctgcctgttttcaggtgaggaaggggatggtaggagacaggagacctctaaagaccccaggtaaaccttagcctgttactctgaacagggtatgtgatctgccagcagatccttgcgacagggctgggatctgatgcatgtgtgcttgtgtgagtgtgtgctgggagtcagattctgtgtgtgacttttaacagcctgctcccttgcctttttcagggcagaagtcctcccttagagtgtgtctgggtacacattcaagtgcatggttgcaaacttttttttttaaagcactgaatagtactagacacttagtaggtacttaagaaatattgaatgtcgtggtggtggtgagctagaagttataaaaaaaattctttcccaaaaacaacaacaaaaagaattatttcattgtgaagctcagtaccacaaaaatttaaataattcattacaagcctttattaaaaaaaattttctccccaaagtaaacagacagacaatgtctagtctatttgaaatgcctgaaagcagaggggcttcaaggcagtgggagaaggtgcctgtcctctgctggacatttgacaaccagccctttggatggtttggatgtataggagcgaaggtgcagacagcagtggggcttagagtggggtcctgaggctgtgccgtggcctttctggggtttagccacaatcctggcctgactccagggcgaggcaggccaagggggtctgctactgtgtcctcccacccctacctgggctcccatccccacagcagaggagaaagaagcctgtcctccccgaggtcagctgcgttagaggaagaagactgggcatgtctgggcagagatttccagactctgagcagcctgagatgtcagtaattgtagctgctccaagcctgggttctgttttttagtgggatttctgttcagatgaacaatccatcctctgcaattttttaaaagcaaaactgcaaatgtttcaggcacagaaaggaggcaaaggtgaagtccaggggaggtcaggggtgtgaggtagatgggagcggatagacacatcactcatttctgtgtctgtcagaagaaccagtagacacttccagaattgtcctttatttatgtcatctccataaaccatctgcaaatgagggttatttggcatttttgtcattttggagccacagaaataaaggatgacaagcagagagccccgggcaggaggcaaaagtcctgtgttccaactatagtcatttctttgctgcatgatctgagttaggtcaccagacttctctgagccccagtttccccagcagtgtatacgggctatgtggggagtattcaggagacagacaactcactcgtcaaatcctccccttcctggccaacaaagctgctgcaaccacagggatttcttctgttcaggtgagtgtagggtgtagggagattggttcaatgtccaattcttctgtttccctggagatcaggttgcccttttttggtagtctctccaattccctccttcccggaagcatgtgacaatcaacaactttgtatacttaagttcagtggacctcaatttcctcatctgtgaaataaacgggactgaaaaatcattctggcctcaagatgctttgttggggtgtctaggtgctccaggtgcttctgggagaggtgacctagtgagggatcagtgggaatagaggtgatattgtggggcttttctggaaattgcagagaggtgcatcgtttttataatttatgaatttttatgtattaatgtcatcctcctgatcttttcagctgcattgggtaaatccttgcctgccagagtgggtcagcggtgagccagaaagggggctcattctaacagtgctgtgtcctcctggagagtgccaactcattctccaagtaaaaaaagccagatttgtggctcacttcgtggggaaatgtgtccagcgcaccaacgcaggcgagggactgggggaggagggaagtgccctcctgcagcacgcgaggttccgggaccggctggcctgctggaactcggccaggctcagctggctcggcgctgggcagccaggagcctgggccccggggagggcggtcccgggcggcgcggtgggccgagcgcgggtcccgcctccttgaggcgggcccgggcggggcggttgtatatcagggccgcgctgagctgcgccagctgaggtgtgagcagctgccgaagtcagttccttgtggagccggagctgggcgcggattcgccgaggcaccgaggcactcagaggaggtgagagagcggcggcagacaacaggggaccccgggccggcggcccagagccgagccaagcgtgcccgcgtgtgtccctgcgtgtccgcgaggatgcgtgttcgcgggtgtgtgctgcgttcacaggtgtttctgcggcaggtgaatgacgggcgtgggtcggtgcgcgctcggcttgcgcacacggtgtctctaagtgcgcgggtgacgagagtcgggatgtgccggagaccccggggcggagagcgggattacaagtacaggaatccctggtcacgctccccgcccctggaaacccagctggggcgagggagggcgtggacgggaccgttctgggagctcgcctttggctgcggttggctccaggccccaggcgcagtttgctcgcggcgtggggatgaagtccgtgtccctggaggggcccaggaagggcgaggaaagcggagtggagtaagttcgtctaggatcggtcccgggtggctctgggatccaatctgcgccgccctggcccaggtcccaggttcaggtcctttacgccactgtgtccaccacctggctgagcgctgaggtcagcgcgggctgtttcctggcccttgggaatgtgccaggacccgtcccctaaggactagcgaggaggtgactcactgtgacaaggagaccccagggaacggactgtatgaggtcagaaccccgcccgggatggggtacagcgggactccagaagccctctcccctgccccttcgcggtctccgtcctcccatcggcacagtgacctatttggctggaacagtttgttcccaaggaagccgggcactggaggtccgggacaccgcgtcgggtccccgctccgcggcgcgctgtaggggtcggggagtcacggccctgctctgggcgggctctaaccagcctgtcagtcggggaagggcaagggtctcctctacctctttcccaccgcggccgggagaatcgcggcccagcctgtcctcgggtcggggcgctggactccggggcgggagcggagcccacgcctggatgggaggcggggagggttcatgtctttgaggggtggggggtctggggggcacgacgctgctcagggcctctatcagctgcctcgggggctcagggcttcccgacctagcccagattccctctccgaaagctacagggctgagcggagcaggggggcgagtcgccccctggggcgccgccgcctggcgcggaccacagcgcgtcctctccgtcccaaacccctgggggacacttgcgccctcttcgtgaggaaaagcatcttggagctgggttaggaacttggggcgcccaggcagcttcccctctccttgcctccctccacgtcgcgtttctgggaggacttgcgagcggttttgttttcgttgctcccgtctatttttattttccagggatctgactcatcccgtgctttgggcgtggagataaggtggaggggccggctcccggcgcgcgcgcgcgtgcgtgtctgcgcgggcgtgtgtgtgtgtgtgtgtgtgtgtgtgtgtgtgtgtgtctgtgtcagagacggcacaagagcgcgcggtttcccaacagcggcgggagtttcggaagcctggccggctcagcgtgacgtgttcgcggccccccggtcccctcccattctccccctccccaccccagggtgacgcgcagccggagtggaagcagttttggcgggcgagcagcgccttgcaggaaactgactcatcactactccctccagcggtccgaggctctgcccacgcacctcccactccgcgcgtgatttcctggaggccggcgccccctcccggccctggcgggaatagcacacaggctttcccgcggagtggggctggccggcgcgaaccgccgcggctactcctgggctcatccgagatcaacccctatgccattaccaccccttcaaaggagcactccttaggttcaacagtattcactgagctcttactggaaattaaaatatggctgaagtctaaggcaggaaggccaataaaggaggctatttttaattgtttctaaaacaagggtttgcgtttctgagttttctttgggctgaaagttattatgagcatgagagcagattttgatgggggaggagaggcctatgagagccataagagaaggaggggtggtagaagaggagagggtgcctgcctagatcctagtcctgtcttgaactcccgagagccagggaatatccagcaccttgatgaagccctaggcgggcgcctcctccttgtgcctatgatgtattgagacccagaatgtccatttcaaacataccagtgtgtctccgcttggctggcaacccaagagtgcccatctgaggaattgtgccaaacacttgcttgaatcttcaatctggattaagttggtctcgggaggcagggcctcagcaatctatattttgaaaaaactccctaggtgcttttctttctttctttttttctttctttctttctttctttctttctttctttctttctttctttctttctttttctttctttctttctttttctttcttttctttctttctttctttctttctttctttctttctttctttcttcctttctctttctctctttctttctctttctctctttctttcttttctttcgacagagttgcactctgtcacccagg

SEQ ID NO: 46434 - DNA, 3288 bp, Homo sapiens
atgcccagatttttttttttttttttttttttttgagatgcggtctcgctctgtcacccaggctggagtgcagtggcgtgatctcggctcactgcaagctccgcctcccgggttcacgccattctcctgcctcagcctcccgagtagctgggactacaggtgctgccatcatgcccggctaatttttttttgtatttttagtagagacggggtttcaccgtgttagccaggatggtctcaatctcctgacctcgtgctccgccctcctcggcctcccaaagtgctgggattacaggtgtgagacactgcacccaaccacccagctaatttttatttatttttatttttagtagagacagggtctcagctagttgcccaggctagtcttggacccttgggctcaaatgattctcccacctctgcctcccagagtattaggattacaggcataagccactgcccctggcctccccaagtgattgtgatgggcctctctggttaagaaacctcaaaattagagagggagtggggttcaatactacagcacaggactcagggcaaacaggcctgggttcagatcctggctgtgccacttatgaactgtgtgatgttaggcaagttacttaacttatctgagccttggttgcctcttctgtaaaaagggagctaatagatatccactttttaggaggattgatatttttaaactgcttagaacagcccccaaacataaaaatatataaataaatcccaactcatgcctagcagagggtggatagaggttatttgagggctctgtccactgtactgggtgacccctttatggggcagtggcctttggcctttttagctgtatgactcaggggcaagtctcatatctcttccatctcctgccctttaaacttggtgtgaagttaccaagagcctcctctcccaaccagctgggacgtgaaactgtgggctccactgatcacaagcagtggggtgaggtggggtggagcagatgtggcatgtgtcccgggcttcctgcctcatgaggactcagcagagctttcacccccagaaactgcaagttgggacttgtccctaggaaaatccagttgctgccaaggtcgtgcagtcactcagccctggagtcaagccagagcaggcaggtaggtgccagggctccctcatgggcaaactcactctccgttttccctctcctgaagggggaggagaggagccaggtagaccagccacctttaattttctttttgcctgcaaaacggtttccttggacacaggcaacacgaggcaggggctgccaggtgtctagacttcagatcacctgatgtgcctggcaggatgtggctcagcctgggagaaatcatcccttgcgctgccccgcccggcccctccttacccctaggccacccgcctgacgacatccttgggaaaggccctcagcctacagcacctgtcagctgctgtctgaaggaggtagttggcagggggaagtgataggggggaggctcagtaaaactgaaggcagagaggaataatcatacttctgttttcaatgcacttctctatacgaagtgctgctggcacgttacctacattaactcagttaattctcatgtctatcctctgagacagtcactattactatccccattttatagatgaggaaactagagctcagacaagttaagttgcttgcccagggtcacctagtaaaacctggactccagcccaggtgatctggctccagagccctcctgcttaaccaccaggatacagcctttcattcagctctgttctgtctgccttgctgcatggactctgtgatcaatttcttgagtatgtgtctgtagccatgctctttaaacttgtacatggccccatttatggatgaggaaactgagacctagagacattaagtggctttttaaagcttacgtagtaactggcagagctaggaccacaacccgggtgctttttgccccaaagtcccgggtacttttacttggcagagcagggttaccctacttggggatctgggtcgggggacttaggaggctggaggaactgtcagactgtttcttcttttgggaattgaccttctggccagggctgcgattaggaaactgctggactctggcaattcacacatatttggggggcattcacacccatgagggacacctctggggggaaaacaaattgattttagctgataatacctggtggcaaacaggaccctggtccttgctcttgcaatagacttgcctttgttgacattagcttgcccttcagttgcctgctctcccagtgaccttggtgtgccaggctggctgagctctgctggtgggggtcaggcctcctgtgggaaggaagcaggaagaccagctggaaggagtgagagagaccctctggtaggaagacgtcacctgaggtgacacagcaaagcccggccaggtaacatagtgtctaatctccgccgtgaccagggccttccttgtatctctgctgcaggcgccatgtcagaaccggctggggatgtccgtcagaacccatgcggcagcaaggcctgccgccgcctcttcggcccagtggacagcgagcagctgagccgcgactgtgatgcgctaatggcgggctgcatccaggaggcccgtgagcgatggaacttcgactttgtcaccgagacaccactggagggtgacttcgcctgggagcgtgtgcggggccttggcctgcccaagctctaccttcccacggggccccggcgaggccgggatgagttgggaggaggcaggcggcctggcacctcacctgctctgctgcaggggacagcagaggaagaccatgtggacctgtcactgtcttgtacccttgtgcctcgctcaggggagcaggctgaagggtccccaggtggacctggagactctcagggtcgaaaacggcggcagaccagcatgacaggtgcggacatgtgcacggaaggactttgtaagggaccaggattctcagaatccatggtccaagggctgacctgtctggtcctggtccagcatgctccaggtagaaggaaacaggcccagagaggggaagcaacctccctgaggtcacacagcaagtaggcagcaaagaccaactagctaacatttattgggaatgttcattatgccaggccctttgccaagcttctaaggtagatttatttagtccttatagcaatgttataacataagacattcttgtcaccctgcccgcctttctttttgagacaggtgtcttaac

SEQ ID NO: 46435 - DNA, 1095 bp, Homo sapiens
ctgaaaaaggcataagaatgttctacacagtggctcacacctataatcccagcactttgggaggctaaggcaggaggacggcttgagcccaagagtgtgagaccagtttgggcaacatagcgagactcttatctctacaaaaaaaaaaaaaaaaaaaatagccaggcgtggtggagcgtgcctgtagtcccagctacctgggaggctgaggtgggaggatcacttgaggagcttgggaagtcgaggctgcagtgagccctgactgcaccactgcactccagcctgggcaacagagtgagaccttgtctgtctccctcaaaaagaaaaaaaccaaaagaatgcttccagcagcattattattaacagacccaagctagaaataactgaaatgtccataacagaatagatatgcaaattgtggtatatttatatagtggaaagttatccaacattacaaaaaacaaggtgctgttgcatgcatcttctggttgtctattcataattaaccaccccaagactgagtggcttaaaacaataatcatttatttgctcccaacactgcaatttggcccagaactacttttcaaatgtggaataattctctactgcacagggcagagctttctactagaatcatagagttctgaaacgagactctccccgccagaggggacttccagggacttcacaactgtctacttatccacagataaaagtccaggaccagggaatacactggggcgtgtgacccaagtgcttgtcccatagcctgcacctgtttcagagccctctcttgctccggccgctgcttaaacatggcagcttactaaatcatccaataaatgggctggagtgatctttagtacactgcctctgaaacccaaattaaaaagtggtaagaggggggtgggggcctgggggagggatagcattaggagaaatacctaatgtaaatgatgagttgatgggtgcagcaaaccaacatggcacatgtatacctatgtatcaaacctgcacattgtgctcatgtaccctagaacttaaagtataatttaaaaaaaagaaaaaaaaatggtaagaggtgcaagatatact

SEQ ID NO: 46436 - DNA, 643 bp, Homo sapiens
ttgcaaaaaaaaaaaaaaaaaaatacccaacaggaatcctgatggtcccacagaggcccctgaggtactgaccagcgtcaccccatttctgcatggagcaatttgcataaacatctggcaaatggagtgggagagagatgacacccaacaagtatataatctgtgccaagtcctttgtcatgtacttagcctgtgacactctatttaccctccatatcaacgccagaaagtagactttgctcccattctataggcaaggccacagaggctgagcgatgtgcctgatgtcaccggcttgtcaagaggcatgcagaaatgtgaactctgaactctgaagctcaagctcatttaaaggtgccctggggagtgcttgcactaccaaagccaaggactcccaaagccccatctgggccagcaatgctccgtcttatcctcactgtcctgcttcccatcctcagcctctcggagctgctcccaaacaaacgactgaagaggagaatgggagggtttcccatgtcctcctgcccagctcccagacctaaaaggcagaagtaatccgaggaaagcagggcgggagctgggaggagagaagccttggcacctagcccctggcacttacccatctcccctttcagatcctgtt

SEQ ID NO: 46437 - DNA, 1946 bp, Homo sapiens
tgactttcacttcttactctgtatgtctacattgcttggatttaacaatttattttgtaactttaaaaaataccaacaggagaattcagaaattacaggttggagcctgaagatgtagaattttgccatataaggtggggaagatggccagggagcatgaaatgaacagcatgagcaaatagagagaggactgacagaactctgctttagctgaaagcagcaatgggcaagaacagaaaggcagaggaccttggctggtccctggctgttgaggggagaatggcaggtagacaagggccagatgaaaaaaatcaccttgaatgtcaggattaatacgtttttactttatactgttatagcagcaagacgttattaaaggttttttgagcaggatcccttccttgtcctactttgtaaagatcactttgagctttttccaaagaggcaatggaatgaatagagctaaaggatctagcaaggtgagacgagcacaccaggctccaaacgaggttcttccagttactagctgtgtggctttggtcaaggctttaagctgtaaattccggcgtttcctcctgctaatattgaaagggagaaagttaaataataccttcatgatttgagttgctaagattaaactaaatgagatgacatacagcggggcatggcgccagcaggttggttaccacatcactctttgatagtggggaaaatgtgcttcttcctgtattttactggaatttgtttctacaactgtattacttatcacgtaatgtttacatgtctgtctctttcattataccgtaagctcctaaaggcagggctgtctgtgttttatctacctctgtatcctcagaactcatattccatatgcctggcttgcggactcattacacgtttgttgaatgaatgaatgaatgaatgagcggactgggggaaggaggacaatcaggcagctattgctgagacctcagcacaagaccccgcggagcttggacgcgggcgatggcggtcccctctcaaccctctgggggccgtctcggccgctgctccacgcccctccacgtggaggccggcctcccggaggaacgcgccaggaacgcagacccgtggtgaggcccgggctccgcgtctcctctgccagccccagacgcccgaaccccctcacctggtctccaagtaaacgttgggtggctgccaggaatctgggggaattgccgccatagcgaagccggcggcggaatgcttgtctagtaattgctacttccggcgtcgattagctggggacccgtcgctgctgcacacttccggtccgttcaaccctttcgataccaggatttgggtggccaagacaaggaagaggacggtcccttcttccaatgccgggaagctggggtgggagacgagaagaagctgggctcaagaacagaggaaaatgcaaacttcattcgcggtggtctccaagtggcgataccgcgccactctgggcgatctgattggttcgtttaggcatggaaggcgggaacaaccagaaaagctgcgctctggttggagttatgtcctaatattaaattcgaagaatttcttagtctcacaattgggcagggacgggaaggggaggcagagaatgaaagagggtagtttagagatgccagtaaagaatttttgtaaggcgctgtacgatgtacacagtgcttgcactttcttatctcatctactccacaaaacaattctataagtagatagtattattaccatttttcagatctgaaaatagactcggcagttaatacttgtttttccatagtcataaagcaaatctgagcctgcagaatccaaagacgaggagtctgaggagaaaagagagggaaggggcaggaagaaaataggagataaagaaaggaagagacaggagaaaacaggacaaacggatcagagcaagaaca

SEQ ID NO: 46438 - DNA, 1398 bp, Homo sapiens
tctgctgtgattctgggggttgcctgattcgtgaatcttccattgctcaattaaactcctttatacttaattcggcttaagtttttcttttatcaacagagtaagctctcactaatgagtgggctgagtgaaaactggagggatttgttcgtctttctcaagagtagtagcttccagaaggaaggggctgctcttcatttacatttcccttccactcccatcccttaatgcctaacatgctgcctggcacatagtaggggactcagtaaatgcttgttctatggatcagttcagctatgaagtctgtgtgagccagtccaggtaaattaggaagacaaggatttaggactggggcgaaaagagccagaacggaagaaggacgccagggggagcaagaacctacactctccagatatcgcgagaggtcccgcgctcgccacgacactgagtgttctgttttgggcggaagcgctggacgagaggaggaattactctagggtacaaggcctcgcccaggagtggggggttgcttccgggtcgcgctcccggaaacaggaagttgcccatcctcctcgcccggcggcagctgtccccgaggcgggaggagcccgaggggcgcgagccccgcatgtgagtgactggggcccgaggctgggtggggggaggccgccctgtgacagcctcgccgcgcccgtctctgacatcctcgcgcagccgcttctcgccgctgctaccaccctctatcccagcgcggatcccttttctcagtctctccagttttgtagactgacagcatcccctggcagctcccccggggtcgactcccttaagacatctgtcactttctttgactccgccggggagagcaaaacgaggtggaccttgcttgaacttggttctcaggcatcacagcagtgtccataacttgagcgttgctaatgaagtccagatttctgcccttttgacggaatttttaagaaattaagagtagattccccacccccttctgaaagatctttttctaataatcgttagggggcaataattttttttctttaaatgtgtacttggtatgtgataaacctggcatcttggatttcagaaagaaatatgacttggtttcttgacacaagtaaaatagttgtttgtaatcacctcttagtagaaggaaatttgcctgcgtcgtgttttgtagtattttaagactgttaaccgtgcaggccacactttctagtctcagagccctcatagcctttgtattcgcaaatatgtttcttttaaagtatttagtcataaatcactttataatagagactacttccagatacttagtattctgacttttctgatggctcatttggtagttcctgtggtgggatcttctatagacgtctctcc

SEQ ID NO: 46439 - DNA, 971 bp, Homo sapiens
tacctctccttcctgctcctgtcctctactccctcctcagaggctgcttcatatataccttaccttttcagcggtctccagtgcttatcattgtttgtttttaaaaattattatgggctggatgcggtggcttgcgcctgtaatcccagcattttgggaggccaaggtgggcagatcatgtgagcccaggaattcaagaccagcctgggcaacatggcaagaccccgtttcaactaaaaatacaaaaattagccatgtgtggtggcatgcgcctgtagttccagctcctcggaaggctgtagcaggagaatcccttgaacccaggaggcaggggttacagtgagctggacggcaccactgcactccagcctgggcgacagagtgagactctgtctcaaaataaataaataaataaaagtcattatgatgtctttcctttcttgtttcattgttggagctactggatgtaccagctatgctctttcagtatctgttttctccatatcccttcctctctcagactttgacccctggtggacaaacgactgtgagcagaatgagtcagagcccattcctgccaactgcactggctgtgcccagaaacacctgaaggtgatgctcctggaagacgccccaaggaaatttgagaggctccatccactggtgatcaaggtgagcagaagcctgagtctcccgctgattggctgcttgcttaaaggctaggtcaagctctaggaaatttctgacaagtaactctgtgttgttttgttttgtttcctgccttgccaagacgggaaagcccctgttggaggaagagattcagcattttttgtgccagtaccctgaggcgacagaaggcttctctgaagggtttttcgccaagtggtggcgctgctttcctgagcggtggttcccatttccttatccatggtgagtgtgaaaagggccgggcacagtggctcatgcctgtg

SEQ ID NO: 46440 - DNA, 766 bp, Homo sapiens
atggcttgtacatacaacatatagaatgcgtgtgtctattgatcatagaaacttcaagttaggaaggattctggaaaatatttagaccaatccctcgttttatagatgaaaaggttgagacccagagaggagaggtgaccaccccaaggccccactgtcagtcgagcagagcgtcaggtcttaagtgcctgcttgaacacagtcaagccaggagagggacaatcaaggactacaggaatatatacccattttgcaaataaaacaataccaagcagtatataagggcaatggtcacacaaggaaatgttaccttctgtgtggctgccacagccaagtcacagcctcacattgatgactcacccttgaccctggctcagtgtttgcccaaatgtgacttgtcctgtgccttatatcctaattaaaaatctgttccaaagaaacaggtttgaatccactgctgtcagtagcaatctgtttgacagccgagttttcttggaagaagcaaataaatcagcgagtgtcaccattgacctccttgcttttcctgcctcacaaaacctaggcaagacctggagtctctggcagagcccagactggttttccaattgatttcttttaattttacccattcagaagacccccaagcccctagaaaccttgcatctcatatgagggtaggaattggactgcaagctatgccaagtcttaatttaggttacataacttttatttcaattcagaaatgaaaaataaaaataaggtacaa

SEQ ID NO: 46441 - DNA, 2303 bp, Homo sapiens
gccacctatgtctccactgtcccttctgcccaatttcaatactcccgtgccccttctcctcatctgcccagatacaagcactgtgattcctctctctgaccccaactatgacttccatttcctcctccaaatgcgtcatcccccttccccgcttaaagcctcctcctagctcccctctctagacaaatcgctgccactcccctcccccaatgctggccctatctgttcccctccccccatacgcgtcaccctgtcccctcctcctaccaaatccgtcgtcgccatcaaatccagagcccccatctccggtaaaccgatagcattcccctgcaaaagtctttgccttcgcactctcccaccaaattaaatcacaatgcaacccaagacctccgtctcctctgtccacccccagtctggtgtccttctttccctcctaaatttctggccctggcgcccactttgtccccaccccaagacgttttaaatccatctctatcaaatccagagcctccgttcccctctaccccaattatgtgctcctcattctctaaacactttgcctgggcccccaaccttcctccccatctcttcacccaaacttcttgcccctcccccaattctattgcttcttccctcgccccaaattcgctcccttccctatcccaagtccatcgtccccactcctttatctcccaaatatgtttttccagcccatcgctccctccttggcactcccccaaatcgcttgttccttccaccctctcccgtatctgttattactctaaccccttggtctcctttctgtatcctaaaacccgtgacccctgcgttcccaactccctcacggcttccctcccatcccacccactcggccccccaaacccgccgtccccacccctctccccaaatccgtcgccattgactgcccgccccaatcctccaaatcctggcctgtcaccttcacatcagcctcccatctccctacggcgcctctggtcccccacctggatgagcagcttcacgtagagcaggggatggctgagcgccgtcacgcccgcgcccagtgccacgaaaagagcctcagtggtcggggcgttgtccccagaccccaggccccctgacccgccatccatcctgcgggccgagggctgagccgcaggccgagggtggcgaggatgtgcgcggtgcgcgggcggtggatcgcgagctcgagcctcgacccccgccgccgctccgccgcgagctccggctccagctccggctcccgccatccccgcggcaccgccgcgagcccagggcgccacttccgggtccgaagctcccatggcgcccggcggcgaggtcactccccgtcacgtgacggggccacgccccctcaccggcgtcagggggcggggccggggcgcaccactccaggccgcgggggagctcgggagcgtggtgcggcgggtgggacacgccggatgtggctccccggccggttggaggcctagcaggacactgggctgcgggccgggggtcaatggtggcgggcagccggggccccgggctcgggagctgtggcggcagccgcaggccggggcgctcccccgggatgcccagagcacgcgggggcggggttcggcgcctctggctgccagacgtccccaatatggtctgaggcgcttccaagccacctccctggcttcgggagttttctctgcagttctctgcccgcccctttgcggcccagatcccagtcgccgcggcctgcgtggaactctgcgcgagctgaatctcctgctgcaggacgagccccgaccccgagcccgatcccctccgcggtcccagcctctttgtccgatcgcattttccatctcctctgccaggaatgctctcccaaccagagcaaatccagatgtcccctcggcgactgtgggcaccctccccagctgtggagccttcgcacgccttcctcagagtccgtggttgtaaaatttgttttgctctaaagtatttgactgtctccctcactagatcctgagggttttagtgagtgcctcagtgtgagcacatgcaggcactgctaggcgcctgtagttgattcttagttaatacaagtgaataatcacaactagaccttaaattgcagggactatgtgacaggcactttttaaaatgctttatacgtgttgatttaagtgtaatcgtcacaagaaccctgcgaggaagataggacagcaagtgccctgttcctgtttgtaaacgtgcccgacactctgcaacaacacctacaacagaaccgtgctagttttgggggttcg

SEQ ID NO: 46442 - DNA, 898 bp, Homo sapiens
tgttaactctgcctactggttcaggcctcagtctccttaactccgccatggggatcgtgaaacctacctccagtgtggcagtgaggattccaccaaaaaacattctttcccttccctctcctctttttctttccccctcctccataactcaggcagggcatccagtgcgggtgagctaccagcttcttgaggagggtactgtgtccactacagtttctcctcttatcaatccaggcccagttaccagaggtagatctcgctttgctttttaagcactcctgtacttgagctgttctctgttgacatcacaaccccctctgtttactctgcaaacagagaagccctttgcaacctcagtctttgatgacctccagaggacaggaggagtctagctggacaggttggggccagtcagggaggtgtccccaaaatgtgttcaactgcaatcaggacagagtcagtttctaggacctgggaacacacctgccttcagatgtcagtgatgagttacatcccgaagccaggtagaaaggatgtggggattggctactgttcctggtgattcacttctgtaaataagagttgaattgattcacacttgtgagtgaaagtagttctttaaaaattacttaaaatagtgaaatacaaagaggcacaaagaataacaacacctgtgtagctgccttccagcttaagatagaaaatattctgacaactaaattaaatgtatgatccttgcttggattctttctggggtaaaataaagctatcaaggttgctcttgggaccattgggagaaatttgatgatgcaacatatctagataataatattgtattggctgggtgcagtgcctcacacctgtaatcccagcactttgggaggccgaggtgagcgga

SEQ ID NO: 46443 - DNA, 1001 bp, Homo sapiens
tctgtctcaaacaaaacaaaacaaaagatctggggactgacagaatgaattgtgtgactcagacacgacaaggccatcacctcgtacttactaatcatcgccaccactatgtccatgaggtcatgggactttcacatctttccacttccccagcatgacgctctgttattcgtctctgtatcccagggcttagcatgtagcaagtgcttgaaaaataccctctggcctggattcacgccagctctgcccaccctccaacacagtacattttcattttcttccttgaggtgactggaggtcaaagaggtaaaatgatgtgtccaaggcacgtagcattcctgtgcactctctcagggaccgggacgcaggtctccaacctctgacagtgaccccacacctttgtcctcaccttactgcctgtcccgccctcatggcttgataccaggacctgcttctttttgaagatggccacaatgagagtatttccaccatggaaattggcaaacatgaaaattggcatgtcagcccctctgacctgtcatcccccaacaaagagctagttgttccatttttaccagcacctcactggacagggagcctggcattctggggagactgagggaagccatcttagctcacatagccctgtctcgatcttacaaccagaccacaagcccctcgagggtggccaagatgccttatccatctcttttccccactcctgtcctcactctctgtcctgggcttgctgccagctagatttgggcctagggaaacactgagcttcttcaggttgaaggccaaggtaggggtgagggcatcttcctactggtactgctggcctgccctggcctctgcctggccaccgtattcctgttcttactgcctgggggagctgagcactgacatgctagagccatttccacctctgaactgttcttctcaccctcttctctctatgattctcagatttctcatctttgccattatcatgtctcact

SEQ ID NO: 46444 - DNA, 4689 bp, Homo sapiens
ctacaggtggcgactttaggcctgcatagatggctggggtgaggcaattcagcaaggggctatttgggttctggggcaggagggccaggtggggcctcaagtgccccccggcccccccgccgagaggaagggaggggggtggtgctggactggccaagttcactgtaggccaagggctggacagcttcctccccagacatgggccacatcggccacatcttctgagctgcggggtggaggcctggctgcccacctgcattccttactctgcgtacccatgatctcatcccggccctcagccacccacagggcaggaggctttgccccattgtgcagatgagacagccatgccctgccctgggatggtcatttggcctgggctcagggcactctagtgggccccaggctccggcggggtgagtggaatgtggtcacggaggccaccccacgctgtcttgttgggtttaatgagccccattggtctgtccataccctgaataagctctggtctaccgaccctcctatgggctgctggggcgggggaggtcccagggttttccagattcagctgtcctccctctgcagtctcagggacccagacagggctggctgacaaacaggtcctgcccgggatgggcgtggggctgagcgagcgaaactccttttaggaaggaaatctcggccaggttgagaaaccagcatcttgccaaggcctagggggtgggggagcccaggtgagccgactcagtcctcaggaatgggtggggtctccaggagaggcgggcacttcctccgccccagcccagggtcctgttcaatccttattgaggagtttcctggcgacaggcagtgacctgtcggctgcctgtgtgggaagccgcttggcgtggccctccccatctcattagtggtgattcacctggactcacctggctgtcagggacctgtcccactgcccgctggaaccagctcagcaggcaccctctgaggggcagagacctcgttccctcagctccccgtcctccatggtgtccagggcagagtgtaccaggcacacagtcagagctcacaattcattcatttgactaacaaatatttactgagcacctactgtatgccagacactgggcgaggtgctggggctacagagtgaaccaggcagacccaaatccctgccctcttggaactcacattcttgtgggaaaagtcagacagtaaacaaataaataagtgaatcacataagctgcagaagatggtgagtgctgtggagaaaaataaaggcaggaagagtgtgagatgggggccatgcctttaaatagggtgttcagggtgggcctttctgagaatgtggtatttgagcaaaatctgatgaaggtggaggtaaagaagggagctgtgcaaataagggagaaataaactataccaggaaacagcgagtgcaaaggccctggggtgggagtgggagtcagggtggtttcaggaatagccaggagacacgtagctgaagcaagctggcaacagggcagatagcggaagacggggtcagagaggtggaggtggtgcagacttgtggggtcttataggcctttgtaggaactttggctttttctcagttgatttctgtcaaaatgctcccaaatcccccagttgaacctgagaccagcgcctcagtcttcttccgcccggcttggagcttgcagagataactcaagggtcaggggtgttttcactgggaggctaccttctagcagggtctgggtggataagtttgctgggcaggggtgaggtgcccgtggagcacatgtgaagaggaggaagactgttcaggacacaagtacttgctgcagggggatttggtgggaagaggagcagaaaggagctaagctgaaagagaaaggtgaggcccgttctgtaggagccagcctcacgcaactgtccttccagcctcagctgggattgtgccccagctgacagtccatgctccaacatctctctttagtctgggtctttgcactgctcttccttctgcctggaaatcctcactgtcctttgcctggtaaattcccatgcatcctggcggtcttggcttagatattacgaagtggtcccttaggtcccagagcaagggctcctcccatgggcccagcacgccccccactgaagcatgtttcacatcgtatcataactgcccaccgtggggtcttgcttctctgtgagaccatggcctccacaagggcttggaccatgttggggtttgcctagaacagaggctgccacaggtgcgagcaaacacgcactaggatttggatccctcagatgcttccaagcagagtaacaagatcagactcacattttagaaagatgactctgactccagtgtctatgttggggagtgggcggggctggagatgggcaacagcttagaggctattgcaatagtccaagcagatgcaaggaaggatagaaccagcgagtcagctgctgggagcaagaagaggagcacgatctgggagagtttttggaagagacatcaacaggacctggtgaccactggccctggggatagtgagaagggagtggagggtgggtccagctttccctctgttattttgtgtccttcctcctgtcttgccggtgaacagatccgacttcctaaggcacaatatagtgcagcggttatgagcacaggctttggagcccaactctgggttcggctctcctctccactacatacttgctgggtaagattgggacagatttactcaacctctctgtccctcagtttacccgtctgtaaggcaaggatggtaactgagatttaattactgcatttcatggattctaagatgattaaaattgatctccattttaacatttctgaaatcagggtgagtctgaaaatcaatggcatatcaaggattaattggcagcatcgtttagtggtacacaaataacgtgatgtctaatgattgatggaactgtagatttgatgaaacacaaaaatacacggagagaccagtacctggcatgtcgtaaggggtgaataaacattagctgttattattattgtcataatttgttttctggagaattgtttgcatacaaggtaacaaatgcccaatcagattaagagacaaatataattaggagctaaaagagaaaagaaagccgggtgcggtggctcacgcctataatcccagcactttgggaagccaaggtgggttgatcacttgaggccaggagtttgagaccagcctgggcaacatggtgaaaccgtgtctctaccaaaaataaaaaaaaatagccagtctcataacctggtctcaaaataaataaataaattaattaattaattaattaaaaattttaaaaagagagagaaaagaagctaattcataaatagatacaaagccttaaaacttttagtaatctcccccccaaaaattcccaaagccgaatgcttcccctgaaaggtcctacagaattctgccaaagttccagagaaaactttagaaattcctcctttacaaaggggaccagaacttctggctccctgaccggcagggggaaccagggcatgtccctggatgactttgggggtgttccctgtgtccttgtgaatttccctgagtcaccattactcactgcccacaatcagggctctgctaccttccaaccaggagagcaacaacacccggggatcaagggccatcctcaaacaaaagtgtgattataacgcgttctgcacgggctataaaccgtccccagctccggagagcagggtgaccctcaccagcgtcttatttctggcctcctgggttgtgttcctgcctactgacttggcaaatcctaggcgactcgccttgttttctctcctcacttaaatacatgtctggaaaaagcctccacccccacagaccctgctgtgtgcggagagggtggcatgcctggaggaggaggagagacagggcgggctgactcgcagagcctcctgctccctgtggagaagacttggcccaggaaggcgcccccaggcccagctactgggggaagcaacacttcccggctcctgtgctccttcaggctcagccaggaccctcagcacagctcttattctctcctgctgttgtctgcattgccaggggactgtcttggctacccccaccctgtcaggctcacacaccagggcctggtgacaggggcagcctcgacctcccagactcaagtgaccctcccacctcagcctctcaagtagccgggaccacaagtgcacatggccacgcccggtaaatttttgtattttttgtagagaaggggtttcaccatgtgggccaagctgatctcaaacttctgggctcaaacattcctcctgccttggcctccccaagtgctgggattataggcgggcatctccatttccttttcacagctgaggaaactaggcccagtgatagaaactgatttacaagaatcggagtgctccctctcattgacagaaaggaaatgggctttcaacgtgagtgctccatttcctcaaattgagcataagttccttggcaacaagccatactcatcttacatttcttgacttgctggaagcattaagcacaatgctgggcacatgcagttagtgggtatcaaacacttaagaactagttgatttgaagtaaataaataggccaggcaag

SEQ ID NO: 46445 - DNA, 1079 bp, Homo sapiens
gtctgcagtgagccagttagactgcagcctgggcaacaagaatgaaactccatctcaaaaaaaaaaaagatcattatcatatctatttcacagatgaggaagcgcagcacaggggatgtgtttaaggtcatgcagctgggattacaattcctgtaggcacgacttaacaggtgtctcaggacaccaaagtctgtgttgcctttgcaggtggcctggtaaattggggctgggcaccctatctcactcttggttctgttaatcttgtgctgtgttcacctgctgctgagacggcaagtctcgatcatagcagccaaataaactccagacggtcctgaaggctgcaggcgcctttcttgagattgcagttgctgcaatgaatactcagccaaacaccatgtgccagtgagtgtcacgtgggggcatttccagccccaggaaagggctggtcaggagggtcaggccagagtccagctaagcagaaaggcctggcagctggcaccacgcagggaggcacagacagggtcaggctgggggacacagggccatgctgtctacaggagccgaccaggtctgctgtccaagtggttagagatacattaggccagaggggctggagtgggccaggcaggggaccgaggctgattgctctctgccctgttactcacccttgcccaagggggcctgaggattctggcctagagtgaaggtggtcagtggcctgcagacagtgcagcaggatggcccaaccacatctctttggccctttcattatgacatttttacccctgattgcaaaagtatcttgtgttcgcaatagacaaactgaggaccaccaaaaaaccccacatatgcacgaaatagaaatcacccatagtgctgtctttttattttctgcccccgagatgaagtttcacactgtcgcctgggctggagtgcaatagcgtgatctcggctcactgtaacctctgcctcctgggttcaagcaattctcctgcctcagcctcctgagtagctgagattacagacgtgcaccaccacgcctggctaatttttgtatttttagtagagatgggggggtt

SEQ ID NO: 46446 - DNA, 1400 bp, Homo sapiens
tgagggaacattttagggtgctggaaatgttccgtattctgatctgggtggagattgcatgggtacatacatatgtaaaaatttatcaagctgtacagtaaagatgagtgtgctttgctgtgagtctgttatacctcaaaataaaagtaaaaataaaacttacgggaatacattatctcaaattaagcaataagaagctgctcccttggcactccaacccaccctgcgatatcttctaacttcccaacaaagcttaaattaaaatgatcttaatataagtttggcttttctttaatccccagaaatgagtttaacacaaagtcacttttaatgaatattttttaaactctgacttgccctcaagaagaatccatccctggagcagatctttgctttgaaagtgctgcaggatagcacccaggcctggttcccttcaccctctccactctcagcaccgccaccaggaaggatgtctcctggccccactgcctccaggacggctgctgaaaacataccagccaggcggcatgcagggacccaggcctggcatcctacccgatgtgctgcaagtcagaacttgcacccaacaatatcctgtaattgcatctgattagctggaatttggaatctgtacttgagaacagcagggcacaggagactccttgattaaacaggtcagagaaccatacgctgctaagaggaacgggggagcctcttcccgcagcagactcattgctcaacatctgattgcacatggccttgtcctttgacactcactcccacaacaaccctacccccaccttcctcccatttcctatctgggtcctggagctcagcccactggggccttgcttctctctgtggctccactcctgactgggttcagcccacacgccagccttcccccgctccagccacagggctctggtctgatggcctcaggctgtcctcgcctgcctcagatcctttgaggaacaattcagggtataaacaaaccgacttacttggactttttcctcatctttctagcacagtgctgtccaacagaaccttccatgctgatggaaagattctatatctgctttgtgcaatgtggtggccactatcaacatgtggctattgggcacttgatgtatggctaagtgtgaacgagaaccatattttttatttttatttttcatttttaattatagctgggcatggtggctcacggctataatctcagcactttaggaggccgaggaaggcagatcacctgaggtcaggagttcaagaccagcctgaccaacatggcaaaacctcgtctccactaagaaatacaaaaattagccaggtgtggtggtgtgcacccgtaatcccagctacttaagaggctgaggcatggaattgcttgaactcag

SEQ ID NO: 46447 - DNA, 2436 bp, Homo sapiens
cgtgagccactgcgcctggcctgtctcgttcttcatggtcaaggtgggccatgacaatgataacatgggtcctgcctcttaaagtttatattgtagtttaattggtgagcacacacacgcttaaatgatgagcagctctctgggtgccaaatgaaataggaaaaagcaaatgctcccaaggtttaaggaagaccaggttggcatagctgagctgatgagaaaaggtgctggaaagacggggggctgttaagggatgaagtagttagagtacgtgggagctgtggcaaacctgcattcttccctaacccttccaaaccaggtcagatcccggtagcatcaccacggtacccttcatatcaaggctgaatttcattttggtgattatctgatccggtgtctgcctcctccattttacaaagatcttgccattgtgccccaggacagcgataggtgggcagaggccagtgaggaccaggtcagggcgaggctgctgggagggagaggctgagccgatcacaaagacagtctgcagctttcctcctccccctcccccagggaggagcagctgatgtgtttcaggagtgttccaatccaattagtgccctccctcccctccacggtggcccaagccaccactcccttccccgaggtggagactgggtggggagggggtgctgaggaggtctgaacatcctgacccagctcctcgtggcagcacagctggctcgctgctactgagctcaaggctgctatgacagcgctcgtttccaggcgactgttctggggaatgctctgttttggcaaccagagggcccccgggtaaggggggcccgcaggacgccgcgtcatttgcatggcaacctcctccctccccgagctgcgcgctgctctgcggcaggcgggcagcctggcccggccgccccggcccctcgccctccgcccaggcccgccttgcggctccggcgcggcgctgtcaccgccttctccacaccgggaggcggaggctgcacgcagagctagggcatttccggaaaggctggtgccctagggaagtggggaaatgatgcttggggacaaaacactgaaatgggggaggggaaatgaaataaaatctttccaagccagagtcaaagtcacatggcttggtagcatcaaaatgcattctggatagcagggttggctcacaaaatgtttatttaggtgaactcacagctaagccctaggagatactcagaaaatttcttttggatcattacactgcatgtgtgtgtgaatttgggaatgggaaaaaatatttcttacctaggcaaataaggcagtgatattcttaggaaatattttcaaattcttgcagggggacttggtgacattgtattttctgaatttgttggaagaaaccgaaagagaaaataaattcctgggagcctcccttctctcctgcatatacccaccccacccaaaccacacacaccagcacaagtccatgatgccaactgggataccagggctgtgacatgtggaccaacattaactgcccaaggacacatgccctgggctggaacctgagagggggttgggccggggcaggtcaccccagctgagcgatcacatttccctggcagctgtccaaggggcagctcccagctgcacctgtttgtggggtgatttgcttttatcagtattgacacagcagcagggccagggaatagcatagtaataaataaatgagagagggaaaaaaaataaaaaaaggccggagccaccgaggcgaggcaaaaatgctgaggtctttttttgcttgtatgtcagcgcattcaatccagtttccccacccctgaaatctctgaggatcacagagcaggcttggcatgggaactctgggtcttaaagagatagaattgcagaatcagaggcatcttaagatccttttgtgccaggcgtccctaaccagcagatctcagggttacttgctaccctcacctgcccctactgtttgtcaggaacctcagcaggaagggagtttcttcctctctctgccaactttagcatcagggaagtagaataattcaagtggagggtctggagttagtcaaacctaggatcaaatcctggctctgtctagctgtgtgacttggggtatattaactaactactctgagcctcgattcctctccggaaaaaatggagaaaatatctttccttttttgttttgttttgttttgttttttgagacagagtctcgctctgtcggccaggctggcatgcagtggcatgatctcagctcactgcaacctctgcctctcaagttcaagcaatccttgtgcctcagcctcctgagtagctgggattacaggtgtccgccaccacacccggctaattttttgtatttttagctgagatagggtttcactatgtggcgcaatctcggctccgtgc

SEQ ID NO: 46448 - DNA, 1826 bp, Homo sapiens
ggagcacttgaggtcaggagttcaagaccagcctggccaacatggcaaaaccccgtctccactgaaaatacaaaaattagcttggtgtggtggggcacctgtaatcccagctacttgggaggctgaggcaggagaatcgcttgaacccgggaggcagaggttgcagtgagccgagatcgtgccattgcactccagcccgggcaatagtgtgagactctatctcaaaaaaaaaataaataaataaataataaaaataaaacaggatgtgagtaaagcactttgcagtgtctggcacagaatcaattctataaatgtaagctttgacgataatgatgatatagactgatacctgtaaaagttctttgcataaaaagacaagccagctctctgtagaacatgctggactccaagttccctgatcaggctgtggtcacgcaggcctttgtacctttgctctagcttctgtctgggtttggaatgtactctcccctccttctcttatctccatactcagctcaaaggacaccttcccagggaggccttccgagaccagcacttcacccctggcccagcaaaactaattcctccctcccccaagggctcatagctctaagatagcaagtctcacattgtataataatagcttgcttatatgttgatagcatattaacatagtttcagaattttcagggtccaacatagtcttgggtctaacctgcctttatgggtgctcagtaagagtatgtggaaggaatgaacaaaggaatggcttgtccctgagggtacctgcatggcttcacaccaagtcccacccacctggcctctcaaccctcagacctttgatggcacctcttcgagaattgtctttcctggcagatccctggaatctacgaaaacagggtatgattgcattttcagctactatctccacgccactttgtgtgacttgctgaccagctggaggtgccacgagaacatgactcagggtaaccgaaatgtactttagtgccaaaactacgggattcagttataggatagtatttaaactgctgcactaggaagtgtctgcaaacagatctgtataatgtagtgtggcaatgttaacaacttggtgggcttgtatcctttttagctactagaaaactcagcataacaaaatgatacctgatcacttcaaatttttgtccagtagtcatgaaagacacaaacgatcctccttcttttccctatgccgagccccaatcctgcgtattcattgtgagataagggggtcacattcaagggtgcagtctctggcctcgagttaggacaaatacactgggccctcacagtctcattagcacctactacatccaacccaactaatagaccatagccagagcttcagggctgccagagaggcaatccagggcagtggttaagaactacagctaggccaggcgcagtggctcacacctgtaatcccagcactttaggaggccaaggtgggtggatcacctgaggtcagaagttcaagaccagcctggccaacatgttgaaacccctctctactaaaaatacaaaaaaattagctgggcgtggtggcggatgcacctgtagtcccagctactcgggaagctgaggcagggaaaatcacttgaacccgggaggcagaggtcgcagtgagccaagatcgtgccattgcactccagcctgggggacagagcgagactccatctcaaaaaaaaagaaaaaagaactaggtgtgtggtggctcacatctgtaatcccagcactttgggagactgaggcgggaggatctcttgagctcaggagttcaagaccgg

SEQ ID NO: 46449 - DNA, 2461 bp, Homo sapiens
caggcatgatggcatcatgaggctgaggagggaggatcgcttgagtttaggagttcgagcccaggcaaaatagcaagacccccatcttaaaataaggataaataaataaaaaaaaaatgcccttagtctccagccaaatttgggtcactttagggattccccacttattaactataagaacatgcaaatatgtaagtctctgagcctcggtttcttttctttcttttttatagagacaagttttcactatgttactcagactgaccttgaactcctaggttcaagcgatcctctggctttggcctcctaaagtgttgggattactggtgtaagtcacagcactcaacctagcctgggtttctttatctacatactgaggataatatagcctaactcagaggatggaggtaggaggattaaatgtgataatgtaaagtacttagtacctggcacactgagtgattcctagatgagtgttaccggaaagctataaatatataagctagagtaatagcggcccagtaaataatcagaaattagggaatatatacatctgtgggttgggaagaagggaaaagagggaagatggctgttctgggatgaatgcttttctccaagggcaagggcagggggagagactgaggtgaagaggcagctagccaaggtaatgaatcgtctgtcccaagatcctggagttacttgttcatcaaacagtccccaccttctttaccatatatcctgccttctccagagttctgctcccctggatcctctaggatccctcagggagcctgagagagtcactcaattacggttctgtattttgagatctggagataaatcttgcgcatcatcaaaccccaccgtgtcactttatcaatgaaggaacgaagctcagagagaaaagctaacctgcccaaggtaatcagttctggtcctgcctctgcctctaacttgtggtgagaccttgggcaagtcacttcccctctctgagctggaagttttctcctctgtaaaatgaggggcttggagtatttagagatctaatttccctttcaactttgccctttgctgcaataaaataatggttccttctgccaccgtcaagtttagggaaaagagtgtgtgtgtgagtgtgtgtgtgtgtttgtgtgtgtcatggagtcttgctctgtcacccgggctggagtgcagtggcgcaatcttgactcactgcagcctctcttccttccactccacctgccccacatacaaaagtcaagacaaacatgtttggataacttttgagctcacttaattttaaattgagtgctggttttcaccaggggtaaagacaagaaggtagagaggggccaggcagaggaaactgctggaggaagctggtgactcccaggcgccagctgatgggaccagccctcccccccgcccccccatgatcccttccttgcagggcttctaagagctggcagcgccacagggataaataaggccaacaaccgcaccttacatggccatcccagcagccgcccggaatcccgaggattacgcagacttctggaggacttggaacaagtgcacatcacctgctgccaccacaagtgttgcccgggcttctgcagcctctgtcctgtgactgaggaatttttaaatggaagctctgagctcacaaagaagaaaatgtctccctgatgtcacacagttgctgccaattcatcagctccagctaaaggtcagcgagggggaagccactgccggagggtctggctgcccctccctgagatggggcttccctcctgcaggcttgctgccagccatccaggccagccacagaagctgagggctgcttgcatttccagggcacacacagagcagtacgaacaccgcttagctgcttctgccctcctctgtgcagatattaacagattcaacctcccagccctatcctccccagctctcccttctgtagacagtcagagcaaaccctggagtcttgatctaacgtgtcctgagggtccttccctgggatcacttcaggagtaacactaaatcacagagaggttgtcttgggtttttaatgacgaaatgcagtggtcaaaagctaggaatcccactgcctggggtcacagcctggttctgccacttcctagtagtgtgatatttgcaagttaagcctctctgagcctgcttcctgacctgaaaaatgaggacaataagaatattatctcacatagtgtggtcctgaggacccattgtgaagcactggtatagatcctggcaggtagtaagtgctcaataaatgtcagcttggaatcagacaagacaaaaaaatagaataaaataaaaggaatcaacatgcaactactgctgggcaagtcacttaatccctgagtcttaattttctcatctgtccaacagggataggcatatgtgacagacagtcactgagaggactcaatgagaa

SEQ ID NO: 46450 - DNA, 2239 bp, Homo sapiens
gagccaccactcccaacctattttattttattttatttatttttgtggggctgggcttggtggctcatgcctgtaatcccagcactttgggaggccaaggcaggcagatggtttgagttcaggagttcgagaccagcctggccaacatggcaaaaccctgtctctacaaaaatagaaaaattagccaggcatggtgtggcgcatctatagtcccagctactgaatctgaggagagaacatggcttcaccctaggaggttgaggctacatgagctgagactgtgccactgcactccagcttggatgacagagccatatcctgtctcaaaaaaacccaaacccaaaaaacccacattatttatttttattttttcgagacagggcctcactctgtcacccaggctggagtgcagtggcaggatcccggctcactgcagcctcgaccttccccagctcaagcaatcattctgtcttggcctcccaaagtgctgggattacaggcgtgagccatagtggccggccaggcattaacattttaatgactagatctagaggtttgatataaatatacctcctcctgtaaacatttgttgagcctattcccaattgccaggcacgaggccaggctcttccactgcctcacaagcaccctggtcccgtccttgagtcatcagcttcccagatgcttcatatgggaaccttggagaatcgcggtgtgcgactctcctcaccccattcctctcaaatccaggcaatgaccaagtgtcctgagattcatcttctgtctcccattcacgcttcacttccatttccacagggcacccccctcagcccttccttgggtcacttgtgtcactgcaatagctcattgacagaggcccctgcctccagccttacctccttctaatctatcccccttcatcacgttatcccccaactccaaatccttcaagagtttcccaagtttccttcaagatcctccgtaatcctgcccagactctccgtggtgggatgtattttatagagacctgcctgatccttgacaggggtttcagtgagggaaggaggtgagggtcccagggtgccagcctgagcggaggggtgtggacacaggagggcctggtgcaatgtggctggggcgaaaatctgaatcatagtcagtgagggcagccaaattcctatctgggaaatcagggcagtctgaagggtgaggccaagctgtaaacagaatgagtaatgaggtcagaagctggtggggaccagaatcacgtctagatgcagttcaaggaaacggaaatggtacaaggctgaggctgtgaattgaattataagaaggtattgaagtaacccaaacatgctgctctatgcagggatgggggtgggaggaacagcccgagaaatctcccgttcctctcgctccctaaaagggtaccaaatacatgctctttgctttttcatgtgtgtgtaaaggccctgtctcccctgccgcctacagtttcatacccctcatatgcctcctagcaatgccaagtgatttgttcaaagttgcatgcaggcagatgtggaaacagggctatatccctccagccaactggggatatgctagggcagtgagctgaaactcaggttcataggttggcaaattacatctcagattcttcatctgtaaaatgaggataataacaacatacttcataatagtgttatattacaataacaccactatgaggattagccaagcaaatatttctaaaatacttagaacagtgcttggtacctcgtatatgttgtataagtgttcgttaaataaaaataaggtactcagctggtaggtagggccagtactgaaagtcagttctaattttaacatttgagtccttagctcttccaaaactaaggtcaacagcaggctacggtggactaggctgactacaggactttcaaaaattaattttcccagccaggcatggtggctcacgcctgtaatcccagcactttgggaggctgaggcgggcggatcttgaggtcaggagatcgagaccatcctggccaacatggtgaaaccccgtctctactaaaaatacaaaaatcagttgggcgtgatggtgagtgcatataatcccagctacttgggaggctgaggcaggagaatcacttgaaccagggagctggaggttgcagtgagcagagattgtgccactgcactccagactggcgacagagcgagactccgtctcaaa

SEQ ID NO: 46451 - DNA, 1687 bp, Homo sapiens
taactacagatacaaaccttttgtaacacctgtcactaccgatattgaaactatacttcagaaattgtatgagtgaagagtgatgcattcatataatagactgtttccccccaaaacagtgccacttgatttaggagaaactctagttaatctcttttataaaattccctgaaattactcttgtaacctgcagcatgaatttaggataaataaattgcacaagattgaaaataccctttcagatattttgtacactctggaaataaattgtggggttttgtttttactcatcttttaaaaagaaaaaagatagagggccgagtgcggtggctcgcgcctgtaatcccagcactttgggaggccaaggggggcagatcatgaggtcaagagtttgagaccatcctggctaacaaggcgaaactctgtctttactaaaaatacaaaaaattagctgggcgtggtggcgggcgcctgtagtcccagctactcaggaggctgaggcaggagaatcgcttgaacctgggaggcagaggttgcagtgagccaagatggtgccactgcactccagcctgggctacagagcatgactccgtctcaaaaaaaaaaaagagagagaggagaggaaaggaaaatgagccttagcagctgtgtattttttaaacaataagaaaatagcattccccagaatttccagtaaaacccataagatttaggcagttcatccctgaagtatgtgtgggatgctgggagctccctggcttttccaggcaaccccacccccaaaaaactccccacaaaaaaacaaaagcagatgggctgcatctgaacgaatcaaactccccaggggccagagctctctgctctaaatgctaatagagtgagtaatcagaaacctacatttggtaaattatttatcttatctctggaactcagcaaagcatcgaagacagcaacttctgtagaaagatgttgttggtcaagagctccagctggaattcgtacttttactagaaaagggaaaagttcagagaccagtgtgtctcatgaagcaataatttttttttttttaaatgaccaaaagcaaagccaaggaaaactgacttcacagttccatggaacaggtctggttcatgttttgtctaatgagccttacgttccatccgtattagggtaatggcaaaacaaaccaatagacaatatagatccccaaagagatgggaataggttctgtagtccccatctccactctacttttccttgcagagggccataagagatacgactaacctggggccgggctctgtggcgcatgtctgtaatcccagcactttgggaggccgaggcgggtggatcacgagctcaagagtttgagaccagcctgaccaacatggtgaaaccccatctttactaaaaatacaaaaattagctgggcgtggtggcgcctgtctgtaatctcagctactcgggaggctgaggcagaagaatcacttgaatccgggagacagaggttgcagtgagctgagatcgcaccactgcactccagcctgggcaacagagcaagactgcgtctcaaaaaaaaaaaaagaaaagaaaagaaaaagagtaacctggaacagtggttctttttttttttttttttttttgaaacgtagtctcactctttcacccaggctggaatacagtggag

SEQ ID NO: 46452 - DNA, 661 bp, Homo sapiens
tttgggaggccaaggcgggcagatcacaaggtcaggagatcaagaccatcctggccaacatggtgaaaccccatctctactaaaaatacaaaaattagccgggtgtggtggcgtgtgcctgtaatcccagctactcaggaggctgaggcaggagaatcacttgaaccagggagtcggaggttgcagtgagcagagatcgcaccactgcactccagcctggtgacagagccagaatccgtcccccacaaaaaagaattttgttttgcctctacaaaactttatcagttcatccacctggtgaactcaactctgactgattgaattgtgaaataagaggaattcaaatgattcctttccctttgcttctttccttcaaacaacaaatatatttgcagtgcatatttgtttgttttagagacagagtctcatctgtctcccaggctttgttgcagtggcaccatcatagctcactgcagcctggaactcctggactcaagcgatcatcttcctactttaacctcctgagtaaatgggatgacagggttgcaccactatgtctggttaatttttttttttttttcgagacggagtctcgccctgtcgcccaggctggagtacagtgatgtgatcacggctcactgcaacctccacctcccgggtt

SEQ ID NO: 46453 - DNA, 757 bp, Homo sapiens
cttgttcagttgaatttctctccactcccttttcactccagggaccatactcagcagcaaggtaaaagtctgtgataatgtgaatttcagatgtagctgcaactgataatttgttctctatcaagctcccactccccttctcaaatgggggtaaaatgttggaggtggggcagctgagaagtgactgcctcatgatcatctggactttctcacttcagtgagccttggttgtgtacataaggaatttcactatctttaccttgtgtgcttttcctgatagcacagatcctactgaaaaataaccatttttctttaacttcacaatgataatgcaaccttttcctctattttgtgcttataaaatttttggattagctgggtgtggtggcacatgcctgtaatcccagctactccggaggctgaggcaggagaatcgcttgaacctgggaggcggaggttgcggtgagccgagattgcgccattgcactccaatctgggcaacaagagcgaaactccgtctcaaaaataaatacataaataaaaatgtttgcaccctacttactacagcatgacttttttttttctgttcatgcaaattcatgcctctggatgtttgcacatgctttttcttattgctgaaatttgagttttcccatcctatccttccactagctgattcttccatttattttcatgtttcaggacccatgggctgcctctgcgctgaagccttacctgatcctggagatcagattta

SEQ ID NO: 46454 - DNA, 836 bp, Homo sapiens
acctaaaagtattaatcatcatatgaaaagagtaggataatgggatgttggttttctgccgagccatattcactcctgtggttcagttttagaaatatttattaatatccactgtgttcaagtcttgatgctagggaaacaaaaactgcaaggacacaggctctgccttccaggagttcacagactctctggagagccatgagacagaccatgggttctgaaaccccaaggtacactggagtcgcctggagtgcttatcaaaacacagatcgctgggctccacccccggagtttctgattcagtgggcaggcagtgggcccgataatttgcatttctgacaagtttccaggtgctgctggtccgaagaccacacactttcagaactaccgaactagacatatcaagagcacgtgtgatgtgtatgattgaggtggcacaggtgcacagagacgagaccattttctgttttcatgctaaagcagttgaggagacaactgggaaagtccctctgcacctgaaaattccccaggaaaagttctagttagcatttagaccttgaacttgtaaacatattacagcaaaaaatatgcattgcctatgccattaatttgccacttggtaaatactacctttcgttactaattatatctctataagaacctagggtaacaataaagtctgagttcactatccttgttctgcaaatgctatgagaactttggcaaattacttcctgtctctgagatttggttttggtcatctgtaaaatagagattaggacagtcaaggtggtttgcacctgtagttctagcactttgggaggccaaggtgggag

SEQ ID NO: 46455 - DNA, 4126 bp, Homo sapiens
aggataaattcataaaagttgtggaggatctgggcacttttataaagcaagcactgtagaaaactttcaaaggaaacatttaaattcactaatgacagctatagggatcctgatttttcctttaaatggcaggcacttcaaaaaattaaaatagaatgtagttagctttcaattacttaggccactgacaattcaatttatggattatatagtattttaatttactcatttcacacgtcgttatcaactctacatgaagtttaaaaggacaaaggatgcaagtggaattggtcagtgttccgggttatttccaagggaggcagagggtggggggtttcctttgagacaagacttggggttggccaataattgctggtattgcctgcctggtaataacaggctgatgaaaaggtgactacaacgtgaaaactggttaaatcaagcgcaccctcccaccctcgttttagatgaggaattttccgccctcacagaaggggctgaggcagcatctggcatcacaacactaacatttgcttcgtgatttcctctttacccggccctttgacacacatcccttcccagaaatcaggattcgctggtgcttttgcatttctaaaatgggaatcccgtggctgagcttttagccggccggaacgactgagggctgcatccctttcccgcaggagcggggctcccgcctccagttctgttccaggcctgactcctccactccctccgtgactcatgtcctgcggatccttcgcccccgacgcgccccccaacacacaaacccccagaatccgcccccagcctacagcgcgacgtcagcccgccccagccgacttggaggtctcgggtctgagtcacacagaaagaccaccctcgtcggcatccccacacacagtccgacacccggcgcgccggcctccccgcctgacacactaacgcccgtcgtctccgcgcaacttgttatgctccggctcgagcccttgacccaaaaccctcagcgaaacggagagccgcagagccggcctcgggcggcctttgatggctttgttattgtttgggtttgaatcgatacgcccctccccatccttcctccctcgcggccctacacccagctcccgcctcccctcacgccccgcgcccctccccctccattttggcgccttttccttcccgccacgtcgtggcggcgtagagaccattctgaccgcgagagctgggcggggcgggggcggggcgcgccgagttatgcagatcaatcggcctctggttggctggagtagcgctggcaggggcggggccggggcgcggccacagagcgcgcggggcgggggccgaggggagtcgcccagtcccgccgcttccccaccccctctcctccctcggccggcccggcagccctgctccccgccttggcctcccggagaggccccgccccgtccccgcccgccgcgccctccccgcgcgccctccccgccggcgcgctcctcccctttactcctggctgcggggcgagccgggcgtctgctgcagcggccgcggtggctgaggaggcccgagaggagtcggtggcagcggcggcggcgggaccggcagcagcagcagcagcagcagcagcagcaaccactagcctcctgccccgcggcgctgccgcacgagccccacgagccgctcaccccgccgttctcagcgctgcccgaccccgctggcgcgccctcccgccgccagtcccggcagcgccctcagttgtcctccgactcgccctcggccttccgcgccagccgcagccacagccgcaacgccacccgcagccacagccacagccacagccccaggcatagccttcggcacagccccggctccggctcctgcggcagctcctctgggcaccgtccctgcgccgacatcctggaggttgggatgctcttgtccaaaatcaactcgcttgcccacctgcgcgccgcgccctgcaacgacctgcacgccaccaagctggcgcccggtgagagcaccccccgcctccggcccggggatgcggggcggcggcgggatctcctgggtggggagctggcggctcgcgggccggcactgagtccccgtgcttccccctttcctaggcaaggagaaggagcccctggagtcgcagtaccaggtgggcccgctactgggcagcggcggcttcggctcggtctactcaggcatccgcgtctccgacaacttgccggtgagtgggcgccccgcggtggggagggcgcgccgggcggggggcgcacgggcgtgctttagcccggacgagggaacctgacggagaccctgggcttccaggtggccatcaaacacgtggagaaggaccggatttccgactggggagagctggtgagtgccctgcaggagcgacccccaggatgagtgggtggggtgaggggcgcccccgactcccgccctaacgcggccccctcgcccctgcagcctaatggcactcgagtgcccatggaagtggtcctgctgaagaaggtgagctcgggtttctccggcgtcattaggctcctggactggttcgagaggcccgacagtttcgtcctgatcctggagaggcccgagccggtgcaagatctcttcgacttcatcacggaaaggggagccctgcaagaggagctggcccgcagcttcttctggcaggtgctggaggccgtgcggcactgccacaactgcggggtgctccaccgcgacatcaaggacgaaaacatccttatcgacctcaatcgcggcgagctcaagctcatcgacttcgggtcgggggcgctgctcaaggacaccgtctacacggacttcgatggtgagccaggcccgggagggagctgcccaggtgactcggcccggcccggcccagtccggaggcctcggccagtctcccgcgccagccttttgtaaaggtcattgggccgcctggctcgatgctagccggggtgggacgcaggagagcctcccagcgtagtaaagccggggattttcagccagctgaacctgtaatgtttctggcatgattttattcttcaagtggaattcagttagttccaggctttcccgatgaataagaggttgtgggcaaccggcggtagcccagatttttctaaagtctgacccagtttccccgccagtaaaaggatgggggcgggggaagaggtggaaattgatgccggttttgtaatttttgttttattttataagggagttagttttctgtatggtagttttagagctgcagttcttaactcctttctgatctagggaaggttaaggaataggaactatattattactggtggcttttttttttctttagtgttaaggggagagagagtcaggaatgaatgttgtgaaataagatctgtcgctggtttgaaaattagttgggtgtctccgcagagaggatgaaaacctatcctagggaggggcttggagcgggttctttcagaaaagaaggaatggagagcctgagatcaaagctgcggagggtgggtcatcatctgagcggcttaacctaacaaacgacagcctttcaaaacttgtgactcgggcttgtggtttatgtttatttgcccttggaggacgctgggttgggctgcattttttgtatttaacagttaatggctggccgggtcctcccatgttttttctttcaagtctttgctgccccctggtgagcaccagcggcatggcccctcctttttcttttactacccaaagtttgtaaacaggaatcacgtggtctgaaaccaaccctgcagctctgtctacctttccagtctagggaggaaagggtgtgggtgtctgctcctgcttgcatcgggtggggaggaaggcctcccaaagggcaccctgacttaggatgttgtgcaagcatccttgcttggatcctgtcggccatgagaatctcacccgggctcctgggcagtggtgaatgcaatttaaggatagtctatgagatacctttcttggttgtgcagacatgcatcccttcatccttcgcaggcggtcctgcctcacagggcctcaagttttgggtctgcggccagctgtgtttgtttcttggagcagttcataaagaatttcagtttat

SEQ ID NO: 46456 - DNA, 634 bp, Homo sapiens
agattacaaacatacacacagacccaaatgcatacattcacacgcacaacacagatgcacagacacacacaatcatacaccaaacacacatgcataaaacccttgtttcctaagcgaactaacacaggaacagaaaaaagaaatactgcatgttctcccttatgagtgggagctgaacactgagtacatatggacacgaagaaggaaacagcagacattggggcctactagagggtggaaggttggagaagtgtgaggctcacaaaactgtggaatccagccaggtgcagtgactcatacctgtaatcccagcactttgagaggccgaggccagcagatcacttgaggtcaggagtccaagaccatcctagccaacatggtgaaaccctttctctactaaaaataaaaaaattagccgggcatggtggtgagtgcctgtaatcccagctactcaggaggctgaggcaggagaatcgcttgaacccgggaggtggaggttgcagtgagctgagatcgcacccctggactccagcctgggctacagagtgagactccatctcaaaaaaaatggaaagaaaaagaaaagaaatctgcacacgtgcccttgaacctaaaataaaatttaaaaaaataa

SEQ ID NO: 46457 - DNA, 6602 bp, Homo sapiens
cttggtggccacgcctgtagtcccagctacttgggaggactgcttgagcccaggaggccgaggctgcagtgaaccatgatcgtgccactgaactccagtctgggtgacagagcaagactctgtcttaaaaaataaataaataaataaataaataaataagtaaataaaattctaagatatgagaaagcattgaagcatagtgtaattaatgatatttgtatttcagtggtacctaagataatgatgcattttgcagttgacggcaccttagatttactcaatcatggtaagaactttttattttcaattgctctcatcaagttgacttgtgatctcagtagaatatgttgctgccaactcatttcagatggatctcttgcaacactgggttagggaggaaaataacaatgacaacgaacacattataaagctttagagcctaattcatctatatcggttaagatcctccccttaaataggaggatcacttaagcccaggggtttcagaccagcctgggcaacatggtgagaccccagctcattaaaaaaaaaaaaaaagaagaatgcatttggctgcaaggaacagagactcaaacaatagtagtttaaacaactagaaatttattttcttcttctaacaggaaatctggcagtggcagcctagcacttggtcagtagcctctgggtaatgtgtctgggtggctaagaagaggcgagacagaaaactgctgggactttttaaagcctttaagtatgtgtgactgttttgccctctgaactcttgtattagtcactattgctctgtaacaaattacctcaaaccttagacacttatgatataaaacatttattatctcataatttccatgagtcaggaatccaagagtagcgtaggtgggtggttctggttcaaggtttctcacagggctgctgtcaagctgttggcctgggctgggggccatctaaaggctctacttgtgggagggaagtttcatccaagctcgctctctctgactgttggcaggaagccacagttctttcttggctgttggccagagaactcagttcctcacctcctgggcctttctatagtccacttgaatttcctcatgacatggccactggcttcccccagagtaagtgatgagagagagagagagagagaccaaaatggaagctgcactgtcttagtaatctcagaagtgatatccatcacttcagctatttaattggtcacactcactgaccctgcaggggactatggggagaggacaacataagggtgtaaataccaggaggccaggattattgaggcaaacttgaggccggctatcacatctctatgtatgtatacatgtatgtgtgtgtatttgagaaacatgattaatttaaaacagaaaaataaatttaaaaaaagacataaaaacaaaacatcaaatggttgttactaattcactcttccatcaaaaatatatgtacctatctgttttagcacacatttgctatcatttggtattactattttaagattctattttgatttattctcttcatttaacctagtagtaggtgaaaatattttaatttttgtatcttattgattattcctaaggttgaacatttatgaagtatttgttaaccagttttactgacctttttgcaagttatgtctttacttaatatattaatgtatcaggatattagcattttttcaatgtgcatgagttctatatataataaaagtattactctttttttttttttttttgagacagggtcttgctctgtctcccaggctggagtgtagtggcacaatcttggctcactgcacctttgacctcctgggccccagtctcccaagtagttagaactacagctgcgtgacaccatacctggttaattttttttttttagaaacggggtctcactatgttgcccaggctaaaggtgttactctttgtcaaagaaaaaaaaggtggctgtctacgtggtggggaatatgaagacccttcactcctcagcggcagagctccaaggagggaagcaggacctcaaaagcgacatctcagcattgtacctggagaggggactggaccctgagcactagggattctgtcttccctcctccaacctcagtaaggattcctacaactcatgtgcggctagaagcaggtgctggcaggatccaaggtccccattcttgggctggcatgaggcagctgtcagcacccccagtgatgctacaggttttctgttccaggttctacatctggattctgggtcatccctgggagccagagggatccccagtgataagagagattgaatttttttctagtctggcaatatccaggccaatttaattagatttttaaaatacaaatggacattttgtatatatataagcttgaattcttagagacatacattctatattttcttatttaaaactccattaactttttaaaaaagttattgagataatttatgacctcttctcactccttttccttggctttgtatgtaaccgtgtaaatttgcactgtaactaaacactaacacaagagatggctttatcgcgttgtctttattttcaaaaagtaatatgaagtctgttttggcctgcttcctcagggagttagggaaaaattcgatctcaatttttttttttttttttttgcctgctctttccctgccccttgatggagtcacatagaaccccctgagttcacccaatcttggaatctgagggaagagttctagacttcaagacagtgtggtcactgtgaagggcttgatgtccagacttcagtggtcccactgctcatagccctggagactatggcttagagctcagtccccagccaagtgtccactcagctaacccatcaaacattctgccactctggggtctgggagagagtcaaacacaggcccccacggtgggcagaacctgtacctctctattccccccaagggaaggaaattccacatgctgtagaaagctgggaaccattctattcaccctcaacttttcaaatcagcactccctactcatccatatcatctagatcttttctttgcctttaagagcctagattttccaaaacaaaagttctttaactctctgagtggggaagagatgggcagtcttcttaagcctacaaagagaaaagcctgtcatgctttggtggtgaatcagctgacaaacagggaaaccagccccagcttggaatgaggtaattctgacagtaaatcacactacttcatacaaagccctcatgatctgactgggacccaactttccaggggtattgctaagcattccttctcatgtatctaatactcccacttcctcaaatattttttctccccttcttcacctgctcatctctcaaggtattcagatccttaaaaaggtgtcagggctctaggttggcatctgtaattcctttggccttacttttgtggtcataagctgactgccccagtgactcacaccagtatcccaggcaggagtgtgccagtaagctctcttccatgtttgtctctttcataggaagtaaaacatttcccagaaaacccctagcagtcttcttctcatggctcattggtcagaactgggtcacatggcacatgtagctgcaggagaggctgggaaagcaagtttctggcaaagttgaatgggatcgccataacttgtttaggtaaattatgatttatgcccacactgtgaacacagttgccctgcccctacaaaaaaaagagcccccttaaaaaagaatatggaaggaaataactaataaagtccaccacggagatgttgtcccattaattattccatcttctttaatttggcaagggctattactctctgtttgccccttcttccactctgaaacagggcgtttagttataaattcggttggccagaataaggtttacgttttccagctttctgtgcagctgagtgtggtcatgtgaccaagtcctgagaatggattgaaagggggaaaaaaatggaggaaaccaccaggtattgaagagaaaggtcatgttctccctgtccttcttcccagtgtaattgcccagtgggttcttcctgcctgctacacagacaaaaccaattcactgagaccatgacactgcagtaaagaaagagtttaattgatatgaggctggccatatcatatgggatatggagttattactcaaatcaatctccccaaaggctcagaggttagggttttgttttgttttgttttttgagacagagtttctctcttgttgcccaggctggagtgcaatggcatgatctcggctcactgcaacctccgcctcctgggttcaagcgattctcctgcctcagcatcccaactagctgggattacaggcatgcaccaccacacctggctagggtttttcgaggatagtttggtgagcagaggactagggaatgggtggtgctgactggtggggaatgccatcataaggatgtggaaaactccttgtgtgctgagtctgcctctggatgggggggtgcacaggaccggttcagtcaggagccaggagcccacatggagtcagccagtcctcagaaatgcaagtctgaaaagacgtctcaaaaggccaatcttaggttctacagtagtgatgttatctacaggggaactggggaagttacaaattttgtgacctctggaacagtggctggttatcatttaactccacctacattttagtagaactcaggcccctctcataatcctaaccttgtggacttttattagttttacaaaggtggtttagttttgggaagggctattgtcatctttgctttaaggttaaaatgtaaactaaattctttccaaagtttggcttatgcataggaatgaacaaggagaatctggaggttagaagcaagaaggagtcaactgtgtcagatttctcttactgtcgtagttttgcaaaggcagtttcaccagaggctgaaacccctatgggagaaaaactgtaaacttctttcacatgagggagaaaaaccgtaaacttctattgtgtctaaagcactattattttccagctacacttatagcctaacaaatacaactgcctccaatccttggcctataaacatgttgaagtctcgtctacctcaacttctcccttgaccccatgtttctctctaatttactttcagtctttctctgtgtaagtcagagcaagcaacaagtgccaactcttggctgatttaagcagaaaaaccatggctcatagacttgtggagaaatctggagaatcatatgtgtgttggccgtatattgtcacaataacatcacataaacaaccataaaaccacaatggcatgtaacaatggacatgtatttaatacacaagtttgtgaggttcagtttatctggggctgggctgggctgagctgagctgatctcagctggactcgctcaagtgtctgaggtcaactgttggttggccaggcaattttgttgattttggctcagctaattcatacgtcaaaggctcaactggctgttggctgaactaggatggcctcagctgggataacttagggagacttggcctagttccacatgtttttcatcatccagcaggctagcctagacatgttctcatggcaatggcagagagcaacagtgacagcaagccaatcacacaagtgctttgcaagccatggcttgggtaatgtttactaacatcccattgaccaaagtaagtcaaaagggtgagcccagtcagaatgaggaagtccaacaagatgagatcctccagtgaagaattaagatcgtgaatgcaaccaatctaccatactatgttcagaggtttttccttacagggcggtaggtagccccaacatcataacacagagctgggtcactgaagacactgccactgctgctaatgagcatttgactccataggtacactgagaggctcagcaccagatcctgaatgttgctgttgccacagctattctcccaaactgggggttgctgccatgctggcattgcccattagtggaatggattctgtgctgcttctgcttctttgcatcacaaactcctcccgattcgaagtctagagtgggtgcattttattagcagagcccacaacatgtgccatgacttagttcacaggaaggttgggaaaataagtagctggcattttcagctataatactaggaggtgggctctgcttcccaatgagtttcatagagtgggaaattctccgtatgtgggaaagggatttatatcatgggcagcaaaaacaccaacacagaacaacagtgacaataaggaagaggaggagcaggaggaggaggaggaggaagagcaggaggaggacgaggaggaggaggagatggaggaggagatctactagcctctcattttcttttcttttctttctttctttctttcttttttttttttgagagggagttttgctcttgttgcccaggctggagtgcaatggcgcaattttggctcaccgcaacctctgcctcccgggttcaagcgattctcctgcctcagcctcccgagtagctgtaatcacaggcgtgcac

SEQ ID NO: 46458 - DNA, 2553 bp, Homo sapiens
acaaccaacacatgggcccttacttttaggtgaaagattcctatatataaatacatagtatgttctctcttgccaagaaatattagactaaggaacttcattcctcacgaagaagataatcccctcttccttcccataggtcccttaccttacctgcttcttccctctcgcgggtaggaactttgagccccgcctctcggctcgtccaagctccgccttccccgtccacctgtgtgcccagcccctgacgttaccggtcggcttcagcggcctgcaggattccggctcccaattggtcggcccgtccacggcttgcgcagctcaccaatggcagcggtgctgggtggaggggtgcccacatccaagatggcgtccccaggagctgggagcgggtgaccggcggcggggaagcggcctgggttggccctcagattgcggggtctgggggcatctcgccgggcaaacccttggcccgcctacaaggacttcccccggccagagcaatggccgctgagaacagcaagcagttttggaagaggagcgctaagctgccggggaggtgagcccaggacgctgagagggataggggattggaccaaacccttccagatcctaatccctgaatcccgcgggcctggggcgccacagaggccagaagactggtttggggaagctgggactgcctggtggcggcagggcagctgtcaggcagcgaagcgaacagcgagctttggggacggctggatgtgggtgtagaccggggtctgggggcggaggtttcaggaggggtgacctcagcgggaaggtggccgaagattgggcgtaaaggggagtggagttgggtgaatagtcagtgtcggccctggtctcggaagttcctccccagagctgcttcccactctaattaggactccctctcaggggtctccaccacgcacaggtggttggtcgctcgaggatggccccttcccttgatccctgaggtcggcacttacccgaaggattccggtgggagtttggggccgcctgccgagagggttaggcaggaaaagtgaggacgattctcaaccctgaccttactttatcttgagttggccctttcccactaggaattattacaagacgaccacagaatcagggttattcctttggcattttctaaggatttgtccaaccccaagtgacttcttcctcccctgcattgtaatgcacttcttgtgcaaatgcactaaattcgttcattcttcagttgtttaactggagagcagaccccctaagactacccccaccctcttttcggtgtatgttgagacttttggcaaattatccatccatcaatctactgttggtttactgtttcagtttattttgggcaaagtcctgagaagtataaggaagagtgtgtatttcagtcgtaaatttaagatttctgccagctacagtctacttggtgatgaaattcatgtttggttgtgtcccctgtgctaccttttctaatggattcaggttttttccttctgggataatcttttgaactcgtgactttttttttttaagcgagagagagatgagggtcagtagtggctaggtaagagccttaattttttttttttttttaaatgaaatagagacaaggtctgactgtgttgccagggctggtctctgactcctggcctcaagtgatcctcttgccttggcctcccaaagtgttgggattacaggcgttagccaccatgccccaccaagagtcttattttattaaggattctagtagacatatggagaatagggtggaaatcagcttttagtaatacttattaaagtaatagaaaggaatgcaaagataacttcagattaaagtgctgtggactcaacagtgttaatattactgttaaagatgttctgtgtttttaggtaagcacacttcctgccaactgattccttttccttcctggtctagtgagctctctagttgtgctaactgctattctctggggttttccgtagtgagatcattaaattttgacatcctaagattataatcataatcaataggaagactgttgtatcaggaagcagtgtaagagatgtgggacgtggcatgggcttctgtgccttctgactgctggttgctattaacaatctttttttcctatatttcctgtatttggctataagaacagtcaacttttttaaagcactacttttctgagataggaagagaagtcttttcagtttcttcaagtttctggattcctttttcattttgaagaatatagagaaatagagaactttcgagttcagaaagacttgggttactatttgggctctgttgtgtgtgtgaccaagacaaataatctttctaggcctcaatttccttacctatgaaatgagaaataaaaatactttcctcagagttactgtggggactaagtgaaataccctatttgtaaagagcctaggacagtgtttatttagcacattatagttgctcaaaaaaacagtagttattaacattgctgtcattattacagcaagtaaacatttaaaata

SEQ ID NO: 46459 - DNA, 510 bp, Homo sapiens
tttggctaggccgggggctgctgccagaagttctgtctgagtgttgtagctgtatgtcacagattccattcagctgcttcctaagctggtaattctgaaagttacactggaaaagaatgtaactggcaccaacttacttggcacactgctgagatgtgctgtagaggttgctatatccctgcatttctcagaagtatggccctggacacacacagccctccgaggccatgacttgggtccagctccctcccactgacctacattcactgctgtactgtgccagctctgggagctgaggagtgctcaccagtggcacaagctccagcacagtgcagggccaagggagtaaataatcctgggaaagctggccttgcttcatctgctcacatgtggatctcattgaatgaggagagggcaaaaaatgggtggccagaaccaaaaagggatttacccttggcagttttccttcttggtagtttccaaaccactgcatagattaaaataaaaatt

SEQ ID NO: 46460 - DNA, 1706 bp, Homo sapiens
ctgccgagagggggtaagtgcatgaattgtggcaatggggatgggggtgaatggatggatttgaaagacaattaggaggtaagcgcaattaagtgtatgagaaactttggggtatgaagaagagggagattcctcagatttctagctggaccaacaggatggatggcagcgcccttcaccaggaaaaaagtgagctgatggaagaacataaggtgaaatttgaattcatggggtttgaggtgactgagtgaggatgtccaacagacgtttggccatattggcctgaaaatcagaagagaggtttgagatggagagccaactgtgcccatatggtaagatgctacaggcggcattccttctgtcctcccgtccttcgttcaaaatctgttgagatgtcccataggctggatgttggggatacagcagggaacaagaacactgcgttcgctcaaccagtttaccatctacctctctgaacttgttcttagtctgtaaaatgaagataatgataagattaagtaagatgaggtcgtgtgagggcacctagcacttacaatttttgtattggtttctcttcctcagagccaaaggaggagatagttacttttgcttttgcagccttttccgggcggcttttccgcgcaggcgcccctggacctcccaggttgagaggtggagcgggccaaacctcagctgcctttcccggggccgggacccggccgggggaggaccgaggcgcggcgctgtccgtgacgtcatcaggctgcgctgcccgcagtactggacccgagcgcgacggtgcggctggcggacccgggctggcttgtggggaaacgaaactgagggaggaggcggcggctctggcagcggcggcgacagtgtcggcctgaccccccctccgctccccggcagctcgctctctcccctcagcgtgagtgccgacgcgcggcccggggggagcaagcgggcgggcgcgcgggctcagcatccttctcccctccaccgccgcctgggccccccgcccgcggttatgggtctcctcgccttctggccccttatgtcttccctcctcctcccacccccaacgccggctccctggagcccgagctgccgctgacacacgtctctgcgcacacattcacacgctcatgttatcttcaaatgaagggactggccgggagacatgggagcttatctcttctctctgtgattaggggtggcagtgccaaaccgaggcccagggagagaagactgcagaggggatttgaaccccttctgtgcggaagcagcaggtagaaccaggccgcttgccttccgcttagaagttccctgccagagcattctgctggcatgtgtgggtcacttgagcagggcactggttagctgtgtggccttcacctctgtggccgcagtcttttcccgtggaagatgatagggttggatgagatgatttggaaggcccaaatctaaggtgatgtggtttggggaggagcatccgcctctcctgcctttcacacagctgttcaacagtccgctttgagtttgctgtacttccagtctccccccgagtcacttaagaattaaaagcttttagcgcttgcaatggctagaagcaagctctgtgatgagccttcctttatctcaccctgggggccttttgggggtatttaagactacggcttaaagtgaaatgtggcttagcttgg

SEQ ID NO: 46461 - DNA, 641 bp, Homo sapiens
tatttcagagagccaatgcttcctgtcccttgccttgtcgagcctgcccccagcccagataggcacccatactgtcccttcccccaacccggcagtgttttctctgactcgtggctgcagggcactgagattgacatcttcagctacaagcccacactgctcacctctaaaaccctggagaagatccgccctgtgtttgactaccgctgcatggtatctggcagtgagcagaagttcctcatcggcctgggggtaagtctgcagctggcttcctgcccagcttggaatggtggatttgccctttgcggaatctggacagctgcctgccacacttggtacatgttctcttggcattaagtagctgttgctttgaccctagtgaaggtatttcttgaaacttcgtttcctttcttcctctgagtttgccaagtgtcattcattcattctttcatttgtttcttcaattctgtgcattgctaaagggaacactgctacttttcttgtgatacagagcttcccaggctagcagagtggtcagcaggcttatctggcttgagcccaggcagccattcctttgcaacaccaccaccaccccatgccatcccatcccctgtcttgcaaagatactccctgtccctacc

SEQ ID NO: 46462 - DNA, 968 bp, Homo sapiens
atttccaggaagaccacctgtgcttgattcccaggctccaccacttccaccatctcagcctgggttccacctggaacctcaatttcctcatctgtacaaacctcacaggcttgcagtgaggattaacaatgcaatgaaagtagcacatagcggttgctcagtatgtatgttttctttcccttctatatgcagcaaattatttttaagccattcagtgacatcaccaattccagaattctctttacatattcccaaagtaattttgaaggtacaagcttccatactccggaggaaaaatttccccttttagaggatatttaaaccattaataatatacaccagaatgggctccctcatctttgagtcctagccctttgggagttctccttagattctacaggtccctatttctctggggtctccctcacctctgtacccatcccttttgttctgtgtcccccgctttgagttccctcacttctatgccaggccgtctttggggctccccttcacttccatgtctcttcctctctggagatgccctctccagagagtctggttcgcccatccggcacctcctcgggctccctgtcctccgggaaccccgtgggccttctcacccctcccgtccctctccccaaaccgcgtcgccctctcatcctacgcttggctcctcctcctatctatagcccagcctatcccttatcccgcggccaggagaaggcaactaacgaggtggcccaacccccacttttcccctcacctctagagcgacgcccagattctcccgcttctttttagtcatgttacttgccgggatcccccagtcatcactggacgcgcccaccaagtcgctatgtgcgcatgctcaagtcttcgtgcttctccctcattggccaccgagtcagcgggaggtggggctgctgccgtcgccatcttgttgaggggcgcggccggcttggtgcgga

SEQ ID NO: 46463 - DNA, 1729 bp, Homo sapiens
agcctgatgagccccctccctgtgggctggaaaagaaagtgtggaccctggctcatcagcagcatgagatatgggatgcagcagggtgacgcttgagaggcctgcttccccagctgctgggcaccattcgtgcccacccggtgggggagagcctgcgggtcatgggcctagcgacagcctagcatcagaaggccctgagcagactgatctccgtcgcctcacaagacaggtcacttccctcctgagcttccaagcctttacctgagctgttttcttgtcccttaagtctgttggtattgaagtctgggcggcctgacagccctggcaggcagcccagaggccagcgccccaggcagacactctctctgccttatttatgcagcttcgcggccgctgcgattgggtggcatttgtgagcacaaaagagaagactcgggcattcagaaggccctttcagcaaagggcgccacaggcctgctggctggaaattctcctgagatcggttggagtctatttgcaggcatgcaggcatttctgtttgcttcctgaccctggcctcctgggcactggggcggggaggggcaggcctctgcattcggggacaggaaggagggggttggcacagaggtttctgccagagcctccctgcctggaggacctggccttgtggtcttccccaggcccatgtgccctgcttgcctgctctctcaccaacagggtgatgaggtggcatccactggggtcagtcctgtgccacctggcctccccctccctgcctctgcagcccgctgagaagtgaacagaagctgctgcagtgtggctgggagtcagctaggaagggccaacccccttaactggtgccccacgtgactgaggctccttggtcacatcatgatctgtggtacccagatcaaaggtcctgccagcagtgcaccaagccctcctcttggcaggaagcagcagactagagcaagtgagggagagtcgaagctggcgggggggttttcccagacaacagcctgtcccgtgctgctccctgccagccccaaatcaggagtccccccacccccgcaccaccgtgtttctagtcctgagagtgatgggctgggggatggagcctctgaaaattccacgaaggtatggtgcccggtccaggcatgccctgtggccgtctgttgttgatttttaaatctgttcacccgggagtcctagttcagctcagcagacagcagtatttgcttattaatttgtttattgatttactgggctgtacttggggcttctcccgggaaggactccagacgcgctgtgccgcccagcatccagccatccgtcagactcaggtttgagcttaagatgccacaaggcctgcagcgggcagacctagagacagtgcaaaactcccggaggatggactgggccatggggcactggagagactgagggcagtcggggaggagggaggctgcctgcagcagctgcaggacacaggcacgcggtaccgtgtgggaatggcgcccctggagttgtgcaactgggcactcctggtttgggcctctccctatagagcaagggtaacagatgtcttctcaggagaggcccttctctgtctcagatcgtatttaagaggcctccttccagaggcaggggatggaggagaaaaccagtccaaggtcttcggtgccccagaggctcagattcatgtcttcggatgggttttccaacgtgc

SEQ ID NO: 46464 - DNA, 1086 bp, Homo sapiens
cctccatcttgttcctccatcattcccctagggtgaaggacagccccactctcctacagggtcaggactgaagtggcctccatcacttcctttcacttgccattggagcgagcttggcaagggaggctgggaagcacggtgcatctgggcagccatgagcgcctggcctgcagttccatcagcatgaggaagggaggatgaatctgcgttgtcaactagcaatctactccactgtgagccttgattcaccaagcaatcaactcttggaggacgagaatctcatctactatgcccatccccacacctggcacaaccctgggcacacaaaatacctcttggttcaaaagctgtttgagaaataggaagttgatatgatcagttatctattgatgtgtactaagtgaagtggcttaaaacaagaaccattttatttactcccaattctgtggtcagtgatctggactgggctcttcctggggtcattcatgtggctgcagccagtggcttgactggggcaggatggttgatgtgaactcactcacatgtctggaggttggtgctggctgttggctggactttgatccagcaggatagcttggccctttcacatggcagtctcagggcagcaagaaagtgaaaacagaagttgcacaacatcattgcgggtgtattctcttggtcaaagccagcgcagattcaagaggtagggaaatagacgccatctcttggtgggagaagctgcaaaggatttgtggccatttgaaatctaccaggctgttctgcagagcaaaccactacaaaaacttagtggcttaaaacaatggcaacatttcttttgctcaggattcttcaatttgggcaggatttggtgggggaaagatctctctactctgcccagcatcatctgggctggctgaaaggatgggggctgaaatgatctcaaactcgctattcacatatctggaggctgatgctggttatgggctgagactttgggctttgtctaaaacatgtggtgtctccatacagcctgtgctttctcccagcatggtgactgggctctcctgaaagacagacagacaaaca

SEQ ID NO: 46465 - DNA, 1909 bp, Homo sapiens
gcgggctcttaccgtagactccttgtccccggcagtggaaggggatcagcgccagaagtagaaggcaggtcacctccatcttcacggccggtgcttcatccccgcgaggcggcgcagcccgagaggcggcggggggcgcattcgccggggccccgcgacgcccctatgtccccccctttccctgagaggtgagagagagagcggcgacgaagaccaggagactgaagaggcggaggtggcggcgacccgtgtttctcctccggcggggccgctgcccgcgtggggacgcagggggcgctggcccagccccgggtgcctcggcgcgcccggcacagcagccagcgccccgacccgaggagcccggccgccgagccgccccgggtacccagggccgtccgcgcgggatgctaggcgccggggacctctcggcggcggaggcggcgcttcgatccaacaggccacggacgactgacaaacttgtcgtttccccgcactggggccgcccctcagcggagcggagtcggggaggccggggctccgctcgagttaatcaatctgctgtttccagtcctgcggccgctgccgtgggctcagcggcccgactccagggggccgggctgaaagcactcgcggcggcgaagcagccccgggcccggccctcctgatccggggagcagcgcgggctgggttcggccgagggacgagcgccgcgggtccccgggtccgtgaagttagccgagccgccgataaacccgggggaagaatagcagcccggcgccccgcgggaatctggagagcaattccaggcaagaagggccccagaaaacggggaaaggaggaaagtttgagtcttttgaaaaatattcgcgctctcgcccaggccggggctgcggcgcgggcgccgctcgccgcctccgctcgccgcgctcctctcccgccgtctggccgcggccgtagccctcccgggctccgagctctcgggagagcggggctacgccgcgccccaagttggtcgtccccgcccccgcccggcggccttggcctgcgggggcccagagcgggcggggccgggccgggctccggggcgcggcggccgctcggctccgggccgcgggagcgctccgctcgctcagcaacttgggctttgctgtgctgctttttcgcccctccgagcttttcattccgcgctcctcccgcctccctccctctcttcctcctccctcctcctcgcgtctcctcgttcggtctctcgctctcccacccgttgtcgctcgctctcctgtttgattcccctccagttaaaaaaaggagccaattaaaggcagcccagctcgcctggcccagcctctgtccaatttcctcgcctcccccaggaccaattagagaaaacaaaacagggctgggggaagctgactgcctgcctttctctttctctttctctttctctttctctctctctctctctctctctctctctctctctctctctctctctctctttctctctctctcctctctctctcttctctctctcctctctctctccctctcgctctctctcccttcctctcctctcctctctttccctttctcctctccctctctctctcttcctctctccgccccctaacattcccccccaaccccgcccagcaggaaaatgtcagaaagcagaaatggatccatctatcccgaggacagtggcggagggacctgggtttcggcgggggctctgcagccgcgcgctcgcacactcgctgttctccagccttgcacacccagactagctggccgagccgggtgcaccgttgccagcagcccgcggggcaaacacggccgctcgcttcggagacccatgcccgcagggcactgcacacttcgtaaatgttttgcactttggggaggcggg

SEQ ID NO: 46466 - DNA, 667 bp, Homo sapiens
ataattcttttgtgagaattagagcttcataatcaacatagagatgttatttgttcaaaggaatcaactgatgtcaagttgaaagcaagagccagaaaccctgatacatggagttgaaggttaaggtcaacatctctgggagctaggacaggagttcataggcaagaatgtcaccatctaatcagtcagtcttcctgactgggagctgttgccctcatatcagtgcatgtttgtggccctgtctgctgccaatggtgagtcattcttacaaataaaataaatattaataagttataagcgcagtatacttaataccaatcctgtgagcaatgtttcaagaaataagttttggaagcaaaataagcccttaagttggcaattgtaatacatgtagtacttactgttaaccttgctaggagatctgaatattacattcttcaaatactgtgcagtcacggtcactgcccttttccagcatttgaatatttgctatggcagaaatgcaaagagaagaagataggaatgtggtagaattctcagacacaaaatcggaaactgatctaaagtctgaacgaataaaagcaatatctatttcagtgacaaaaagaaaatcagggaaagcaaagtactttcattgttaaaagataaataaatgagcttatttgaa

SEQ ID NO: 46467 - DNA, 787 bp, Homo sapiens
tattttgctattactattattattattactaactagagctggaccctccttttggccctattactctgcccctttatcaactgccctttcctcctgctccaggacaagcctcctgtcctggtctctacctgctggcttcatcccagagggaccccccagcacctccacctgtctgccttgtgttcctgggaaccccgtgtagccagtgcacagtaggtagaaacagtatccatcctctccccattcagcaaacatttttggagccagccagacatgggaaccgtggtgttccctggctccgacagtggggttgggactcccctgctggtcccgacagtcccagacgcccacagcagagggcggcctccttgggctctaattttaaccccgaggaaggtgccaatcgttcattttcaaagctgtttcaaagtgactctgataagcaaattgctggcagccctggcgggtgattattcctgcattaatcagggggaaattatgccagttactgattaactaattacagcaatcagatcggctgggagaacagtgcagtgggaggaggacaaggtaaacacaacctgggaaaggtgaaggaggcaatttggttgtgaacagaggacagaggccggagcccccttcctgcctcctcttgcccaaaccaccccagcccagctgggggacccctgaggccaagctggctgtccagtctgttggggcaggcagggctcatcctctgggaattagtgtccagtgtgacaggaggagctgtcctctcccagccttt

SEQ ID NO: 46468 - DNA, 720 bp, Homo sapiens
tggtcgaaatatgaatgtcctcccctcatagtggcaccacggtgcggtggggtgttgagggaaggacactgtaccgtgggtgtaatgagaggggtcctaggctatagatgacttcaagaatgaaggtccatggcaggagctgttgggagtgtcccactatgtggaaaacctggccaaaccagctgagctaccagccacagacctgggtccacaaacccataaatagcctcatgtgcaatctgctgatcagccacaccagctctaagtcccacaagtaccgagactatgacccttgtaccctgtggttcagtgttctccaaagttagcaagtgccagaagcaccaggaggagctgctaaagcagagcttgcagggccccacacccagagtgtctgattcaggatttctgagataggacttgaaatttttcattttccacaggatgcagatactgctggtccagaggccacacttggagaaccactggtgtagtgcaacctgctgatagcatgcctggagcccctgcacccacgcgggtgcacccatccctcagctactgtggatattggctgctaatggctcccagctgcccctctgctggggtctcaccatctgctgatgggaagcaccttgccctggaggttacccaccccccaacagcgcacaggtaatgaccaactgaggagggagtgggaagggctggccctcttcttaaatgggg

SEQ ID NO: 46469 - DNA, 920 bp, Homo sapiens
aaaccagcttggggacaatggggttgctgggtatcagtaatgaatgatccgctgacaggctctcacctcagccaggagggtttgggcccagtagacaatcaggttgagttagagagtacatgtcagggagcagggagaaaggggctgctggaaagagaaagaggacttgggagcaggtgcctaagggagggtaggggaaccatttggtcaaggaatggaagtctcgctgggactatcaaatgtagaggctctgggggctgggcatagtggctggatcaagaggtcagccagggcacctgggagataacactgccatccctgttctcctgtagacccaggggctggacaagcaagtttgcaaagaatatgcagcagccaggcaggggagccactctgggattcctgcccccgcctccagaaggcggggtttgttctccagctcattcattctttgggatgactcattactgagttgtcatgttgtcatcgagtgcagagttacagggaggaggggcagcctgtctcgcccatctgtgcacaggcagtcctggcagcactgcaactggagagttcccaggctggccacatgggggcggggggagccaggcctgacatcctggccatctgggcgactccagttctgggaagagcactggactgggagtcaggggcctgacttcctgggcctcctacaccctggccaccctctgtgcctcagctaattccaaaacagaaatgatgatacctctcctgcctaaaaccaggacgtctcatccctcatttgtgtttataccttaatttgtgtgtcagagaaatctccctggtagttagccatactccagttttgttcgcccggaggacttagggcaactagttttcttgagattacatcttgcagatccatcccaggtgcagatagg

SEQ ID NO: 46470 - DNA, 491 bp, Homo sapiens
acctctggactttcacttaagtgagaaataaacttctctcagggcctctgatacttgcaacagaacctattcctaatataccctgtaagtctcagtttcttggtctgtaaaatggagataacattttaagagtaattctctgaggaggatcaaggagggtaacatacaaaaagagcatggcattcatagcatgtgctaataaatacctgtcctctctccccaccccaatgtctgtactcattcagtacagcactgagcatctgctgtgtgtgcaacaccatgctgagcactgggaatacagaaatagaaggtacagtcatgaccctcaagcagtgcccaggccatgggagtcagactggcaaactgtcaatataacagagaatacgattacacacacacttaagaatgtttgttagaactctgcttgcaagcaatagaaactaacttaaggacaaagagggaaatgtgttattataaagacagaggagtgt

SEQ ID NO: 46471 - DNA, 1572 bp, Homo sapiens
cttgccactgcactttaaacccactcctttccatctgtcctgagaggctggtgcacagtgtctaccggtatggaacgatcaaagcggctcttctgtacacctggaagggatgaaggctgtatttgaaagtcactgccatgctaacagagcgatgtgaagatatgtgaagtgctcacccatctgttctatcactggattctttatcatctgcattagggtgtcctagcatggcagaattagcaggaaaaaaattagtccaaagacttagcacaagagcggttggatctggatcagcacattacaataagttaataagcccagcagccgtgggtcaaataaacatcctactgacacaaagctggttgatggacaattctccagattgagtgtacttttggaccatggctttttactgacttcccaaaatcagaaattctggcaggaacagactttggcaagaggcagaaatacagccgaacacatacacacaaatcagattatgaggaattacaaaggtgggaggtgggattttaattattttgtgatagcgaatccagtaggaggtgggggtgcctccccatcccctttccctgctcctgttgtatgtctaggctcaggctttgtcatgtgattataaacatgttctttgatttcctctgcgtaaactggaatgttctggccaggccttcttctggaccacataaaagctttaggagatgtataaatagagttaaagtcacaggatcgtttccccacagtttgttctctaaattgagaaggctaaagtgagaggtgaaaggacacaggggatggggactcgcctctgtcctccctctccctgggcaaattcattgtcattgcctctgtcaccaggactttgaaccctgggagataatgctcctcgtgcttcctggctttctcttgtcccagctcgaggaagcagaatgtggaagttttccaccagcccttgccctgccctgccccttctgggcgcgtgggcagttgaatactagaaagatatcgacaaattctaatagcccactcagtcagaagtgttgaggccctacttctgttagaaaatagcctcctacttggaatttccttctttcagaaatctcctcttggcaagaaatttctttctccttggagaatctcaatgtattgaaacctccttcacctggggcatctctgctaatggagaatcccaaaggaatctcctttcttagctttttggttcttgaggctgagctgggtacattgcgggactggagtgggagagggtggaggaggctgctggagggaagagttcctggtgtttagtccaaaggcttagatggccatttattacttatgttagaacaatgttgatagattttagatgccatcttgggggcaggctagatgagacagagtggaaagacgtgcatgtcttgtaggattctgtcacccactcctcctatgcaccctcatttccctaccttccctgcagggctgtggttctcaatcagaggcgattttggcaccctgacatcaattggttttttttttagatggagttttgctcttgtttcc

SEQ ID NO: 46472 - DNA, 3323 bp, Homo sapiens
caccatgttagccaagctggtctcgaactcctgacctcaggtgatccacccgtcttggcctcccaaagtgctgggattacagacgtgagccacagcgtccggctttttctatgcactttcttacagatatacttattgaaggctttggaaaatccaccaaattaaaactaaacattgtgcataataaatcagcactcacattttagggtgttttggctttaagtgcttgatttttgcaatcattaacttcaccatcaacagcatctgtggcatattaagctaaatgcgatccttgctctttagaggccaaaataaacatcaatgttaacaaacccacacagtatgcacaaacagaaatgtgatttggtatataaagaaataagatagcaacatttggtaatcaaattaatctaggtaatagtctctctgaggctctgatatacccgacaggcaaggagggtatacggcagctattcctaagagccaggaagtcttcctcagcgatgggtctccaaaaggtctggaggatgttgcctccgtgttgaattagtcatcaataatcgatttctctgttcatgactaactggagatcagaatgagctcaggatcaaggactaggatcgttaaaggactcatttttttagtgtctcaaacttctttggtcacttaccaatttccattactgattcagctacagctcccctttcccctccaaaaaccaaacgtgtcagctgtaggaagaagtgcggctctcctagcctgggcatagggactcgcctgggcatagataatgtacttgtggctctgtggttgggagtggagacaaggaactccccaacaccggtgggggagaagagacaaggaagttgccccagacaaggggctgggggaggggcatttcccaaaagttcctgtcaagagaccagtataccgggtggaactataagagttgtttgggtgtggcgggaccaggaagagagagagagatgcccagggagttggcaaattggggagaatggctccccggaatcgcccaggagccagagcggcagctccagggaccttgactccgacgcccccgggaagccagagctccacttccgcgtttggcattgctcccccaggcccctcctcgcactcggttacgggttctacgggcgcatgcgccgccactctgggactggcccaatttaccctacacaactaatctgctcctccccctcccgcttggagcgcaccattcgcgtttagggggaggcaccgcgccccggagtactcagaaacctgctccccttcttcagacagggggaagataagtttgcttcagattctaaaagttctaagaatacgaaggcctcagccgcccgtcgccgggcgacagcccgaggctctcgttttctcccacagccccgcactccgcctttgaggcgcggaacgaagtggcacgcccggatcccagctgatcagcggctgggctttggcgttggctcccccgggcgagaccattgtgactcctcgggaggggcgcacgccggggagggggcggagcggccattgtccggtcagcgcagcctccgggggaggggacggtgttacggagacagcagggcccggggcttcagagcggccgctgcgactccggagccggcggggggctccggtccttccctgcgccaccgcacaggacatctctctggctggggagcggcggtgagacccgccgagggcgtctgtgtccctcctcccccgcggtcctcggtgcgtccgcacgcccctcctcctcggctccctccttcttctctccgcgcctctccgccccctccccgtctccgcaggccgagtggtgcggcccgcctccagctgaccggcctggaatcccggctccgagccccggactcgcgcccgcccgcgcgcccgctccttccccctccccccgccccgagccccccgacgccgccgccaccgcctcctcagagcggggcccgggcccagccgccgccaccgctgccgccgccgagctccgccgccgccgagcaccatgggagacgctgggagcgagcgcagcaaagcgcccagcctgccgcctcgctgtccctgcggcttctgggggtaagtgcccggccgggtgggggcggggggcgggggccgggggcgcagacgccagggcagcctgggcaggcctcggggcccgggaggccggaaccttggaggctgggcccagcccgggcctacggggagggggtgggggtcgcgttccggggaggggtgccgggtggggagctgggggtgggcagagaaggccctgccgggggtgcgttgctaccctttgggactcgccggcctgaagctcgggcccacgggggcctcctgggccacgggtgaggggggcagggcggcggggagggatgagggggcggcgttgaccgctccgggaggagcaggggtgccccttccgtgggcatgtggaagccagcccttcctccctcccggggcgtgagttggtgcccaggcactaggagggtatttcctctgacttcttcacctcccctcctccccgtcctccggagacttgcatcatcacttcctagattatatcccagtgccccatttgcttttaggaagctattcacacgtcacccgtttgtaaaaaccgagtccagaaccaggctggggtaaagttataagattgttgaggtctcaccttcatgtaaaacacgtttcaggagatatgtaaaatttccttgtcaaaaaggaagaaaaaaaccacacaaaacctgaagtcagcctggattggggaatatgagatccagtttcctcagttggctctcaaattctcctctttctcaatttaagtaaaaatgataaaaatgttgacagtgggtagcatatattgtttggccatcatgtgttaaggcgaaaaaaatgtgaggtgggaaatcagctcctcttcctccccccattactgtttaaattctcctggtaacactttaagcttcatggattgccacctaacaggtgcctccatcataccacatgactgtagttctgcagtaagaaagctggagactttgaaggctggcttttgtgatttgagtcccttttctcttttatcgttttgttttagttttattttttgagagattccgtatatttggagacatagaggcaggaaggaagattgtttctggtgaggacatcttgggaagaagtatggaagtagttttccctttgctatctcccatattgtaggaatggttaacagaaattaagagtaattttgggagtgcagagaaagattagaaagtggatcttaatgtagactt

SEQ ID NO: 46473 - DNA, 1165 bp, Homo sapiens
agcagctctgcaatttgcttgtctttctccattacgtagttaaaaaatgactacagcacctctgagcatgccctcctcaaatgaggacatccaaagctagaggaagacggaggaaaaaaaggaagctttccttcgtctctattttctatattaatggggaataaaactttccccagtgattcatctgccactttgccaacttccgactcccagaaaacttccctttacatgttatttgccagatctgggtcacatagccacatcatcaattgtgtgccaaaaggaataatggattgctatactggcttagaccaattttgatttctcccctggcactgtgtctagggccaccagaagtaaatggggattttattagtgagaaggatggagtaatagctaggtatgttaccaagtattaactgccacactgacaagagaggtcagagtgtcttagacattgaatttaataacttgtttctttgtgttatagttaagaaaggcatacaaagttgataagaaaatggtaaatgcattagcctgtgagacccagtgtgcttgatactgaactatgactcctcttggtgagtcctggaatgtgccatggggcattgctgtacttggctgctagctggaatatctgatttgaaccatagtttaataactggccaggtagtttgaaacaatagaacattattattgttattgatagaatctttattgtgtaatgtatattattaggactttcaaatgtgtttcatttttagaagctacataatacatattttaagcagcgatttatttctgattatttttgcagtatgttagaaaagtaaaataatttgacatgttaagacgtgttccatccatcttcagggtacttctcatgacatttcatttgagcaactaggctttgtattttgttactgcttgcatttagcactcaattcttacttttagataataagaaaaaacaggtattttaaaaaaggacatgtagctgctaataatagcatgagtcctatggttccttctctgttcatatcctagctgacaacacatacaagcattgctttgctggaatattctgaaattaacaattttgaataagtttatacatgtatgtttataaatcctttcccagttaacattttttaattttgtgttt

SEQ ID NO: 46474 - DNA, 1150 bp, Homo sapiens
aaagttatttcaggttggttaatcttgatatcatctggctcagaatcccaagaacctgttgtattaagcaaggaactttgtaatttttttagacattaataaacccaaactcagttgccactgatacaggctagaagataatggttttaattgttctgtgcttagaaatacatctattgtcccaacctcagtcccggtcaacacacacacatacgtactacatttatctatagaacccacaatcatgaagaggctttctcacctttttctttagttactacctctgtctaccctgttgtttggaaagaagaagaaaggtgaaaaatgggagccaagtttacagtgagtcatggggacttacgccagccacactctccggcattagaaagtccagagaggaactttgacccttaatgtcaactctcaaaactattttgtttgctgcaaccaaatgttacccatgttatatattttgttgttgttgtggacagaaacctgaaaacattttctgtgagtggcccttaatttcctgcattgattttaacagagttgatttggaactacctgtaattgtgtggatgacagcgcaattagtgtagaatatatgtgtggtgctgacatgttcctgttctgggttttaaagtgtttcataggttgtagtttgccagaccaaatttaactctaagctctctgtttataacattgcccaattatcaaagctgggatatattattactgccagttactcttgctgtcaatttgtcttggctcaactatggttccatttgtactttactgtaatatagtgaatacattggattaggttgttagtttaacaagctctctggagaacaccttcatgatgatgcatgttgagatatgctaggaagccttaaagtttatttgcagaaacctacagaaatgtattcactagaaatttttaaaagaataaactctcaacctaaagacaaggtaaagattctcttatttgataatcctctagaacatatgtaaatatgtgttaattcatgagtctcagccagatttctttagggattttgatttgacagtttctcctttcttatataattctactggatgaattattttatgtgctttaaaaaaagcattttgttagttaagctgttac

SEQ ID NO: 46475 - DNA, 584 bp, Homo sapiens
ctccaatgagcatttcctttgagcaccatgttccagagctcaacattttgtagcattttggatttcagatttgaggattagggatactcaacctgtatttacagtcaggctgtaaccagaagcaaatcctccatgtatgttcataggttgttcctaaaaaattgaaagcccaatatatgacatttacattattatgactctgtaaacgttccctgtcaggccaccgtgatacatgctaagaatatatttctttttctatgggtctaatgaaaacagttaatggtgaactatttagaaagcaagctttcatttacttttcagggctagcatctgtgagccattgcataagaatctctgagccatggaaaaagaatgttactacagcaaagccaaattgatcctttattatattccatcagttgctcaaaaatcatgccacatcttagtttgccttatatttgcattatagctttttaatacaggtccccccacccctggcatttataattgcctttctttttttttctacagtatttggttttacgtcaccacttacttcctaactctgtatttacacctttcac

SEQ ID NO: 46476 - DNA, 638 bp, Homo sapiens
ctgcctgtacattttatagactcatttgttcataggaaacaccaagataatttagaaacaaagagaattactggaaattgcaaatgagtagtacccacatcaatgaggtttcatattggttccagtcacttccattctctctcacttagagatttataccttttgggtgtgtaacacataccttcctcccactgttgtccccttccttgccagactcaaaaaatctcagcaggcaggagtacatgatgctctgtaacttcccacagcccctattggagtatgtggcctgtagtggctgcccagtcagtggtgactaataatgtacaagaaaaaatggaaagtccaagaaatgtggtgtcctcatgagcctgctgcttatgattaggggaaagcccttttggaacagtgtttgaaagcaggcccaaccacagctgagtgggaatatttctgggccagtagccatgtaaattcttgaggtccagggtacatgtgcagcctcaggatttcccagtggattatttggctgaacgaaaaagatccagatagagtgtttcccccccaccaatttttattggtagaggaagaaaataattcagactagacatatatgctgtcagatagggtagtgtccttgcttg

SEQ ID NO: 46477 - DNA, 751 bp, Homo sapiens
gggctcagactcaacctacatgttgaagttttaaagaggacttctaactcatgcctaggatgcacatttgcttggaatttaggcttagccaggaattaaacccctttgttgatttgactgaaaaaagcaactgcagctgaagaatactaaaggaaaaactgattcaacctctgcttttccattgagaggaattttgctctaccaattcccttcacttctttggctgcctgcaaagtgtattcttatgtctttgtgcctgcaacaacagagagctatttctgacttgtaaactagctgggaatgtttgcatggtgagctcatccaggacagacactctctatgaccttaactgaaatgagctccttaaacatacacagcacacttccacccatagatcagaagccattttcaaaaggggctgaataaaggaagttgctggccaagatttattgatgcagatcaggtcggtgtttagctgttgccacaaacctctctaactaatgagcacagcatgaaatgcctggtgatattatatatgttgtctcctccatcttcccttattctcattgtgcagtttccctaaaagcagtgaagtgctgggcttttttttttttttaattgattagcagatgtgattttgcttacatcttccataaatgctctggctggctgcataccattgattaccaggggttcagtttacagcaactaattgctctccttgctggtattttgatacaaaattcaatag

SEQ ID NO: 46478 - DNA, 1235 bp, Homo sapiens
cattcctttagcacactagcccattttctttcctcagcagacttagagaacaagtactcttcatttaccatagcatgattttgtgagtctttaatatcttcaaacagtagtagacccagttaggtaaccttacttgatacagaagtagaatagacaaatttgcatcttatctggcacagttccaaaacagaggatgcattcattaccgacagcacagctaggacaatagaagaatcacacatttgaaaagtgaaagcttccgcccagagcaagtcaataaaaaaaaacaaaaccccaaactactaactcttcatccctgagcctgcctggcatgcatgggatctcattctgccaaaaaccaaattcaaaacaaatatcaagattctagggagggcaaagttcaaacaagcaaaagcatttctagttgttactgcagataagggataaactgatgtgtttcattctgggcttgttattatcaaattgaccctggccagcagaggataaaattaggatggtttcactccaggtaaaaaggtagagctcagttccagagtggcccgcacttgaaatactttctacttcaattaattctgtcagaaaagagacaaattcagaaatctcttcaggttagagccctagcccttttcagtgttgtaaaattcatactgggaagaggctgaggtaggaaatattactgtcatcactgaggctttcagtgcttattgtcaatcgttatgaaacgatcttgtctgattcatacctctaaacaatcagaagaaatcaaagtaacaatgtaagagtttcaggaacaaatacaaaacttgcctgatggttgtagctttgagttgtgcaattctaggaatgtaccatgatctctggcttctatccagaatgctaaatagacaatctatctgaggaagggcctgatccctcatacctggcctgggcaggtctgtgactacatgtgtatcactcgctttgaacctgataccctataagacaagggaagaaaatctggaaactggcaaaacagttaaaaaaaaaattggacagtcattgtagggctcctgccaacttctggtttcttgccatagagagtaatgattcctgccagtcacttagaaaaagaatagcttctagaaaagctaaattgctatgacctgaaagcagcaactctgcatcagcacataaaaacttataggaagttggaagtctgaaaaatcagattcata

SEQ ID NO: 46479 - DNA, 1622 bp, Homo sapiens
cacagtgaacagaatccgtattttctgcccagaaaatagcagcctgtactgcctttaggaaaaacaaacaaaacatgcttccatacttccttggatctactaatgacaaaagcacaacacggttctgggaaatatagcaagataactaagtctatgaggaagtaagaaatgaggatgcctatcagcaccttggtctcaaaatctgtaacaacaatgtactaaaacgccaaggaaacacatgcacatacatgtgaagttagaaactctaggcaacaggttggctgccccggatctatactgacaggtcgccctcccaaggtcgtgggtgtgtctgatgccgcacgcaggcactgattcacaactctctccataacaaccagctcctactcagaggctggccagggcaggggagatgagggccccagcagtcccaaactttccaaacccccaccccggggtcccgggtttcgcctcctcagtcccaggcaacgtcgtctcagacaggatacgagactgctagggaacctgggctgcccctgattcgaactcctctctttgggaggctggtagagccaccccgaatccccgaaacgtctacttcccactacaccttcgtggactgcgaacgggacggctaccgctctcccagagcacccgggcccaagaaatgaccctcgtcaggccccgtcccagctcctcccccgcccccggaaaaagcggcggaggggcggggggcggtgcgcgcggatacggcgggggcgcgcgtccccgcgccgcaggtgcggccaggccccacctcccctgcaaggacccggctactcaccccagcgatgctcctctgagaccaagctgcgacacagacgcctcttccgcccgctccgcacccctctctgcgccaccgcccccttggccgcttccgtggccgccgtcctcgccgccgccccggctgctgcggcgcgcgtccgctttcacgcactccgccgtggccgcgcacgcgccactgcgcgctggcgtcacttagcaaccgatcgacagcgggctgctgggtccggcgatgcaggcccagaaagtcgcctaaggcagcttccgcggctttttcgcatcggcccgaccctctgcccctccagaacagggggccccagggtgtggctgccctgccggcacctggctccgggtaagtcgagtcaccacacgtcactgtatggcgtcaccggcgcacgtcactacggatgagaaggtcctgggcgcctgtggagtgacctcgtccagaccgccgcagacccgatcggcaagttcttggaggtgcaggaaggttctccaaggagtaggaccagaaagggatgagagcgcgagcgcggttaatgtcgaggctgctaagtgatgctcgttaatttcgcagcagggtgtgactggcccagccttgactctcagtttcctctctcagtaaatgggcataataataccggtccagcctacgctggagaattgtgaggtgaaaatgaaataaggtatgcaaaggtactttgtaagtataaagcccatttgacttggtggctcaagcctgtaatcccagcactttgggaggccgaggtgggcggatcgcttgagctcaggagttcgac

SEQ ID NO: 46480 - DNA, 1521 bp, Homo sapiens
cccgggttcatgccattctcctgcctcagcctcccgagtagctgggactacaggcacccgccaccacgcccagctcatttttttgtatttttagtagagacggggtttcaccgtgttaggatggtctctacctcttgacctcgtgatccgcccgccttggcctcccaaagtgctgggattacaggcgtgagccaccgcgcccgccaactgtgtctgatcttaacaaggcaaccgaaacaccacacctgagtgagttacactgattcttacccagtaaagacatgttcggtaagtgaaagcctttgtatgcaacaggtcatttctcttactgggtcattactgtaaaacgagagggtaagagaaggaatttctaagattcctttcagatccaaactctatgattctgtaatctctcctgggccccacgaagatgaggaaggcaagaagggctgttgtgacccacagcaaaggccaagcaagcaaaagtgaaattctgggcgcggttaaacttagagcgatcaaattagtttgcaggagttaagactgcagtcagggtggtaaggaaaaacgaggctgggcaggactggtacaggacaggcatctttgaacctatttctgggagttctgaaactactgttctcgtgggccttggcgactgatttgggaaagctgaccctgggttggcctggcttccagccaccgtcgcaacataaacaagccaattcaaaacagggtcgcagtctttgaaactagctgaggcaacagatcccctccacacttcgcgggccccacgatcgccccatcaaacaccattatccctcttcccatcacactcccgtccgcccgaggccggcggacctgcagcggcggcgggatggggttggatagaatgcggcccggtcccggcccagcggagctgggggagccgttcccttcggtcctgtgcccaccttggtactggggtccgcgtcggagcagcaactgagggcggcctcgtccgtgaggccgccggacgggggctgcggttctgccatggctgcgctgcagtatcacagacgacgggacccaaggaacggaggagtcacccacactacgcctcggccctgtgccgccttaactaggaatggcgcgatggcgccgcgggcgggagaccgctgacttccagccaatcgctgcgcggagagcaagttgactctctgctgattgggtcccagtgagtcagcgcctccacccacaggactatgcctcagactacaactcccaaggagccttgcgcataaaggaggcaaactcatacaaaaaaaaaaaaaaaaatgcaggctgggcagagtggtttctctgttacttaatgagctaattttgtttgtttaactaaagtttggtaaccattcatacctcagggctgcaatttggtagaaaattggaatctgatggaaactgaaaactgtaagttgttcttttaaaattgtaaggattcagaggtttctcagtttacgcagcgcagagtaattaaaacaattg

SEQ ID NO: 46481 - DNA, 1309 bp, Homo sapiens
ccctaataatcatggcctccatctcttctttaatggtactcatctccccttccctatttttcctggtgggccccatcctaattattcctccccagactggcatcttgtcctctgaaggtcttggctccccactgagatgacctcttcatttcatcttttctctcctttgttcctctgacatcattgacctcttggctaatcctgttcaaacattcacccaatggcccgggaaaagcctgctggccacccgtgagagcaatctaccactacagcaatctacccattaggggcttggcacttacttagagactttcattttttatggtgaaaagagcctgagaccattatggcctgaatgaggtcacctgttcatcattgaactacgaaccagcttggaggtgcctatgatcttgagtgcagctttaggaaattcctgtaggactcagattaaatattctgtcaggtctttggcactggcaacctctattcctctggccgactgtgcagtagttctcaactattcttcacctgaacacacctaagaaatagctaatatcccttttccacgttgggatcactggttagtgagttgcatgctgcatgacctctggctccaggggcagtcttgtatttgcataatgacaaagctgccagtccagggagttctgggttgaatatataaaggtcaaggtcctcggatgcatcctctgtgttcagagaatcctggcaaagatgaccataggatattcagtacttcctagacttcatgggcaactgctgccctatggttcattgcaaattttgcccatctgacttcctggatgatgacctcttgatgaagggctgtagattcacctgggcagtgtctgcagccaagaaattcaggatttgaaggctttcttcaattcatacttacttggacataacctgatgagtaaaatacctatttgtgttattagtaaactcaatgtttacaaacttctaggccctgccagaaagagtataaggatagctaagaagtcatcaaattctgggagattctcttcctagagaactttgcagtgccaagtaggtctggaaagcctgttccagaactaaccacagactgacctagtagtgagtcatacctgctggatccctaggactactttgatgtgacttcagaaggaagctgtatgtctccttcggtaagacttgactgtaggtattgcctggattgtgacacttccctggtggatccctgattccatgggacttcatgggccatggtgggtttgaccacacaaagttgtacaatgcaggtatctag

SEQ ID NO: 46482 - DNA, 657 bp, Homo sapiens
tattgtggcaacacagtaaggatacagagccagatcagtagagaaaaagactcatcttgtggagtcatcgatgttccaggaacatggaattgatgttccagcttcctatgcttttgccaaggggccatgcagaacgtcctctccatccagtatgaagggcagtaacatatgcactgtttccattcagggaagcccacttgagattcagagtccagtggtttttttttaggtttggtcacttcctgcctagctacaactaccaaagttccagattcctagaaggaaagcagatagatgtttgccatgtatcacaaggtttgtgtaaacagtctagttggcactgcaaaacaaccttatcaattactaatggaggagacattccaaaagccaagttccctgataacagacaagggtcagctctgcaagcatacccttttcaagattaggcctgctgtgttaactcttccctacaccatggtatacagatgcttaatggtgcaaaaattagttaagtattttggagccagagttgattagactgactctgagtcaaagtacagagggcacccctggacattttaaagagatgattgagtggtggtggagatagctttttggtgatagctattggagcacaggagaacacaattagttctt

SEQ ID NO: 46483 - DNA, 701 bp, Homo sapiens
ccttttgctgtcctggccctctctctaaaagagtactagtttatcagtttcctcttaaaagaaagttcctagaattgaacgcaataatgtagatgtagtcccaggacagggaagagtgtggagtatatttcctcccttcatcacaacattaaatttatatatgactgcagcccaagaagattcattttcaaatctgtgatgtcacactcttgggtcagattgcgtaaatctctctctggctgacttataacccctctgtgtttctaatgtttgttgactttgctatcaataggttggtgagaagttccgtgcccgttctttgaaatttcctggcttgatatcaggttgcactatggactggttcagccgctggccaagggaggctctgattgctgtggcctcctacttcctttcagactataatattgtctgctctagtgaaattaaaagacaagttgtagaaacaatgggcctgtttcatgacatggtttcagagagctgtgaaagttatttccaaaggtaagtgatattacataagcaccatcgctatggaaccacagcatgtattcccaagaggaatgcattgtaacatccagcagaagactctttctattcattgagcacgagctgtatttttagatctttcttgctttgattttctagtgactatgtatgaagagatggcaagtaaacaagattta

SEQ ID NO: 46484 - DNA, 511 bp, Homo sapiens
ggagatggccagtggtgtgctgaggccccattggagaggcttccaggagggtgctatccgttgccgctctgtctccttactctcttttccttcatagcactttccccacctggtatagtgtatatttgtttatgtattttgtgtgtgccccctgccccaacccccaaccctgactattggaatgtaagattctccagggtgaagactgtcttttcgtaactgctgactctcctactgtcacaacagcacgcaggggattgtcagagctcaataaatatttgtagaatgagctaatggattataaagataggagcttggttttgaaagtgcctgtgctggccaagaattttatgtgcaccatctcctgtaatactaacaaccacatttcaagataggattatcaccatcccaaagatgttaagtactcttcaaatgtggttgctaggattggctgaactaggattggctggctctgatttatgtattgttttgactctatttattacctgat

SEQ ID NO: 46485 - DNA, 624 bp, Homo sapiens
agaaaatactgtgtgtatttacccctaattcattatccctaccactttactaggttcctggctgcccaggagagggatgtggtgtttgtctgcctcccaacactgagaaagttaaaatcagattaaatgctttgctggtggttatctttactaagttccattgtggcctttggattgtcaattacagctttcaagtcacagaagcctatttcatacattcttatctgggaattgttcgctttgctagaccttatcacatcctaatacaaatattgctttaactctgctatttcattcccaattcacaaataatattttatgattgtgttcccagtagtgatgattcaactcttccactgtgcttatcatggagagctggttgggggtatttgccatatggttaatgtggcaacctgtgtttttagtggccattatccaagtgctaaagggaagaagagcaacaggaccatggtccagccatggggctaaagtgcccttgcacttaacaccacatgtgtttgggttaaaacggaggaaaaatattttcactgctagggcggtgaagttaccagtggagtgtccaggaataaaaggctgaatatctcttaaaatcaaataatagag

SEQ ID NO: 46486 - DNA, 1575 bp, Homo sapiens
cttgaacattcactatggaactggaataagcttctgccactaccggcagttacagctaccacactttggtaaattctgtattcaaacgcatttctaagtcacaggctatctgggctactagctgcatgtgccccaggtgcgaatcaaatgaagttttaattactgctacttgtgatcggtatccaattagaccttttaccctcctccattagcagagggctgtggctcaacttggttgtggagaggtttcccaatgccacagggcgtcacgataactcaattcggagtgaataatttaagagcagaggtgctttctcccaggaccctcgactctcgctggaatcaggacctgcgtgggtcgcgggctggaaagaaaatgtcaaaactggtaacagtgctgacacgtgtggccggagatgagcggtccggccctcgatcaggatggggggccagtagccccgcctccggcagctagggccacacccccggcagctagggccgcgccctcgactgtggctccgaggccaggtcctagggccgaagtttccatcgtctcacctgaactaggccgggctgggcccgggcactcgcgggcctaggtttccataccaggaaccgctttagccagcctggggctgcctttagagtcgctgctgcttccgccttctctcctggggtttgtgcgccctgactggcagcagggggttgggccgccagacccgcccgtttccgcgccgcccgaaactcagctaaccgctgttccatggcgcgcgcctcgcgtccgttggccgataagggagcgcgcgcccgcaggccgcacagcagttgcctccgctcggcccgcgccggccgccgtgcgcctgcgtggcagaagcccctgctgagcatgcgcactggtgtgacccgcgtctcctccgtttgtgaagtctggcgggtcgcgtgtatactcagccgttctctcttcacaggcacgtggacacagtgtcacctcctcaagccaagtctaaagcacagggctgccccattgccctctcccaaaggccgctctgccttgctgcatctcacttaagggctcgaggccccactgatccagcgtcctgtattcgggatctctgttgctgggccccaatgaacagcgccacagtgagaagatggttccaggggttaggagaggcccgtgatctctacgacattccagcgtcagaggaataacaggctacatcttaccctttttctcttatcaaggaaagggtatgccaatcttagtacctggagggtgactttctcactgctcacaaagcaggctgtgcagctccatcattggtcttgccacgttgggaaattatctcgttttgtgtctagatacgtcagaaccttaaaaaaaccaacaacaaaaacttttattggggtgcaacataaaatacacatcttaagaatatgactcagtagatttgctcttatgtatgcacctgtgtaactaccacccagatggagagaaagaacatttctgtactctgggagtttccttgtgccctctcccaatcagtaccctcccaaaaggacacagttcaggtt

SEQ ID NO: 46487 - DNA, 1139 bp, Homo sapiens
ccatgtttacctctacatccctttctgctacttcttctgaccatctcccagttctagccttaggccttgttttcctggaaaatcaaaccaaaacatttattacctcatttggaaaaggcccttaaattgaggcctgtaaaatattgcacctggctccctgctgttgcgtaatcccacccaggaatgggtgtgaaagggctttatgaactgagaggctgggcccggtgtgcagggttgctgggagcagaggtaatcctgagggaaccgtggggactggggagctgctgggttgggaggcccagctcccggaatcacctgggaacagtaagaggtgaagatggggagatggggcaagtggaaaagggggtgccaatgacagtgctccctggggtggggagaaataaggtgtgctttattccagtactgccctgcagattcaagtgacttggcacaagataaggtgactcaccaggccaactcagcctgccacaagggccctcaagatcatccacctggccttgtggggactcgcccttctggaacaagccttgccccctgatttggcctctgccccaggaagagagggactgaattaccagtaggaggggccaggcctctagttcatttaccctccatttagtaaacatggaaaagctgggcccctctccacactgggctcccaggaatctgaaggtggacaagctactccctgtgccctttagcggctcccagtcaggggaggaggcataagaccaggaggcagggagctggaacaacatcagaacagctcggtgggagagaggcagcttactgaggaaggggctctggaacacagaggaggagcacctggcccagaatccgggagggctacaggtaattgtggaagtcttcccagagaaggtgatatccatatctaatcccactaggtctcaggacttacccaggagagagagaggaagggcatcagggcagaggaaacagcaacggcaaagtggctggagcccagagaggtgggaaaggagaggaggctgaagagagaggtggggcgggggggagggggtggaagagcaatggggagcccctgaggagtttaaaacagaaaagaaatgggtcaggtttgagtttaggttgctggctac

SEQ ID NO: 46488 - DNA, 969 bp, Homo sapiens
agcatttccccaccaaaaccccacattcatcaagcacctctcacacccataactcctcttccaccgtctaatctgagacctaagaccctgaagggaaaccagacaaaatggatacactattcccattctgtagatgaggaatctatagagaggctagaaagatggtgaagccaaacagaaagatggtgaagccaaacagcaagctggtgacccagcagagcaggtgaggccctgtccacagaacaaccagccctccacttgccacccggaactgggctgagaaacaccaaccaaagcacagcagggaatgtgcaggtagacactggtgacatagcagagataaagggctgtgctgtgcggtcatacccacggatctgacctgactatatgagttagggtaagcgcgtgcctacgctccctaccccattcccctgcagatgcctcagatttaccttgaccttggggtggggtcaaggatcagctacaggaagccaccagccactcaaggtttctaaaaacagtccttggagcaggccagaaaggtggctgtgggaactgctgactcatcaccttcccatcccgggccaatgacctgagggaggtgcagttcccgggccgcccagctgcccctcgcgtgctggcctgcttcctgtcctcccaaacccagctctgcactggcacacaagctgggctggccagtctctccaacacaaatatcaagtgtggggccctctctgagcagcacaggggagagggcagaggggaaaggccacatctgggttcaaaatcctgactccagcatccactagcgggttacctggggcatgtcttatcacctctctgagcttaacactccgtatctggaaaacaagagtcatggcttcactgtgttggcgcgtcgattacaaaaaaatgatgaacagctcagtgctgggcacatggggcgtgttccagaaacgagcactggga

SEQ ID NO: 46489 - DNA, 2073 bp, Homo sapiens
ccaggaggtggaggttgcagtgagccgagatcgcaccactgcactccagcctgggtgatggtgtgagactctgtctcaaaaaaaaaaagatgtgtacacaataaccccaacggtgggtaggtggagatggagggtttgaccatatgcagcagctctcagtctcagagcattccaaaaagagaggctgtgccaaaactgagttctgtgaactctgaatttccagtgtggttggtggtgacaggaaccttctagaacaggacccaaaagtacctgcctcggctgtgggagcctgccctgggtttagatagacatgctcccagagtgatgctgacacatgctttcaccaggcaacctactgacctgtccaaacagagcagagtgtccccagctaggagggcactgcatggatgacgggcagaggggtatggtcagcaccagcacatctgctggcttgggggagaatctggcccggcaggacacccactgcaggggctagtgacagttttccagattgtttcccaggaggtgggcccagctgaggggcagaggagggctctgttggtgctgcctctgggcttgggggctgttgggagacaggacaaaggagagagagaaacacggcttcatggttcaggacattcattaataattaccctcatgcttggtgctaggtttcggatccaatcaggtaaaaaccgagggcttgtagggagggagggcagagaagggtgcagaccaggcaatagtccccgtgcaatgtcctctgacacggggcaggggagcctagagagcaatgcagctagaaaggaggcaacccccaggccagggtcaggggagccacctaaacagcccaagcctacaggaacttttctaccttgaagcacacaggccctcacaatatgccccaaccccactcaattcataatatgcattgcatggtgataccttcccaccaaccccaaaggcagaaatgatgtccagtacttcattcccacaacccttaatccagcactgggcatacagcgggcactaagtgtttaattggccttattgaacaagtgcttagctcagagaggtgcagtgacctggcctaaacacacagcaagtcagcagagctggcccaggactcagctgtcttctagtctcccaactgtgggtgagtccaactctctgggccatgcatttgggtggattgcagggctgaggctagagtctggaagatgggggaggtgaggtgttgaaaagctgttaatcaggacaccctcccttttcctgctaacccggggggtgctgacaagacactactgcctcggctcaccccacttcgcccactcagcacttatccccttggcgagaggcagcccttccactcgctgctctgaagggggcagggatgctgagaagagaagggcacccttccaaagctaacactgtcaggatgcattccactgcccgggaggtgagaattttatttgaacaggagtgatagggaaggtaggggatggacgtctttctcctccagagagtctgtgaataggtgcctacctccatcccgcactgggggcatgagaggagcaggaaccttgcattagacacaaagggtacccaagccaaaataaacatccataaagggccccgccctgaggtccttggcatgctacagaataacctgttccaagccatgtgggcaagactaaagcgataccctcccaaggtgcagaccacagtccagctagaggttaaccctagggaaaccaaatgagtggatgtgacacagcatgggtttagctgactggcaggtcagacagaaacacagctaagaggcaattctatctcccttacgtgattcctccttgggggttttagtctcagggtcccctgaccacaaacctgtcaagcagcaggcgttagaagcagtaaacaaaagtcaggggcctcttagggctgtcaggatagtcgtagggggaggggctggggattgagttaacaaccccacctctgagctgtggcagccacttatatagccaaaatgtcaaacaaaactatatatggggccgggcgtggtggctcacg

SEQ ID NO: 46490 - DNA, 2141 bp, Homo sapiens
ctgtggaggcctccaagatcctccataaccaaaagagctattgtgttccttttacttacaaaggcggttaagtggaccagtgcatttcacaatttccaacaaggcctgagacaaagagggtgtttatattaaccctcaactttccaaaaaattcaatgtaccccattctaagcattttggccacatgtaattttgtcatatatttcatggttttatttttcaaatctggggagcaggattggtgttaaaagagtgccagaacctcaaaattggaactagccttactactttggactggagtgtgtatagaccagtccaaagggtccagaaaatgaaaggaggtacatatggaaaaccttagaacacaagaaagcactttggagcttaggaaggaaggaggccagtgggatccaagaggcttccgggaacaggtcagctatatgagcagtcaagcaaaacctggactttggtctgggatgctagacagagggcaggacctagggcaaccctgctccaccctcaggagacaagggactctctagagccacagcaagaaacctgcagtctgccttccccaggctaggagaaagggccactctccatcttctgttaggagtctcttctcccttcctttaccagttaggtttttttttttctttaatcttttttttctttttttgagacaagctcttgctctgttgcccaggctggagtgcagtggcgcaatccaggctaactgcagctttgacctcccaggttcccagctgttctttctaatccaagaccccactctggcttgaggtcatctcctgagagccctccctgacccctcaggctggaccagaccctcgttaagcgacctcctgaaaacctcttctgtagcccacacccactgtcttgttcccagtgggtttatgtatccttttctccagcagctcggagtgtagcctaattctttgtatcctgagagtcttgcccagtgtctggcacatggtggatacttaataaatgcttgctaatttccatgtactttgaaacatgaaacttagatgtgaaaactgactccgctctatgtgatcccagacaagttacactggcttttcccctaattttcctcatttatgaggtggcctgcaagattaaattaaaataagaatgtatataaagtgcttattcaaagtggtctggtgcacggtgggctctcaaatccttcctgtttctgatcactgcccaccagaggcagaaggttgagaagggctgtccttcctccccttcaatcacacccccactgtttttggtgggacaggggttggggacttccaaaatgagaagcgcagaggggtggactgatgtattacttcagtaacagaggtgctgggtcagccaggcaacaacacaggagacgcctgtatgccattacctgtgctaggggaaatagaaaatagaattttccagcagatcagggtccagctgaaccaatttcctaagctcagttacagagcaacaatcttcacaggcccaagagggaggtgcaagctcctggggcagactgcctggtcattgcccctccccgtcccgccccataggctgtgcctcctgtggtgtccctgtggccattctatcttctctgggcttcagcttgcttacttgaatacatactgtaaagagtacctgaaataaggcaggtaggtaaagctgccttcctcaataaatgctaaggtcaggagacctgttcactttttatagacatcttgcctaatgtttctactctattggagcctcaccaaacactcattttgcagatgaggaaaggaaggcaaagttaagttacatggcttgatgggtaaatggccgagccagatggcaaaaccagcctgtgccctctctcataaaatgaggataatagcacccacaatgcccaacacagagtaggtgtgctgtaaatgttaacttcccttgtgtgagtctgcaatttaggaagaggttgggagaatgagtcaccaaagatcttgcttgagagcaagggttcaagatggttctgaagacaggaaagaggacgatcacgtggtcccaggctggcgggtcactgagcacttgaaagtcagcctgcacctcacttcaaccacagcggagggaaggaa

SEQ ID NO: 46491 - DNA, 1094 bp, Homo sapiens
tgtgaaggggtcttcctttcagcgccccctaaagctcaagccagcttcagatgtatatgggggtacaggcggcgactgacctctaggatcttgtccaggccctcctgacccaggcacgggaactccttgagcagatgcagcttctgtgtgtagtagtttttcttggcctccttccagtgtggctcctccagcacttcgaagatcgccgccccgatggccaggtagaagatgatggccgaggtgagcagagggccccggtccaccatggctcccgagcggccgcctcctagagaaagcctctcctagccccagctgctaccagtccgcccgccctccagcctctgaaaacagctgtttgaatttggagctccgcatgcgcagtgcccggtactcaccccccgcaagcaccgctccccggacagagttgcttggccaagttggcccacggagtgcggggagctgcgtggggccccactcacgcggcccggggtgggcgaacaccagcggggctgaaagggcgccctggaccgcggatgcgtaaggagcgggaagaacacaggacttgactctgggcagacacgtgggccgcttctccacgcgtcgctcctccgcgcgccactagcagtatgcgccgcgcccgcctccgcacgcctctttaaccagcgcccggcgcgctctgcccccttgctccgggctccgaccggggaggagcccaggcgggccccgccccttccccgcacaagcagcccggcgagcgcaggagtgagcgcgaggtgagcgctagaagaggcttggcgctccccgcgctcccagggtcagccgccaggggaggctgcgccgcccgcccagacctgcacgccctgcggtgcccgaggggttgcggtctcagggactcgtgtttgttattaggactggcgtgttaactaaaatgattgtgactgaggtcaggagtttattgcttttgttatttttattgtaattccattttcatttactgatgtttcttccaaaaaagtctaatgctcagtctctccgtgtctctcttccacacactttcttgtaagcctgaggaagggggttagaacggggctgaa

SEQ ID NO: 46492 - DNA, 3220 bp, Homo sapiens
ccaccacacccgacctaagtgggtttcaatatgcactgtttatggctaagcagagggtcctggcaccacctatttccccagcacctgtagcattttgtaacttatccagagggcttgtttctcgtgcccgaagttcaggtggccttctccttgggagcactttcgagggtggagggtgtggcagcagctgggtcactggcagtgcggtgagggaaaacaagggtctggagctgggcagttccgactccaccacacgctggctgtgccagctgggcaggtctctgcccctttcaggccccaatgcctttctcctgaaagatggggataataacagtagctacctcattgggttcataagaggactaggtgataaaatgtttgtgaagtgccaggtagagtaacctagaatcataatttttatgattatctccaaacaccgttgccatcagcagtaggaaacactgctgccattggcagtaggaaaaactgggcaggacccctcctgagcagcccatgccaggacctcaggctacagtgaccccaggagttgccttggcaggagaagggtatccaggcagctgtgctctcaccactggctggggctggaatgttccgagtgcttgcataagaaccaggatggggatccaggtagctcagtgtttgcaaagcatagctttccctgggccacagaagctaccagccctcatggtgatgaaatgtgcccactgtgggtggagcaggtcagccactgccatggctgccttgcccgcctcgccccactggagtagcacagaacagtatgtcttgctctgggtttcagcctggcccaaagcccagggtccaggtacaagggtggagggtcaggcagagggagtgaggcagcagaccccggcatgagcattcgctctgctgctggcaagcagggtggccttggccggtccttcccctcaaaagagcttgttttcaagtgatttctaagccccctttagcttggagaagtttcgtcctctcacactcctagggaaaggcagccaggtcagtgtcccgtagcatttcatggcccccaatctctggttctgccaagaaaactaaaagtttgggttctggttttccttcttccttccttcattcaggttttcctaagggctgagcacattctgttgcaggaagcacctgttcttgaggcttcagggtccaagtgagaagaaaagacaaaagaccccacataccccaagtcagtcaggtgacagcaagtacccagaagggctgagacagagggtgtgaggacagctctgaggaggacatcaggggctgccagagagcggggtgtggcacgcaggagggaagagagggcgttccaggtgggagcctgcaagagcccaaaccggatgtggttgagtcaggaagggcaggagtcagaggcttggacagcaaatcactggccctgagatcaccccaggctttcaccactgtgcattggcccctgcatggatctagggccagccctgctgcaggggctccctggggactgggcgtcccctggcccagacccaccccattgcctctgtccgtacaggagctgcctgtgaccagctgagagcagcaacctctggggacaaggctatgtggctgccaaggctgtggcagtagctgactctcactcatcactctccctttcagttttctttccgggttcacttcaggagctgtgattttcctacggctgagtcacccagggaagggcaataataaagggtgattaacagtgtttcagttcctaggatttcccatctcagtttatatgaatttggagcaaagccacagaagtacaggtggtgagggaggcaagggcctttgcagggacctaaggagaccactcccctcagactagggttccctgaggagagggctgcgtctcccctcagactggggctccctgaggacggggctgcgtctcccctcagactagggttccctgaggagagggctgcgtctcccctcagactggggctccctgaggacggggctgcgtctcccctcagactagggttccctgaggagagggctgcgtctcccctcagactagggttccctgaggagagggctgcgtctcccctcagactggggctccctgaggacggggctgcgtctcccctcagactagggccctgaggacggggctgtatcttcgttctatcccttctactggggcttcctgaggagtgggtacagctctctttcttctgtaccaggtccactgtagccatgggccattgggtacctctgcagaggtcctattgggcccacggactagagcagagcagatggcctgggtccgcctggtagggtctctcctcacaccaggaaaagatgacgacacagaaagtccctcatttctcccccgtgcttgtgcttgctcttcgttcctttctccttctctcagtcagaccacaaagggctacagccctttcctgcatctctcactgcccctcccactacctgtccactcccacccagccctttggtcactgttctgacccagagccaccctggtactcattgaccagggggcaaaggtgccagaactgggcactgccagcaaaaccagagcccaagtcaactgtgcaaggaggggcttctctcctgtctcctctccactgctggctgactaaagtccacctggactctccttggctgcaatccccaatgggagctgccggctagagagaactgacttgcgctgccatggcaggataggtgacaggaacgacctgctgggagcctagaccagctccaggagaggtcaccttccaccagtgaaagacactaccaacacttccaccacctctcagtgctgtgggtgaccgggagctgctccttgaggtgacacctgtgtggcctgggggccccttccacacactgctgttcgttcccagcagcagatcctgttgcagagccatcctcgggactgcgggtgttaacgaagcctgtgatcttcctcagacttttccaccagagaggcacctgaaggagccacaccacattcccctgaaggcttgtgtgtgggcgtgggcttggctcaaaacagccaacccagagcaccagtgggatcgcaagtcttccgtttattgaatatccacacaggcatcttacattctacttcatcatactgtttaatgtgaaaataatattttcctcacattctttgagccaaattgct

SEQ ID NO: 46493 - DNA, 1503 bp, Homo sapiens
cctgggactgaacccgggcccaccagcacaacatggactgcactgcttggtggggccttttacatgaatctgcttccctactagatggcagggatcacattttatccacttctgtgtctctaagttttgcactgaggaattagacattgggggtacagggaaaagatgagttaaacacagcccctgcacctagggagcacctagtcacatgggggaggcattgtttctgatgccgtgaagcccccagtctgatggaggagttccttgtggggaacatgatctgtcccttcctgcctgacttctctgcagggctgacaacacagcttgggggagcttctgttccttcccttctgccactgtccccacaggcaagggcgacggggtcttcctggcctcctgcctgggtctctaccctcttgccatcactcagagcaagtcactccctagtcagggtggctgaattgattcttccatgactttaattcagtactttgagccccactcccccagcaggctgcagggaaacagtaaaagattgatgaactgggtgttgggatcagtcctgtccttgctgggcacagatggcactttccaagggcccgttgaagagcatgtaatgaagaaactatgtgtagagtgtgggcaggtccacgtgcatgacacggtatgactcccagggatcagcaacagtggggagtcattactactctggggctgaagggcaagggtgatgctattacatcacccagctgatgccacgaccctgggagtgcagccactcccaaagccagggcctgcagagagagggctgatacaaccctaacttctctctcctcctaccttccatcatggcccctctcaggcctgatcaaactggaagtcaaagacggaaggagcctggtgacacagcgcatggagttcaggggttcagagaaagtcagagagtggatggagagagggagccaagacagagtaacaactagagagtggtgctgaggactcacgcccacccctctgctctggccccgagcccccaagccaagagcctgacccttagaggcctcagccagtgggctggttgggagctgccctctccaaaacagagctttgaaaaatatattccttccatccccacatcattttctgcccctcccaagcccattggaggctaaaagacaggcaagtccagggggacttcttggaggaaaaggtacagttgggcttcatgagcttcctgatgaaagagggtggagaaggagaaggttgagaccaagaggaagaaaaaaaggaggggcacaagtatttttgagccctattaagtataaggtaggacatggatgctttctcatctgttaccaactcccccacctcccttcctccacacttatcaaaacaatcccgaggttgttctcaggattttcattttatggatggagagactgaggctcagagaggttatgtgacttctcagatgtcacacagcaagggatagagtcagaatat

SEQ ID NO: 46494 - DNA, 725 bp, Homo sapiens
tctcacttatgtgagaatctgaaatagttgaactcatagaaatagaggctagaatggtggttaccaggggtgggaggtcaggagagggagatgttggtcaaagggtacaaagtttcaattagataggaggaatgtttttgagatctattgcacagcagtgtgaacacaaggagtaataatggacatttcaaaattgctgggagtaaatttcaaatgtctcaccacaaaaaaaatcatgggtgaggcaatgaatatgttaattagcttgatttaaacattctacattgtatacacatatcacaacatcacaatgtacccccaaaatatatacaattatggcttttcaattagaaataatattaagagaagcaaacaaaaataccaaaaatggttgagtaatgaatggcaaatttcctctctctgcttgagctgggacatcgatctcctgcccttggacgttggcactctggcactcaggcctttggactcagactgggacttacttttttggctgccctggttcccaggcctgcaggattggactagaactacagctagactttcctgggcccgcagcttgcagatggcagatcataggatttctcagcctccacactgagtgagccaattccttccaaaaaatctctctccatatatcaatatatttcctattggttctgcttatctggacaaccctgaccaatacacagggtgaatgctctttt

SEQ ID NO: 46495 - DNA, 2644 bp, Homo sapiens
acgtttcctgtaaacttggaaaaaaaacaaaatgtcactggtgtttttgtgaatttcagatgggattagctttattgaatcccctgggggagaagttccagtgcaataactgagattgcctaatttacagaatagaagaatatcacagaacaaatgtcactaaaatttttataactgaggattttcttactgctttattttgaaataatgataaatttacaggaagtcataaagagagtatagaatagttctctggaccccatttgccccagtggttacatattgcataactgtagtacattttcaaaaccaggaaattgacattggtagaatgtatgtgtatagttctatgccgttttctcacatgtgtagaattaagcaatcaccactgccatcaaaatacagaactattctatcactatagaaatctactggtgttaacattttaccagtttgaatgaagtgtagaaaccttacttcccttagggcccccttctctttaaaacacataggggtggagtcacgggtttttccatggtatctggacggagtaaggcaactagtatctacaagttttctgtcttgctaggctgccagtcccctggccctcttgctagagacagtagactcttcttgaggattttgtctgagcccactggtgtttctgggtgtctggtttctccagcatccaatctgggcagggtggttaagtgtccccgctctgtgcagatatatgaggggaaaaatccaaggggattcaccattctgtcacttctcaggtcctgaggtctctagctaggctatcttctcttcaactttcagagtcatgtttctttgtatatgacgtccagagtctttagctgtacttagtaaggggaatagagagaagtgtgtctactctatcttggtctggaaccagaggtcactaagcatgttttttgagtggcaaagaaattaaagatttctaattttttcatcccttacattgaatagggcactgacgcttgtaaagcacattgtttcttttcatctttaaaacaaccttgtaaacttggtgttattagcatcccctttctcagaagggataactgattcagaagtgatatgtctgattcagagtcacatagggagttagtcacagggctagggccagaattggattatttgacttgatgccaaatattttgagccagaaaaggtaaaaccatgagtacacagaagtgaataactaagatttttttaatcctcttttgtgagcctttttctccctattctgtcctccttgtcttgaaagagcaggatctcttctctggttggattagcagaactgggtgtgctaggcaacccacggcattatcagcaaagcctgtttcctaaagagcaacaggcaaaagtcctgctgggcaatgaccttggcacaactgagagtgtggtactgccccctgccatgagaaaatcccctgcatcaagccttggcctcccacccagcaagagctcatgtgcaaaagttgtcaagcacatccttctccaaacctgagagggtagcgtccctttacagtaagaagagagtgaaggaaaagagaaatcttcttactataaattgaaaggctgctcctgataatgttcatcactggtgaaatcaaaggttaaccagtggtggctcataatgactaatagctttccaaaagccaacctcattggccttattgtagtgtaggtgccttagctgttcagcaccagctactgggactgtgtcatagcatagccagtcctcctgccagtgcacattctattcattttggtcaaaccatcatgctcttacaaaacattgaatttccaaatttttgcaaaattactcactgcacataaagtaaatttcctacaccccaagcttttaggtaaaacatagattggctctattagaaaactggaattctgcaaacttgcagatgtgtgctaagacctcacaaatgtctagacttcatagttttcctccctaagtctttgaatgaaatgggcactcaaggataatgtactatttttgcttgaagcttcaggtattctctgatagcctaccacatattccagagattgatgcacttcagtttgagaagcacaacactagataaaaaaaaaaaaacaaataaaacaagacgctcttttgtatactgcaataccatagacatttgtagacttcttaaatcttacctttataaaaaaattcatccagaaattaatgagcaaaattcagatgacaaaaggcagttttgacaatgttactaatcaacccaaatagatttcaaagacacctgagattagaagaggcatcatgatgaagcacttcctagtggaaatgtactaaataataaataaccacaaagattattttactttatttccaataatacaaagttcaagctttactatttctccccatacatgcagtcctatacagctttggtccctgccatttttggcaccagggactggttttgtggaagacaatttttccaccaaataattgtgtgttgtcggagggatggttttgggatgaaactgttccgccccagatcatcaggcattagttagattctcataaggagtgtgtaacctagattgctcgcatgcacagttcacaataggg

SEQ ID NO: 46496 - DNA, 1257 bp, Homo sapiens
gagaataacaacagtcaactaattactgaggccccactgggtgcaaagtactacatatgtgtatgctttgtgcatttgtgtctatctatatttgtattatttcagaggtacataaacacgcatctcttgcttgcacgttttgcccgagtgccaaaatgtacctttgagtgtatctgcatgtgcggtgctgcgtgagtttcccagaaaggtgcaataagtgcttatgtgtagttgaagcgcacactatacaggcatactgaacatgcactagtctgcccccgcgtgaacacgtgtgcctgggtgcaaaaaaaatggctctctgccgggtctgcgctgtgccaggtaggagtggcctggctgtcggtcgcgtagctgacagcagtgcgcgggggtcttcgcggctgcagggctcctcggtcagtgtgtgcgggattccgggcggcctcggcgcccaccagcaagcccctcacctccgcccagccccttcgcgtgccgccgcccgaccccagcccaagaggccccgccgcgccggcgccccggaggctccagcccgtaccccttgttggtgcttccggacagggggcttcaccctcgcgaatatctggatagtctgcttcaccatctcctccctggctctgcaatgacccttgacctctctcaggcccgggctgccaaaactaactcccaccacctccggcgacccacagtcttagcaacagtagctagggacactacccagtgagcaccttggcagccaggatcccgcctcctccctctaattggtcgcgaccggaaggaggccactacggggcggggctagggaggggagggcgggggtggagaggagagcgctgcgcatgcgcatgagcgagtgtctgggctctgggtttagcgccggacccggcctggaccgtgtggttaaaggggaacaaccaccatgccttgccccgccccgctcattcacccattttattctccatgcccttgcctttaaaaaaaaatacagcactgggccgggcgtggtggctcatgcttgtaatcccagcagtttttgggaagccgaggtggtaggatcgcttagagcccaggaatttgagaccagcctgggcagcatagtgagactccgtctctacaaaaaatacaaaagttagccaagcgtggtggcgcgcctgtatcccagctactcgggaggttgaggcaggaggatcgcttgagcccgggaggtcgaagctgtagtgagccaagattgcagaactg

SEQ ID NO: 46497 - DNA, 452 bp, Homo sapiens
caaatagaaaaataggcaaaagacatgaccaggaattacacagtaaaatatattttatatatatgtatagctaattaacatgtgaagagatgccaacttcattcttaaacatgaaaatacaaattaagaccacaatgaaatataattttacacttgttcaactggcaaatatcaagaataatactgagtgttgggaggtcatttggcaggatctcttacatagggcgggtgaaagtgtatttggcacaaccatgttattaagtaatgccacattgttttccagagttaaacattcacctattttatgatccagcaattccaccgctagagaaactgtataccaagatatgttaatgaaaacagtgtttaaagtggcaccgtccacaacaaaaaagctagaaccaattcaaatgctcactaaaaggagaaaatagggtacattcacataatgt

SEQ ID NO: 46498 - DNA, 1241 bp, Homo sapiens
gagggagcagtgatcttatgaatcccaggacaggaagcctagttctgggagacggggaaaaaaacgcctagataggtaccgaaaagaggtttcactaaatgaaaagaggtacttttccccccaaattattccctaaccacctgagcagaagaacaaccaaaacctaaaacttttaatgacttgaaacactctgaggggtgctggcaaggactgagggatcttacccaaaaccctaaagacagaggaattaatttctcacctggaagaagccacgtcctgccctgttctgctctaggataaggctgaaccctcccaaggttaataaaaaagacaaggagagtcagcaaaggatgggttacagagccctgggactacagtaacaactcatcgttggtgacaccgaggtgacatgtttagtcagtcgcactatgaagcaggtgtcacagggacacctgatctctcagctcttgggatagggagggaaaatgtttaagaaagagggtgggtgcaaggcaaggctgaaaggtactaagacacctcactggacccaaagtcccagtcctctgcttacccgaatttctggccaagctcagggctagaaggggtggcgtggctggggggcagggaggttctgaagcgggactcccaggaacctctcccgctgggctagcgggtgagaccgggcggtccatctggagaacatcgctccactgaggagtgccaacgggtccctcccagaagcggtcaagcagataggccgggagctactgggggaaaagggcagtgtgccggggccactcctgccccgggaagctgtggacgcaggcggggtgggctcacctccgaggcagctcgcgcggactccccggggcagggctgggtcaccggagcccctgagctgcagctccgggcgctggacctcagaagccgccgcagcatccgggacagtggccgcgccgccatgaagcctgatacgagcggaaccgcagcccgcttcgggagcacactggccgggcactcgcccccggggtcatcccagcaagggcggggaggggcagggggagggcgggacccgcgcagccaataggcgaggacgcagtcccgcgtggccttgtgggagctgtagtacgctccctgtgcccactttcctgggccggggtagcgctctagggcagaagggtaaactcaggtaaggaacggggttcttttccttccagtttttctggctgctctagtctcag

SEQ ID NO: 46499 - DNA, 761 bp, Homo sapiens
cataagctaatgcagtaaaaactcacttgtcacctaggggataacaccaacctattcctgagggatttgttcccttagcccaaacacctcccaccaggcaccaccctccaacactggggatcaaatttcaacatgagatctgtagaggacaaacatccaaactatatccaagagttagctgtgaactttgtttctggtcagtgttgccctcactctgggtcccggcctgatagggcagcgaatatccacatagaacattggtggttaccaagagggaaaaagagtgtggcaaacagcaaactggctcttacagcttcttcctggaagtgtcacacatcactctgctttaagcaagtcacatggctgtatctaatttcaaagggaagagcagcttagtcctctctcagagagggaacgcacatgctggcgaacagtaaaataaccttactccaggaacaaacttccccttgctctcttatgtatcatccagtttttccattcaactcttccacttctttgcacctatcactccccttgcatactgaaaccagccatggcagccttatgcatctgcatgtatcatgcataccctcagagccatgaggtgctgactaggagtctcttgtttagattctgtcatcagcaaaactaagagaagagtttgtaatacctctttaattcgattgttttcaaagtgtggatttcagaggtcaacactagtttcatagtaatattaagaaatcgtgccaggcgcggtggct

SEQ ID NO: 46500 - DNA, 1097 bp, Homo sapiens
tgcctctgcattacaaaagaaggaagacctcacagtgcagctggagactgtgctcaggagatccacaatgctaccaagcttcagctcagtgtttagtactgccagcctcttccagtgctctctgtttcactctttccccaggcacaccttgtttttcttctacctttgacctctggagaaagggatgggtgtagggagggagggaggggggagtagctcttgcctgctgtttccatgctcattgcaggaccgtgctgctgcgctcctatacagtaaccaccatttcctgacttggtctaaggttcattgctcacctttagggcaaatgttttcttcaactcctggtgtatggtgcacgatcaataaactgaggaacaatgatggtacagatattaggttgctacaaaagtaattgtggctttttgccactttcaatgacaagaactgcaattaattctgcaccaacctaatatatgcaagaaaagtcaagtcactgggttctctattttaacatagagtgtacagagtgcagttgtggaatggaatgaaacatgacctaacaaggcactgactacataccttcttatgctttcgaaacaaagggtcaaagggtagagcacggtgataaaatctgcacctctgcctgctcctgccgttaattctacctcccatttcaggaagagaatgtggggctgagaaaagttatctattgctcaattggacctctccagtttctgtgagacaatgtcctgtaagtacatcgcattatcatccactcattatgctaaagtctctatcatgcctgccttgagttacatttcgaaaggtcccctgctgtgaccttagccatgtgacttggtgaggtagttaaggggttctgcctgtggcagatactaggctgatgccctaccccacacttcctgagctttccagagttcaaggcagttgcactgatagctccagcatgctaaactcttcccacctgcactgagggtgttctcagagccacaggagcttgctgggcaaactgtgaggggatgggtgttgtcaggaaggatgctccagccacagccgtctatcaacaaggcatcgagtca

SEQ ID NO: 46501 - DNA, 1036 bp, Homo sapiens
ggacactattgccatcctatgtttataccaagatgacgaacagagccaggaagcacggatgtactgttttagatgaaggccacagaggctgatatgtgagcactgcttgcaggttacaaagccttattcccatgtagggaactatgttcatgtgcatggcagtggaagactggggtcaaagagacagtcactgagagaccaagcagagaatgggacatttctgtcttttatagaagctgtgcagtgggtggcggggaagaggggtgttgatcctgtgagatgatttccaaaggttcccactaggtggaagtgttggttagtacatgagtcagcaaaggtttctcaatgaaccaatttttttttttttttttttttttttttaagggctgaatgggaaatgccactgtcacagataagaagatgggggtggggagtaaggggtagggttggtggtcagggaggcagtaacttggttcaagatcaccaaggaatagcactgtcccatcctcccttgcctcagacttctaaggacaaggcaatgagctcagattctgcttccagttatttttaacttctaatctctacttctaccactgaaaacaagaagtgccagtctaagacctattagttgttttgatggaatagagaggttaagggtcttagacggtaaaccctgtggctccccatcgcctgtgagataaagttgaaatgccgtaacatggcttgtgagacattttcctgctgcagaatttccttacttttactagtctgttacttgaagctccttaaattctcccatgatgctttttgggttctgaaaacctatgcctttaataggtattgcttctttgggaagcatcacctgacctatttatggagatttgatcaccgttgactttgtggcattcctttacctaatctgtactgtgaaggatttaggtcagaggttgtatgatggccagggacccagaaccaccacacatcttctctactaaatcagtcaggactctgttgcttgtgacagaaatccaattaa

SEQ ID NO: 46502 - DNA, 665 bp, Homo sapiens
acacgaaggcacgagatcggtgctgggaagagggagagagaaaaggttcctgttctcaagattttcctggtttaatagcagtagtgttttctcggctatgtgcagggcacagttctgagcactgcttatgggctgactgcgtaatttgcacaataatctctgcaacaagagtgctactgctgtccccattccacagaagacaaaaacaaggcttcttttatcagctagcagaaccggggttgaatccagccagcgtgctccgcagctagtcacaacactacagtttggcctttacccagtgagcaaaaaggtcatttcaagcaatggtgtgtgtatgcgtcaccattccaagtgccaaattcagtctcttctatagttttccttgaagaggccacagaacaaaccttagcaaagacagaaaatgacaacttttgcctcctcccagttctgatctgccctgtactggtttcctagcttatgctcccaggaaggcgtgaccttacctggatcttgtgaatgagtacctgtctttagcacaccagttctccacacctgcatgacgttctctcccctgccctggagctctgggggttccaccatggcagcattctccatatctgactcccactctctgtccactgtgagggctaggccagctcttcccc

SEQ ID NO: 46503 - DNA, 956 bp, Homo sapiens
caatatacacttggctaaagatagagtgattatgtgagtgattaaggagaaaggtaccatagtatatttgaccagggcttgaaaatcatatgacataaattattttactcattaatgatcagttaatgatgctgtttttaaaataattaaagcaagagcaccttaaggcatttgaaactacgtgcttatgttctaaatttggggccaagttcagtttgtagtttgggtcatatagaggagacagaggaacctcctgctgccagacataacaataatcatagctataatagctattatcatatgtgttactaactgaaaatgtcttaaacacacaaactcatgtaatcctacaaagtgactgttattattcccatttatggaggagaaaatggagtctcagagaggttaagtaaactgcccaaggtcacaccgctgattaaggccagagtgggaattcaaacccaggtttcttccgccagagtttaaacacttaacacctacagcatatcctagtttttacaaaagagctatcttaaagcttcaattttctgttgtcaacctttgaactctaacaaggttaaaatcacatgtcctccctaactccagccctttgtccccactggcggcctgccgaagtggagctgcatagctgggtgagggcaaccagactgaacacaggaatgcctggattctcagacactgtagatgcccatgggaagagggagcactcaacagagtcgctcaatgagaggcacaccttctcccagctctttaacatgaggaggaggctgaaccagctgaccctaaagccctccagtgcttaggtcctgatgcctctggcctgccctgccacggctgtccttgtggagctaaggtggaccctcttagctaagggagtcaaagtggagggagtcaaagccagtgactcggctccttccataggctaagggctccag

SEQ ID NO: 46504 - DNA, 890 bp, Homo sapiens
cccccgtactccccgcatgcacactgccccccacgcgcgcgcgcatacgcgcgtacccggtttctctctccgctccacacacacacacacacacacacgcacacacacacacacacggatcacacgctccaatctgggagggagtcgggcgggctgcggagacagcgcagggccagcagtggagaaaacccagcggccagaggcgcccaggaacccggcggccgtgcgcaccgtccccgccgagctctccggcgcggcagcccccagtggcgaaccgcggagctgcaggagccgaaggcagcctctgcgcccgctgccctgcccgctgccgagcgcacccgcttccgagacgaccaacaccgccgcggaaaccagagggattcacggtcctggcaggggtggcgcggggacgcacggtggggcgggagtgggctggggccgcagtcgcggagggaggtgggcaggccgcgagccccggaaccgggagggcggtctccgcggtccagcggcacgggcagcccctgcggaaggcgagccgggcggccagggctgcacctctgcagctggcgacggcgctgccacctcacgtgcctagcgcgccctgcagccgtcagcccgccgcctgctggaggaaaacccgaccgcgccggccctaggctgggagtgggggctggggcgatcgcgcccacccagtcctggggcccagttcagattctcgaatcctggtaagggacctatgaataacgagcgccccgtgcacgcacacacacgcactttgacttttcatgattattacaagaatcagtgaagggtgcagtggcgccaagtgtttgcacagcatctttacaactcttcacttgtttgatcttctcagcaaccctcatttgatg

SEQ ID NO: 46505 - DNA, 894 bp, Homo sapiens
ctggtggagggcgtgtcttcccagggtgccaagggggtgggttccagaaggccttaggcctggttcttcatgggaaaggcttagctctgaaaggcagaacacccacagataagaggaaagaagagtgggtcaagtgaaggattttcaaatgaaaggagacttgaagcagtggagagagtgggagggagatggggagtgttagagacagtgatagcaggtgggtgtgctcagggccagtgtttgaaataagcaggcgtggcccttggttggctgtccatgccccaggtgcaactacactcactgtttgcagagcttggccctgtgtgtcattatttgcagagcttggagctgtttgcaaagcttgtcattgcctgtgtcaccatttgtagaccgtggcactgtttgtcattctgtggagtttagttttatttgcagagcttggtattattgggagaggctagtactgtttgtgtcactgtttgcagtacttgtccctgtgtctgttggtgttatgatgtcgacagagcccattcctccctatttctctgtttgctgagcctgtcaatgctgatgttactgtctctgtggatgttcggggtctgtcacagtcagaggtatggtctgcagtgcccttcacttcctgggtccctgtgtgcagagcctgtcatggctggagttatggtgtctgtgctgtcagtgtcacaaatgcagaggcagtctctctgtgcaactctgtgctgaggcttctcactgttagtgtcgctgtctgcgtcatgatttgcagaacccattgctgcctgtgcctctgttgacagggtctctcactgtctatgacacaacagtgaaacatgatatcacagaggaatattcttcacaaccatatctgaagcctat

SEQ ID NO: 46506 - DNA, 1311 bp, Homo sapiens
tctgccagtaagtagactgggctgtacaggagaggctggagacccaggagagtcaggataagctgtttttctgcccctctcatcaccttcctctcctgcatgacaataatgcttcttataggacagaacttgtgagaacagttgctgctcgggtcttaatcctgttctctcagctcagagcattcctcaggcaggggaggcctcagtgtgtaatccaggagctccgacctcagctgtttgctcccctcttgggaaaggtgctgaatgggcaaactcctatttccctcagcctttgttggtctccaagacacatcacagcccatccttacactccatgatacctgccgatccctgcttaaaatcctcccacgttaactttaaatacagttaaatcttttgaaatgagcaattttctgcaaaggtcactgtaatgctcagagttctatgctgccaggagacccttggaaggcaatgaggcagtcccagagtggggagggagggaagtggagagaaatgagaagaccacagcccctgcaacacccccacctgggcctcctccccgcagatgaacatcctacacaaacaaagccgtgggttgtcaggcttgagaacaaccccagagattgcccaagcctctgtttcacagatgagaaaacagaagtccagagagatgacataacttgtctggggatgcacaaccagtcagggtcagagctgaggcctgaacctccttgcccctatcccaatgttctttaaatattaactttaaaaacacagcaatactggtccttaattctggaaggtgattatttatacacagcccatgtccaggctgttgcctctgcttggaatgccctctcctcaacactgtccccaacatttctctctggcaagcttgtattcatactccaaagtccaactggcatatcacctgctccctgatttctctctccacccaccccctcaacttcaacagactgaattactccttgtctgggtctcctccacacccttcatatgcctctgctgggcacataacgacttacatgtctgtttctttccctgggccatgggctccttccaagaggggaattacagcagagtctagcccagtgtgtagtccaattgacattgctaattggggatcagttgcccatgtccatgaatgtgtggagggaaggaataggtggagaaggagcctcaggactcaaggtcaacttgctagaaatatggcttgggctggagatggtaattctgggtatgcggctttctctccagatatatttgtgtctatgaagaccccaagtgcta

SEQ ID NO: 46507 - DNA, 1303 bp, Homo sapiens
tgccccagtagcactcagatcccaccctccagagccattcctcctcccaggacctgtgctcttcctccaagaatgtctctagctgacattcttggcatggcaactgggcacaaagtatgcctaccccctgggatggcccacaccaggcaaacaaagcagggagaggttgtcattttctcttgttatataagttcctacacaattgcctctggtcctcaaagcctaaaatgtttgctaatccctactctatatcatgactttcagaggctggaccaaaggtcaagacccctgccagggatcttaggccccagggtggctcctgtgatacgtgggagggggccaggcaggcaaaacaccaaaaaccgagacaacatggtacccacattctagtgctttctgagactggcactagaagctaggtttcctgccaagatttgacacttggcatgcccctggagatgacatcagccccgggggcgggggttgatgtccctgagattgcatcagccccaggggacaatgtgagctccctaatgacctgccactgaagggcgagtgaagagacccttcaccagggcagcctgcttactcaactatgcattgccagaaaggtggctggcatggggcagacagaatcatttcattccctggtcaggagttttcctggtggaggaccagttgtaaaatatgggtgtatgagggatccacagaaaatgtagccacatagggatggaactgtctaacacgtgtgatgtcggtaaactcaatgagcggaggatggcagaatggttctgctctgttaatagctccaaggtggaaggaaaatgtggatgtgtgttctgaagtaggagccttggaaaaaagctggcccaaaagaggagctcctcttcttgtgcgacaggacaggagggtgaaggagagtacagagacccaccaaactgacgagctgggaatttaaagtcattaacttggagaggtctaagatgattgggcattacctctgtctgcagagtagggttgaagatggagggcagagaaaggtggaggcaggagtggggaaaaaaagggaaaggagtagggtagtcagtgcaggaggtgcttagagcacatttgcagcttagcataaagactagagcctcttgaagagggcttaaaaaggtcagaggacagcattcagattcgtgtcttccggctaaatgaagttgtatgggccattctcagaaaatgttgggtattgtggtcccaggctgagaaagtatccagaaggtcaaggtgccccatgaccagggttcaggtttggcaa

SEQ ID NO: 46508 - DNA, 1364 bp, Homo sapiens
aataatatttttatactattgggttaagtttaataaattattaacattaattttacctgctttgtttttgcccttttttccctattatttgtttaatgtggctactagacagttttttattgcatacatggttcatgtttgtggctcacattatatttccattgaatagcactggtctagacagaaaaccagttccctaagttatggaaaagtccaaatttatcaacattatcagcaccttttgttccaattggtcttgcccatcatgttcccaataatggccccattaggtaaagaagcctgtggtgaatgcctttatggcacattgtgaaggtggtgccctgtgattcaggaaggcgatgactaatgaactagggctctgccatgtacttgccaagtgacctcagaaacatcaccggcacattgctttccttccttgtctgtaaaaatgtgaaggaaattaatcatataatattccatctttctggctctgggtgcctccttccagaagtatttgcacttttaaaacggagtctctagaaggcaatgctcaacccaaattaagaaatgccaaatggcaaaacttcaggccccagtggaggaggagttttggagtagagaagatcctcccgggtccctgcaaatcacagctcagattctatgtgaacctgataaacatataggaactcacaggacagactgaccctgtgagaagtagtaggctgggatggagattccagatgggtcttcatttgtaccaccaagcacatgctgtcgatttaagctgcatggtcaggctattatttcatgagcacatcctcctctggcagacacacacacacttccataagtgcaaacatccacatgcacacacaatgagacagcagaaagtgcttaaaaaagcagcctcccagtccaagaggaaagtatccctcacttagagagacagagggccaggaagaggtctccaggagcctcaggaagcaggtggcacgctgccaggtcatgcataggagcctgatccaaggccagtgaggcagagcagcagaagccgcagggcatccagagacaaacaaataatgagctggcagctccaagagaagtggcaaagctaactgcatacctgacaatggtaagcagttaggcaaaatggagagttccagcagggaaaaacctacagttattacagtgggcctggctctgaaaagtgaggggaaagggcacttaagaaaggagagattcttccccaaaaatagcagctgtgagatggagaagggatgggtgcccacatttgtgcattcacttcattcgacgccatgtggacaaacagatcatttacaatgctttgaacacagacagataaa

SEQ ID NO: 46509 - DNA, 6937 bp, Homo sapiens
ttttgcttaagccttgctcaagtagcagaataagcaagtttgactaaaattctctagattcacaaatcccaaagccctaaactacagaaaacagactagtcaagagagaggaagctgtctgctggctatttgtggagcatcacccaatcaatgaacaagtatgcatagactgctgggtgcagagggaggggtgtttaagggatgtcttaatcgggttttccagaagcagatcctgagacaaggatttggttgcaagtagttatttagaaagtgaacccaggaagcaccagtaggagaatgaggaagcaagacaggtaatgaatgtattagtgaactgatcaccactgtgagcaattaggctcaattctactctaggaggctgtacagaatgtatctcagggttgtcccaccaaggggcaaggaaactgaggtacttatccactaactctcttttgttgttgagtgttcttcccacaaaccttaacttccaggcacttccagtttgtccctttattaagctgaccaatctcctgaggccagagaaagccttccagcagagaccagcaggtgtttccagtaggacactgtctgtgtgtactgaaaccagagtgtcatagggaattagaaggacgcagcaccaaccataatgggtttcacaggaactgcctggtctccacaaatagggactctaattttggtctggattctaagaaccaccttcaccccagtaaataggactgagatgacttttatcattcctgtaagcagagatagaaatgccagagcaaagtctcattggtccacacagaaagaaggaagcctcggtgctctttaattggagaccagagctgtggcaattcccaaccagtgtcagaattttgcaatgtgttggagacaggcagccctccctaggaatctactgagagacccagatctttgggcccttagtgagtgtttgagtaaataggtaagcagtggctgcggctcaggcaggagggtcctggaagttaatgtcccagcacagagcttcagcccagaccacagtgccaacatcctagcccttctggttaataattatccctaattccttagcgtgggaggcctggagatgaaaatcacaactctccatgtcctcatcagtctgttgtatgtgcatgtgtaccagatacctacatgcaacctcatgaaattccagacattctcatcaacaaatccctttgtcatcttcataaaatccaaagttaaagggcccaccctaagaattgtgactcatagattcctggatggatcaactctatgtgactattagagctagttttctcatgcccatattgggcaaaacctggtaaacagcacccctgtctctccctccccaaaattctgtctggatgagcagtcccttatgtaacaagctaaaacctttacaactgaccatatgtcaggaaacagtaaggtgtttacaagatacatgagaggggagtccctgtctttcaagagctcctgagtcctgccaatgaacaccttaagtacctgccctttaggggatacttgctgaaatcattccttgaatagaatgttagaatggcagaatgacagtggctgccaccgataggtcagagcattaaggactgggtcttttgaccgaccctaggatctctcttcagtggaactctgcccccaccaaccctattcagcctcctcctctatgctcaggcagctactgcttctcagccatcagtacaggctacctcattcaagttgaatttgcaatggctgttgtggttttttgtttttctgaccatgtggggaactctcatataggctttggaattatatagtcctggtttgtccaaagcactctccacaaacaggctgtgtgaccttcaaatagctgcttaacccctctaagcctgtcatctgaaagtagaaatgataatgataacattagagtaaaccacatgaaagtgtctttgtaggttaaaaattgttgaatattggcagtctcataggttccacctaaaacctttgtggggttctggggaagattcggtaagagaatatatgtattactgctagggcctcagatctaactagtttaggaccacagaagaaggtcacgttccccttagtgtctgaaccacatctcctgtcaaatatctacaggataggagttcgaagtctattcttacaggattcccagtgatttcaggaatccttgtggcctcttattccctcccttgtgttcccctcataaagatgttgatgtttattgtgcgtttactctctgccaagtattgtgccaggctctttgtacataaacatcgatgtacctctctacccatgtgaggtgggtgcttctactatcatccccctttcacagataatgaaactttagatatgagctaagaggaatgaaaaaattaaaaataaaaaaaaagcagataaggaaactaaagtgcaaagaagcaaaatgttttgccaaggtcacaaggacctcagggtccgtatggttgtaagaagcagactaggccctaaggtttcttccatgtctggcatcctagggggttaggactgccactgagatgctgaacaaatgataaggcaggcacttccccgacaaagaatttgtgttggtggcaggaggagagaagaaagctgcgaccaggagagctgagccaggagcttttgcccacctcatcatctaaatgagcatcagactctcaggtgttgcagataaaatcccctggcatgtgatcataggtgacatctacccagcgctcatgatggtaatgccaggcactactccaagctccttacatgatcaatcatttaaccctcacaaccttggggtctaaacagtactgttagtcccattttacagatgggtaaattgaggtatggagctgttaagtcactggcccaggatcacacaaccaataagtgacccagctggagatggaacacaagcaggctggctcccaagtccatgacgtgaaccataccagatactgcctgtcagaagtgtaaacagccctgtctcataatcacctcctttgatttggaagcctagaccaggggtcagcaaactatggcctgagagattcagagctaaatctagctgaccaactgtttttataaataacattgcattgaaatacacccacattcatttatttattgactgatttgcaaaaaacaagggcagcagtgagtagatgcaagagatcataggcctgcaaagcataaaacatcaactttctgaccctttatagataaaacttgttgacccctgacctacagtatgcacctaaggtgtgtcctatgtgtcctaagatggctccgacacttgctatgtgaccccagacaagttgctttcctgaatctccatttcctcatctgtaaaatgtgcttgtgggaatttggtgaggaagtgtgtgtatgtgtaagtgcctgacccaaggcaggtgtttgataagggtttgcagctatcattgccaatagtatgatgaaaattatgactgattcctatgatatcactgaagacagggcagagacctttatggccactttatgggcaatgaaaccctggtgcagagagaggatatggtgagaggcagagcccaggtcttcccagtccaagtcctgcactctgctgcctcctttcccccgccttccaatccatagctgccctagtcctcatttatgtttgccagcgtgcggagcagcccttctgtgtttgtgagttttcggcatctgtaagtacccacagccgcacagagctcgccagcacagacatttgtcaaagatgacatgccagtcatccatgccaccggagacagtgacagatgcgctctccagccccaccatccaggcagtggaggatagatggggccttggcaccggcgcccgctcttggcctggcatgtgcagggagctgcagaccaggcaagagacaaattgcagcctggtcagtgggcaggaggctcagtgtgcatgcaggcagatgtggctgcagcctgcccctgaaccagacacctgcctgccctccccagtgtcctagacctgcccaaatctggtgtttgcttaagatttgtatgtggtcactgatgaggaggtgagtgctcacgggctttgggttgtttccaataataatagtgacaatggctgatgctaacatatgctgctctgctgttctaagtccttagcatacatcgagctctttaatccttagccatccggtggtggaggtacaggaaactgagcctagagaggttggaggcctcttccaagttcacacattaagtggcagaggcaggaatcaaatccagacactctggctccagagttcaatgcccctcaggactactgtctaatatttgagagcctggagtggaggaaaaatcgtgactaggcaaaggattcaggtaggcagggctcaccactaacctgagtggacaggaacaggttgccctgcctcaatttttccaccagaaaaaatgagcagtggctgctattgcaaggccctgcaaggtcccagaccagctccagggcaggcctctctgttcttctgggacccttgggcactaggtcctctgccgacacacattcactccctccgcctaataatcccaacccagatcccctggagtatcatctcgtagttcattaaaccatcacctctgtgtccctgaggcaagcttgcagtctgttgagattttgtagggatgtttatggctagtggcagcaaagggaacagaccacataaaacaaaaagagacagtatgagctcttaaaaagtttccaaagtctggcataaaagctcccacaggtgtttcattcatacaaatgaccagcttccctccgctctggatgaagggtttggaaagaccaaagtctggttcagtccagccagtctcctattgtgggaccttccttgcgaaagtacccttctttctctgagccttggtttccttgtctgtaaaatgggtataatgatagtacctatctcataaaattattgtgaggattaaaacacaaaaaacacttagaacagggcccgacacaaagcgaatgctcaacaaatgccaactgttctcattctctggtttttagtttcctcagtgggaaaatgaggaggtgagttttgtgccaggtatgggcttctggctcgaacattctgtgacttcatgatgttcctagggtgcttccttgtctcctcccacttgcctgagtctttcttctttgtttctgtgagccccagccaattagtttactcacaagtgtagggtagagagaactacacaaacaggaagtgttaccactcatactcacagtggtgaatcattccaaccttccatcaagtggatccacctccattggtcgacacagctggggaatctgagctactgtggccagaactctgttgaccacatcctgcaatgacagacctcagaatccttcctgaaccttccatgggaaggagtctgtgacagcccacctgtgtagactgggcctcatcagcctgaatttgctgaaataagtaattccagtttccctgaattcatgcagagggcacccacgctgggaaggagtttctctggcttttcaagctccataaacacttgaaaagtcattttatttttcaatctgtgggcaggatgccaccaaacgaggaagcctcattaaacagaccttgaaggctatttctttgttgttttttttgtgggagtgggatgaggtttggtgttggcttttttttcccccactgatgctttttggataaacacataaatcagcatcatctatattcattagatatcgtgccttgttcagtacaaaattacccctgttttgcatgactttccccccttgtgattaatataaatgacttaagttaattatgtttctcttcatggaaaaatgtatttgtcaaagtgctgaaacatcaataaaaaataaacactgtcatttgaagaagggctcatttgcaaatgagtagctggggtgtggggaaaggaatggactcacccgtctggaggtgtcattctgattgagtaggcacacttcatatttactaacaatgacaaaagcatttttcttagttaagcactcacaggtcctgatgaggtagactgatgtcatcattattaacaataatgacacctcaggcgtagagaaaacaattttccttactagagaaaactaacgctgggtattttaccatccagacctccaaaactaggcccagcatggggactttgcaggaatagaccaagaggcaaatacagatgattggagtgggagggaagagaagtgaagaaaagcaaaccatggagctggtgtggcatctcagagcaacatggaagcttagggatgagacagcacaaacacctccctgggccaatgacaagactaagaaccagagaggggacttgccccttgggtaaacagcatattagtggcagagcccagagagaacccaggactcttgactcctagacccccaccctttccctgcactctgctgcctcccttgccaccagggatcaaaggctccccctcacttgagtaagtggtcaatggcaccagcaaggtgcaggggctcagactgctggacagtcagggccccagggaaatctacaggttactgacttttttcatggtatctggaatagcctttccccacactgactgtcttagtttgggtttcctgaaggcagaccctgagacaagatcgtaggtgctggtggtttatgtaagaggtgagcctaagacaccaagtgaggtggagaagtgagacagggaagggagaaaagccaatacagggcacatgtatgagggggttactgctttggacacttggactcactccccccaggagtgactgcagagaatatgcctctgagttgtcccggtgctggacagggaagcagaaata

SEQ ID NO: 46510 - DNA, 3116 bp, Homo sapiens
atagaaggccatacagcttcagcctagctctcaaaggacatttattttctctcagagccttcatgtaagaagtccaatgggttgggtgctgtggctcacgcctgtaatcccagcactttgggaggccgaggtgggtggatcacctcggaggtccggagttcaagaccagcctggccagcatggtgaaaccctgtctctactaaagatacaaaaaaattagcaggatatggtggtgcacacctgtaatcctacttactccggagctgaggtggaaggatctcttgaatcccggaggcggaggttgcagtgaaccaagattaaaacactgcactccagccttgctctgtctcaaaaaaaaaaaaaaaagtctaacaatcctgagaactccatgctctctcagctgagcccacccgtaagccagcccagcccagctgccagacatatgagtgaaaaaactattggaagtggatcctccagcccccagtggttgaaagcacccccattccagtcctcccctgaaagatccacctctgtgcttttttctaacttctgacccacagaatttgggatcacaataaaatagtggttgtttcatgccacaaagctttggagcagttttttacatcgtcatagacaacctgaagaactagtaaactctcatgttggctaatattcttgggctcccttcccccaggtgaccaatgccaggagtgtgtgacttgcagcacatgtgctgaaggtggagagaggtagcctctgcctcctcacactgcacatcccctcacctgcctccagtgtggtcagttcacataggctttcactcctctgcccaggcaaagttctcctctctcctgccacggtcctttgtttatatcgtgagtgcaggcttgtcacacggatagcaaccagattatttatgtttgtcttcactagactacaggctctaaagggacacagctgtattctatgcatttccctgtgctgaggcctagcacctagtgggcgtgaaataaatacgtgtggaatgaaactgtcaaagaccatgtgaccagctggccctgaccccctgctaacaagcagcagacccagaacccctttctggttctcctccaggcagggcacagttgtttcctatctgagcaggctccatttgcttcacatcagcccaagaacagggaatgggaaatgccttgtgctgcaggagggaagacaaagtaagccagagagcacttggccatctggggctgggagcggaagagaatggaaccattctggagagccagacatttgttttgtagttgttgcctttgtgaatgtacatgtcctgaaaccctggttaattttcttgttcaaacattggtttaaaattgctggctctaggagagatactgtccttcagcaggttctgttataaactttgcaactccaaggtctgattcagcagcaagctggaaaagttcctggttgctaagagaccagagagcaaattagcagctcacaaaagacccagctaagaccagtaaaaaataagacaaacgaaaacaaggtaggaaatgggcctcctcaaaatcaaaataaggtaaacaaactggctaggaaaatgtctgattggaaaagacaattataagtattcttcatgctgaagtaaaatgcactataggtagctaaactctatctttgtctttttgtcacttgaagaaaacagcaggggagcccctttctagtcctgaaattccggatctatgagtcagagggaaaaacaaactgtcccagttgataaggaggaaagaaaaaagtgaaataggctgcctcttttatgagctctccctgccaggacggtgaatgggctacctggggtggtggcccagaaacattcctgcaagcaaacaaaagcctccccccaggaaaggtttctgatcactgctggtccaaggctcagccgcaacagagggctctgacccccacaggacttggccagacacttcaagatcccatctggcaatcaagcatgagaattcaggtacttgtaataagaaggggcaaagagaaaagtaccaaataggtcccaggtattaaatatttattttgttaaagtgcctctatagctatgatttttagtaatttcttttctggtcagacaatctagtaaaatattatattaaaattatttttaatcaaaaacagaaaaaagcatgccaatcacttacctctgatggaaattcattctccaagacacacagttttcctaagaacctactgcttagctggacaaaatagtaggaaaatgctccaagtggaaattaccagcctcttgagggaggagcttgaaaatcttaagtgatcacagaaaagtcacagtcatctgggttttggagaccagagaagaaatgaagaagggcaaaaaaaaaaaaaaaaagaaaaaaagaaaaagatggggtgtggggaggaagatggggaaacatggagctacaaattgggagaaaattaaggcagccagtaggcatatgtcagggagctatggcgtgatatgcctaagaactatgtgactgaatagcctccacttatcaatatttgttggacagcaaaaggatttcagaatatgatggatccaacaagcatgaaataatctttaggggaaaaaattacaattccccacatggcagcttccttcagatcttttctgacaatcctgtttgtcagatttctaaatcgcatgcaactgctatattttaggcagagctggtatcttcctggaaaaagaccgtcccaaatattcagtgcccctccctgcaggagaaatagacacctcctttctgatatatgcagctctggccaaatgacttgctttggcccatgaaatgtgagcagaagtcacatgtgtcactttggagtataagttttaagagctagcacgtggttctctggcttttctcttgctgtcacaatgaccagaacatgttccagatagtgccttatccaacaggcttggtccccaagagaagaaagcatggaacagagctgtggctggattgcagtggacacgtagcccagatgaaaaataagttctgttgtggagttacctgcaattgcagcaaaacctagcctatgtgactaat

SEQ ID NO: 46511 - DNA, 665 bp, Homo sapiens
aaaaaaaaaaaaaaaacactagaccttcttattcctacctttagaactttagagagtgttgatatttaaaaaaaaaaaaaaaaaaaaaaaaaggcaaacaaacaaaaaactgacccccaaagccaaaagaaataacatgtctttattgaagaaatgtccattcttccttcaaagcctctttcccttaacaaacgtggtatgcacagcaaaatggaaaagatgtcagcctccacagtacagaggaggtgagaagatctgcttcccagcacactgtggaaaggcagggcctggagcaaggctgtgacctcagctgcacatctgggtcctaagaccactggagggagctgtgctgagtcaaggttagagagcccttggcaagcagatccccggcaaggcagccaagtcaaagaggaagtttgaacacttaatgggacatcaaatgggattttccctgcaatctcagaacttctgctaaaagccctaaagtggatagcaataagtaaaagtgcccccgcagtctaaaaagaaagtgatcagaggatacctgcaggattttctcaaagatgagtgatccaatcctcccatcccacctccaccaccccaagagaatactagaagatttgcgagtccattgaaataggcgcatttctaagagtagggagttg

SEQ ID NO: 46512 - DNA, 1330 bp, Homo sapiens
agtttaaaggctggaggactaggaccaaagaaagaacagttgtgctggtggagagaaaaggaagtgagacaagctgagccttgccagagaaaaggcagccaggatagtgcagaagagggaaaggtggaggctcccgaagggatggaagccaagcatggaagaggaaaagagtcgggtctttttctgctctcctaagagttctggtttggtatcgtggttgcgagtgtgagatcaaacaaccaggccgggagcagtggctcatgcctgtagtcccaccaggctggtcacctgaggtcaggagttcaagtccagcctggccaacatggcgaaaccccgtctctactacaaatacaaaaattagccaggtatggtggtgggcacctgtaatcccagctactcgggaagctgaggcaggagaattgcttgaacccaggaagtggaggttgcagtgagccaagatcacaccactgcactccagcctgggtgacaagggcaaaactccatctcaaaaaaaagaaagaaaagaaatcaaacaaccaaggcccaaatcccagtggtgtcacttgctaattacgtggcttaggaaattactcaatcctcctatctgcatccttaaaatgggaagaatgacagtacacatcttgaagggtgatcttgaggcttcagtgaggtaatccatgcaaggaccttagcacagttcccagaattgaataaacacacagtaaatgtttaatattattattaatatttaactgaagtctgcggcctgtttccaccatcagctcctccagccatgagttggagtctgccaaggattttagagttcattgattctctggatgtgaatcattgtaaacagatagattggtgtcttctgtttggagacaatatctccccttcttccaatggcagaacatctggtgacttcccaggagataaaagggtggagtacaataaaggccagaaacctggttctccctgagggagcagaatgagaggaataggtcccggtggcatatgctgctttccttgaccttggcacctgttccaagctggcagagtgcagaggagggagcactggggacacagaaattggtgtaactcctacagacagcaatgtgctcatagctcaaaattttaaacgcgtgtccccttgaccctaaattttggtttctaggatttttttttttacagatatgcccccacatacaaaatgatgtaaatgcaaagttattcactgcaggatttgttatgacacagagactgggaaaaaaatctaaatgttcacactttactgaatatattatggtccatccatacaatggaatat

SEQ ID NO: 46513 - DNA, 5348 bp, Homo sapiens
aaactttgtatttttttaaatccttttctctgtactttgaatttttcacatcaagcatgtagtttgtattaactttgtaattcttttctgaagctattaaaagtggggaaaaagtgcctctttgtgtaatggtgaggatggcataaggtcatgtgaaaagtatttgtagatgagaaagcactgtccaaatgtatgtgtttctttatgcccctccttctgccagaaaggcctgaaggtagctcacagggataggcaacatacaacaagaacaacaaaagctaaaagtggaagcaaaaaaaaaaaaaaatgaagaagacaaaacacaaagatgcagccctacagtgaagctggaatgaggcagggcaaaagcatacactcacctcctgctcacctggctacccagccaggccacaggctgagacttcccagtagctcttcctgaggccctccagaacccacctccgcctcctcctacttcccctcttccagcccctacaatttccaacacgcctgccctgtagcctgcccaggctccccacacctgcttaattctagcctctggcttttgctcatgctgttttctgtttctccactcacttgctctccccacttgtttcctctccctacgtggatcctcccattcaatagtgcctcccgctggtgcaccggcctttgacagcctccagctcgcgaaatctctctccacagccatcccaccatactgagtcactcttgattatgtgctgtcatgtgtgattttcccactcaaatgaacattttctaagcaccggctgtgtatcggacactgtgggaagttcaatcctgccaaagatgacgtcttattccgctctcaaggagcttctgcaggaatggaattcattggcttggtagctgagttctgtgaggcacaacgtcctccttcagagccctgggaggcccctctggttgactcactagaggctgcactggaagagcttccagtatccagtcctccccacgcccttcacttgcactacccacctggaactgaggcttggcccaccttcttccttccaacctcaggacccatgaaaactgaagccccttcctagtgcctcttagaccagggcagaacctccactgtatcctcaggattgaagactggggcagtacctgtttctcccatgtcctcactgaaagtgtgaataagaagcgggggttggcattgttctctttgcctaaagagccaacccagcagacaatgcaccagcctttttcaaccaggcatcctggagggcacacaggtgaatcagtgaattggcagtgtcccaaagctgatgggaagggggttggagcagcaagctaccgttgatgtcccatcatttcttttggttctttcacattagtaataattataattccaactgtaataacaatagctaacattcgcagagctttactcaatgccactgtgttaaagcactctccatggcttgtctcatctcatcctcacagcagccttaggagcgaggtgttatttttatctccatttcacagataaggaatccgagctttctccccacagtgaagatggatagggaattactaaacaactgaagacaggcaggaaggaggagcaaagacgaacaaggacttccagagataccccctttctctctccaccccttcttttccccaagtatcttcctttccttctctagaagaaataaagttggaagagaaagaagcaaaaatgaagtaaagacaaatagaaggacctaaatttacatcctcagttatgtggtaatacccaccccactacaccacacccccacctaccaaggtaccagtggcaggggatggaattgctaaagggatgaaaggaggggccccagctcgcttacacagcagtaaccttcctggggccaccaaagaccagagtccagatccccagtgaggtgcacctcactgggtggtgcagtagagtcccctggctcaacctccgaccctggagaagttggcatgcaccactcccaaagccccactgggcctctcccagggtgactgctcttccaggctgccctggccctcactgcatcctccctctggctccagaatggggaaaggtccggagtcttgctgaatggcaactatagcactgcagccattcgagtgtgacttggggcatcccaaccccatgcctggactcctcattacccactcctccagtctgtcttgctccagaccccagatcaccctgggtagcgggtccccgaaacgagagtcctttagaatgctgccatcacctgtccctaggcagttgcatcctccagcacaaagatccaaactcctgctgcaaagttctgctcataccctttaagaaaactctcaacctttcctccacctcactggttctccctgtgcctccccaacacctgatagatgtccagttactgcagaacataacaagtactgggatggatggtccaaacccaagtcatgaatggcatttgttagtatagtagacatttccgcaggacacagaatcatcccagtggtcctcatacccattggccaagtcccattttcctcccctcctccagcagagggtccctacactccagcaggcaggctaagctggcctggctcctcccccgaagctccaggtaaccccatcacaatgcccatcccctctccagctgccccaagggggtgctcaacttaccgtctaggagctcttagaggctgctggctggtccagttccttctccgagaaacaagggtcagccagattcagtcggcaggccagcagacaagtggaggtgggcggggaatccaggcaggagtggcctggcatttcctggcagagccctgcctcccagctgtctaaagaggggtgagggagagtgtccctgtctattggcaaagtccagcccaggtaagggattagctgaggatcccagaagtcagtgaactttccagtctaggtctggaaggaaggagggaggcagggagacaacctgggtgtaggtgctgcaccttgaaacccctccttacagtgccctctgctggtgagtggctgtccccagccagaggctattattaaaatagcagataggaggaggagggaaccttcatctgagtttcttaaactataatgtgcacaacagtcacctgggagatcttgttaaaatgcaggctctgattctgtaggtctagtatggggcctgagattctgcagctcaaagaagctcccagctgatgccaatgcaaccggtccaaggagcttagagagcatctagttccacccgctccccacacagagaagacagtggagccactgagacggttaatgactcaccagttgctggtggacctgagatgtacccatatttttccttacacaaggtgctttctacttcccccacccaaagttggcagagacactgccggttgggagacaactgaactttggggccatttgccattctgagttcttaaaactctgcctaggagcggtggcaccacaagaatgaaaactccttgtggaacttttcccatgttttcggctgtctcctcagctcctggtacagcctgatagatagaaggtgttcaataaacatgtcttgaatgaatgagtgaagcagttgagagggaaaaggatgcattttggctccaactggccaacactgagcccaggtgagccacacgttgggtatgtaatattgggcaagctacttaactcctctgaacctcaattcccttgtctgtcaaatgcagttaagaatatctaccttgtgtgagataataattgtcattattgagctaataaatgtcaaatgcccaccacagaatgggtggtcaatagatggtaaccgttgtcaccagggtctggcctcctgcagttgaggaggcatggtgaacgcccccccaggcccctagttatcatctcccatagaaaataagtaacttcctctgcttttgtctcagttaataattctctagcctcttgtctctgactgcaatgccctcccctctgcttccttccctggtggaggtgagagggtggaataaacctcccaggggagcccagtaccccaaagtgcagagatggtagagagcgggcaacctgggaagcagacctcatgcctaaagacaagccaggaaggggtgctcagaactttgatagggaatgaaaggagtggggtaggggtgtttgtctttgttgaacaaagctctgtctgagtcacacaggaggctggactttgccaacagacagggacactctcccctacccctctttagggcggctgggaggcaggactttctgccaggaagcgccaggtcactcctccttgactccccacccacctccacttgtcagctgccttctcctctgagtcataaagtcctaggggtttgtgaaagatctgtcaagctagggttctaagccaggaaggtcatgccaaccaggaggctataaccaggggctgtgttcatggattatgaactcacttcccaagctagttcttgccactcttggggacaatcccaattataaggaggctctgaagaaatgtgaaggctcctaccactcactcccatggccacagagctggttcatgggatgcaaagaccacaggcatcaacagcattataactgggggctgagctgtcacaggagggccagtgtcaaaccctcaccacaagccctcaaacattccatcaaggggtagcctccagaggccaggcaccaaggagggtctggcagaccagaggggctcctcctgagaggaactctttggggccatgaaacagcaacttggacttcccagccagtgtcaccacccttctcatctgagaaaggcagatcagcagggagcaccactccaccctcctcccagccccaccctcctcccagccccaccctcctctgccttccacacatcatatgtcatcaggccccccgcctgggaggtgtgctgccagaggtaaggggagcacaggcctaggaaccaggaggcactgggagaggcaggtgtcaggagaaaagaggatgggggcagggaggggcagggagggggcctccaccactggacagaaatgtagaaaaacaggaaggcagaagatgagcaaacggacagtcaggagcacagaaagacaagtagaaatatgcacaggtgggcatgctgctcagctctgtcccagaacctccaggaccagtgtccctgacccttgacagaaaaggatggattagggccaggcacagtggctcatgcctgtaatcccagcactttgggaggccaaggcgggtggatcacctgaggtcaggagttcgagaccagcctgaccaacatggcaaaacccca

SEQ ID NO: 46514 - DNA, 708 bp, Homo sapiens
agagagggagtctgcagcctcccctcctccaccaagggcatgctcagcccagtgggtcaggtcacaggcaccccaggaggacacacacagtgtcccacccacctttgtatctccagccccaggacagggcagagcacagagtaggtgcttgtacgtttttatttgttgattaattgaacgaataaatgaacacattgttgtactttaaaaacaaatgctgaccagcacctgccgccacccctacccccacccctactctggaacaactgaaaaaagaagggaaaggctttaatcattttggaaactcctggttctaatgtgcagccaaactgagatgtgctgctgcagggtattgcttcttactgcttctcaaagtgtgccccagagacctcctgagacacttgttgggactccagacccatgaaatcaggtcatcttggggagtgagagcaatagggtatggtgatttgcagttctggccatggagtcagaccaacctggggttggatattgactctgttatctattaactggtaacctggtgcaacttctagctataaatactgatggacagaggataggctcggaacccaaaatacatgggttcttacccagctctaccaccattgtgtgatcttggcaagtgggcaccccagacattatcttccattatcattattatcatctcataataatatatgcattgta

SEQ ID NO: 46515 - DNA, 2610 bp, Homo sapiens
cccaaaagaacaaccctgcttaattaaaataatcttgagaaatgagcatttgttaaataaagtgtcttattttacatacttatttcatctttcttttttttttttttaatgacaaaatagtatttaatcctatatttagtcaaaagaccagagttaaaccagatctcttctggggctttttctgtgtaaaccacatcaaaacatgaacgaaagactggcttctggtttagtcaatcctggtaaatttacccaatcctgcaaaggaaactatggaggagaaatccagggacttgttgggaagggcacacagaaaccttagttcaaaaagaaactagtcattgttcggggccagcagagctctcagtaacacattttctttgtttgttttaccaaggtattcctgctgccaccaagagacagcaatgacatgtacagccatctgggacatgcctgtcttcctaataccatttggagctggacaacatttgacaccaaccaatcatactggacaaggcccttagaggacttgaaatatacttctcatgctgtagtttatttaggctgtgactctctctctaatgctgctctcgggaaggacgaaagtgacctgcaaggagagaaatgcaaccatacatgggctccagtcaactatgggactgaaggtcctaattgctcacccaagggggctgcttaacacaaacagcctcagacccgaggtttagatttctgaaatatgcattttatgttaagttgggtatttttttaaaaaaagaaaaacagcaacattaataaaagaagtggtgtgtttttcccgtggccagatttttaagaaacttgaacatctggaagttgccacagacaagcgagctagtccagacacagggacactccaggctatgaaccaagccatggttaaaccaagacttgcctagacaatgcagaataactctcccatacagacttcttacgacaatcaagtgagggcctttcccttctctgaaggcaagtaatagggcagaaggtggaacaaaaagcatgagaaatctaaggtagccacatcccaaatgccagttaataagcaactagcttctttattagagaggagcgggtgaaaagtagtagtttaatgttcagatatacaatcatttaaaagtattcaatacatggtgtttgatggtaatggcaggatgatgtcaagtctctctttttttttttttaaaggtttgtttgagtcctatgtggaagcaaaaattcacaggtgaatttccgggtgtttgccaaactctaactaggtttccaggaataatgtgttcactctgattaccagggcatgcctcctttcctcaggcttcaagtgtgataagtcgtcggaatttgacccaagactactatcggcaaatgacaaagtgctttatcacattcctgctaagtcccagaattccacttacagccaatcctgaatgagactaggttttgtctaaagaatcaaggctcaaacgccaagaaaaaaataataataataaccataatctctttaaaagtaaaggaagcctagaaaatccatgttttgacttgtgttaaggtttacagatggtactcaatttacaatggtttgtcttgcaatttttggactttacaacggtgcaaaagccatacacattcagtacacccttcaactgaactcaacttaagatggggttacccagacatagacctaagttgaggagcatctgtaattgcagagttaagcaaaatattttaagtttctttaagtttcttatcccccactctcactttcaattttgtgtatttagataatctctccttcctttttcccttcaactttatgtggacaaaagcaatgcttcaagaaaagcctcaatctaaaagtttgataatgaacttgaccctccactgcccctaccccaacaacatgaagaacttgtctgttccacctagaaatacaaaagtgaaatacttttttgaaactgttgcctcttatcaggctgatatgtgataagaacacagtctaaagtacaaagattatatttaaccagtactttcctggtgttttaaccagccccttctaaaatacagttgttcttttatacttgggaaagcagcaagtcctgtgacagacccaaagtcactctagggagaaaatcaatagcaagtctggctgttttaactctcaacaccactgtaagggaaaacaagaaaatgtctagtttcccgaatagctctgatactgaaccattggctaaatccatgaactttattttcctaccatgaccacaatagacgactggtctttgcagcttcggaagaaaagaggactaatatttagaccccagctggctgcacatccaaatcttctatggaggttaaaaacacaaaagtggccatcccactccaccaccaaatttttttttttaattgagatagggtcttgctctgttgcccacactggagtgcagtggcacaatcacagctcaatgcaacttcaacctcccaggctcaagccatcctcccgcctcaacctctagagtagctggaactacaggcctgcaccaccaggcccagctaatttttaatttcttttttttttgt

SEQ ID NO: 46516 - DNA, 3353 bp, Homo sapiens
tcttaaaaacatttggttcttaggaatcccctctttacacgcatattttattaaagtgtaacagattaaaaggtgctctagccagggcaaaccaggtaagtggtttccaaaactcacgttgatttaaaagttcttgcacccctccaaatttcttcttaaagaggacagctatcccagcgcccatgcgacaatcctcactgatacagtgggctaaagagtctgttttcgggcatgcaaaaaggtctcctttcacataagtgatctaaaaaatgtgcaaaggaaaagacaatgttttattagatacagtaaaatactaagctatttttctgtattttgtgtcccccacgactacctctcccggcaccccttcctccaatctgatttaaagccaaaccaattacagcatgtgtaaaaggaaagtaatggatgatccctgcctagaattttgagcctttttaaagtaaatcagctagagagaaaaaaagataatgcaatcattaatttaattaaaaagtgtttatgcttttgacctccattattacgaatttcagttcaccaataagtcaatagttgttacgcactctgcttccttctggatcttcattaaggctgctggccatgatactgagtcgctatttccagaatttaagtgtttcttcagctatgagaagggaaaaggaagtaaaaatgcttaggcagccttagtatataatattctgattgccctgtacaaccacttaataggcttttttccccaacgtttatcgatgaatgtgagtttgttcggcccctgggacgtaatacaaaacccttctggggcaaagaggaagaacgcttaggttcggaggctgtctcgacccgctctcatttcgtgctttcctggagcgccccgctccgtcagcggaagcaaagcccatccctaagacacgcctcctcctttctccagggccactccggagcaaggccgatttaggacggtctccttttctctgcacgacgcaaaagtatttccccagtgggtctggcttagaagaaaacagaagggacttggccacagtcccgttaagccgcaaccacagagtgtacagggtactggcgtgctgagccccaggcgtggggaaaggaaggcggcctctcaaggaacgttcaccccccacttttttggggggtgcgtgggagaaggaaagagtctattgaagcctcccattctctgtctcctaccctagggcgggtcagcgaggacgcagtctgtcctggggtcctatgggagggtgcggggaggctcgctcaaagccccaacgtacccaagtcacccttcacctggaaaggagtcggttgtttggaggtccccgccccgcggggaagggctccggatccgaccctggtaggtggggagcagcggaccagcccaaacgcggagccaatcccgccaaagcccttaattgcacgcatctaagatggccgcccccgcccggtagcggggcggaaacgagcccctctagcttgctagccgagcccacactctttggcgaaggccgccgaacttccggcagtaaattccgtggtttcccgccgccgcccgcgcatgcgtaacgaaactgccccacgagtcgggaaaagtggcgcttgcgcattagccgcaggggtgtgtcctagtggccacttggaaaggggtgggcagctggcaaaggggctagttagcgcctgcgtagtactaagctcaaggcagcgttttgagttgaagggtctggcgcgtctggaaagcgcctgcgtattcctttcactgggggtggtgtcaaagcgggaaggtgggcgtggcttcagggaacgcctgcgcgttgctcctccgaaggggtggggcgatccctgaactggagttagtgggcgtggcctcagaggcgcctgcgcggaggcggttggagggaggcccgattcccctttgttcgggttcgccattttgctaggcagcggcagtggcggcggcagcggcggctggagcctctgattgggtttcggagtccggtactggagccaatcagcgcgggcagcgaaccgggggagcgaggcacggtgagtgtgaggagccaatatccagcggcccagagccggccccagcgccccgattggcgggtctcgctgaccactcaggagaggcccaggcgcccgtcgagcccggggagtcgagctgagcctagccgagccgggcggccagcggccccggcccggggcctgcgagcgcctcggggcactcccggccgaggcctgcaggggccgccccgcgcggggatggcgcctcggggagcaggcacctcggggctccgaccctcgcagggtgccagggccagttgggaatgcgtccctgttccccgactcaggcccaggttctcaggccccaggcctggggccacgaatggccctacactaggggacacatgcgcgccctgggcctcggcgatttcctcctggtcgttctggccgcaaacttaaacctgcccttgcactctccactctccggcccttgggacaggaagcctccccggggcccgcgccccccgctccccgctcccagcgagccgggtctgtcttatctgcagcccctctaggtcgggagggaggcctggggagggtgcgcgccgcggccgcggggtcccgtgtgcggctggcaacggggctggcccgcccacgcctcggagccctatgggcccgcccccgctgtctccctggtggggagagggggccgttagttcgcccactccccctgctccgccgcgcccctcctcccagcccgctccgcccgggtctccggcccggcgccgttaccaccccttttggctcgtcatttcctctcttccccgccccgttcgcagtggcaggaccgcacacctccgtcttggagcccaaccaagcggtctccgtttcttgtccgggctgtaagaccagtccattcggtgcctggaacctcactcttagaagattgatacccttgcgcattctttccggaggctgcacaacttgctgttcatattactaatcttatccactgctcattttgtgaaatctccctcccttgggaatatagtacagttttgggggttttttttccctttgtttttgccttcgcctttctatgttactttgtgtcaggcttgacccagtccactcatctcttggtttatgtttttctgatacactttcaagtcctgtgttaacgttttctcagcagatgtttagaaactaacagtgttgtggggttttccttagggtgagaggttgctgttggcaaccaattatccagcagttagtatatgccaggtataatccgtgtgttagggagggagtacgtagaggtcaat

SEQ ID NO: 46517 - DNA, 663 bp, Homo sapiens
cctaggatggaagccaatattttactcttctcacactctgtgcaccaagagatggtgtgaatgtgagagaatcactctgcaattttactagctctatgttcttaatcgaagtgcattgcctctcttagccccaatttccttatctggatagtatgggaaatgacagttctctcttctggagttactctattgattaaataaagtaagtgagacgccgtgcaaaacacctggcacctgccaggcaatccgtaagccttttcctgcgccccctgtcggcgctggaaaagttctgtatcttgtatcaaccccggctgcagtatccttcataaccaccaggaggcggtgtgggaccacggagcctgctttgcccacaactagactcactgggggaaaggagagaattcctccgcctaaggagcagcggaattggagcgccagaattggagcgccagagagacaccggatcttaccttcttgcgctggagttgcccacgctgtctccatagcacgaaaaagaaccagggtaggcatagcaaaggcaacaggtgggacggggagccagggagtggaaacgccggaggtcctcaggctggggatcccggagtcctcgctcagattccgattccggagaaggccaattccgggaccctatccatgtcccat

SEQ ID NO: 46518 - DNA, 1190 bp, Homo sapiens
tccgtgttctcccggctttgtaaatcccgccgcttctccagccagtgagaatgggggctaaagggaggggtggggggtgaggccagaacctggctgtctagccagaaagaagcccctcagcgcaaagcgggggcgcctacccccaggcctaggggtcggtgtcgggggcactgggagaggggaagctggggggtacgggagcggaagtccctgctgggaggcccaacttccccttcgcccctccccccggcctgccccggggcaggtgaagaggggaccgggctccgctccaggtggcggggcagcgacgggggtggggaaaggcccggcaacaatagcacttttatttgggactgtttggttctgagcgggtgggcggaggaggaggcggccgacccggctgccagggagggggctggtcagcggcatctggctacacacctgctcccgcttaaccctgtgcgcgctggggcagggtgcgcagcgcaggggcagggggagcgggggcgttggcagccagcgccgggagcgacgcaggctgcgtgcggccagcctcgggggccccgggccaggtctggcggtctcggagagagcaagaatggggctccctagtggagatctgtcgaggggcaccaccagggctagcactgtaccgctaccgctggtggtggctctcgacctgcgctggccccttagggctccctggtcggcctccagcgcgccagggcggctcgggcgggagagggaaggcgaggggtggctccggggcctcggcgctgactccccgccgccttcggggcgttccgggaagccggccttccggaggcggcgcggcggccacggccatgccaagggcgcggggcgcgggccaggcccagcgggcggccgccaggcgggggagctaacgctgggcgcgccctcgcgcactaaacgcttcctggctggccctgcaggtgagccgggatgcccagcacaccggaccctgggcctgggcctcgccgacgctccttgccagtccggcgcccgggaggcctagccctcagctgcacctgcccgcggagggacccccgccccctctaccccacacccccaccccagggctggcgcgcttgcctgccgcacaatcggagcttgtttgtgggcggaggagccgcgccgggtgcggcggccccgcgccagcccactgatcc

SEQ ID NO: 46519 - DNA, 1185 bp, Homo sapiens
agcagggtggctgaaacagaggccccagaagccagaggtcgccaacagggtcttgctgctagaatctggggcactcctatcttggggccatgcagagagggcggggctgggttggcctcaggccaaagactcagtctggaacctctcagaacacgtgcatgggtttcttctgaactttgttggctcacaagaaagcagattctttcaagacactggaatatagggctaaggagctgagaagatgccaaacaggagcaaagaagatggctgagaaggggccctctagatgacaggcccagggtatgggacaagggaaaggaatgagtgccagccgagtggagggcaggccaggcatggacccagtcaacaaaattatgcttagtgcttatcacacacctggcactgtgccaggcacagaggttaaggacacatgggactttgccctgctgagtttggttgagcaaggagacagccttatgtactaaccgcaacaggcattctctaagagaggatcggatagcctagtggctaagagtgcttctcctgggacccaagcactcaggtttaaatcctgcctctccccttctcagctaggtgtgctgtcttacttctttctatctatctcccttttatcatctgtaaaatgggtcaacagtgtccacctcaaagtgttattgagataattaaatgaatgaatctgtgttaagggcttagaacagcagtgcttaacatgtagagagggtcagcaaatgttaggcattatcattgaatatttctgggagcccatgaagaggagtcatccttttgacctggaaatcgggcggtcaaccatcctagcttccggtgctgagcttcagacttgcaatactgaaaccagggcagtcacaggaaaaccaggacagttgttcaccctgcctggaagttagaactgggtctcaaagagaagggatgtccaagctaggcacacactaaggaggatggggacttagctctgcagaaggggaataacacacgggaaagtacggaaaaagggattcaggcccagatcagccgtgaactccctgagtgatcctgggctagtcacgctccttctctgagactcagttgtcccatctgtcattttatcggagactgattgctctctgaggatccttgcaggtccgcaaccaaaggggaatagagccg

SEQ ID NO: 46520 - DNA, 2770 bp, Homo sapiens
tattgagatttccacgggactctgagtggtgcgtctgctaacaacacagccctcccccttgggccgtgggcatttcctcacccagacctccccctcccaacccaaacacaccatcgccgccaccaccacaatccctccagtccccctgggcaaaagcgatgttcagagacgcggggttttgtttacaatctaatttgtccggataattgcctcaactttgcacttcactttgcccgcatggctctggccttgggccccttcttcactggttcgcagagcactttacgggaaattccctttccgcagagggaggcagtgcgcgccagggggtgaccgttcacaaagccctgaaggggcctccccaccttctaccctcggctcaggaagcccacccccagcccccacgcagtggggagcaggagggaggccagacagggcccgggcctgacactggctccgtctctgggcccccggccactccccgcgccgagcgcagcccgccgggaaccagtgaaccgtgtgggatcaggacttggccgtaccttcagactccaggggatggccggggtttgcaagcgccccataggattagtccgaggccagggtgaatccctggggtccctccacctaccatctttttcagatctgccgcctcacgtcttctccccacgttcccatttttcctcccctaaagtttggtgcacgtggttttctctcgctctcagcgggctgccaggcggggtgaaagttgctgcacctgctttaggcgaattatggtagcactagaagttggtctcccctccctccgccgcttgctctctcgctccctcctccctcgctctccgcgcgctccctccttccctctccaccctcctcctcccccgccccctcccgccccgcccgcgcgccgcccgctcgcagccactcgcagcccaggctcagtcgcagcccctcggagtccggagcccgccgtccctgcggaccggacagtgcggccggcggccggcggccgggacggagcccccagcccgcgaggagggcgcggcgcaggcggcggcggcgcggcggggaggagcccgggccggaaccagggctgggccgggggcggggacgccggggtccgggagcccgggagccggagcgagctgacgagcgtcgcggaaggaccgggaaggaagagcggagccggagcgagccaagcagcccacaaagtgccatgccccggcggggttgaggcgcgcggcggtcggcccggcgcgctgggaggacgcccgggagctgcgcgacgcggggcggcgcggaagggcagccccggcgggcggcggcgggcccgggctgcgaccggagcgagccccatgccccgcgcgggctgacgggccggagcccgcacggagcggccgggcgggacaggtaggtggcgggtcgggcccagggacgtgggtgggggctgggcgggcgaccagaccaactccctcgctcgcgcactctctcgcccgctcgctggctcactttgtgtttgcaaactgcccgcccgagacgcgctgggcgccgggcgccaggaggagccgggcccgggccggcgcactttgttccagccagggccggccgtggcgcactgaccccgcgcagccgcgacattccgcccctggcccgggccccagcgggccggagctgcctcgggaacaggtgggggctgtggcgcggcgggagtgggggcagccggaggccggggcggggaggggggcggccggagaggccaccgaggcccgcccttccccaagaatctgggccccgccccctccccgccgggcctctgggaatggggtgtacgggggcgcgaccccctccccgccccgagtcagacaaagaatacttcccggcccagactttccagagctgggaagggaagtggctccccccaactctagtcggtaccggactccccaggacgcgccggagacagatgaaaatgggggcaagagagcgggggatcgcggtcctacccgccgtgtcgtctctggtgaagaggggacttgtcttgctgaggtcgcacctcggaagtgccagggccagtcagccccttttccatcgctcggtcagctcggggatagagcggaaaacttcttggggacttgagagcgtctggaaatggcccctgtgatttgtgcgccggaggtggagggtggggaaacgatctggctgacacctctactcacccgctgtggagagagctcccgcttcaccacttaaggggggaagagagggcggccacgggggcccggaggccaccagggaaggagcccggagtgaccgagcaggacccccccccgccccaactgaggagtctggtatctcccctggacaaccccagcacctctctgaccggcggcgcttcagcctcgggctcctcatccacgccaaacaaacttccttgggctgcgtcagagcacagccagtggcgctagaatgcgacctggggtcccggccgcccccataaaggaccgggtaatttcgcggaatgcggattttgagacaggcccagacggcggcggattccctgtgtcccccaactggggcgatctcgtgaacacacctgcgtcccaccccgatcctaggttggggggaaagggtatgggaaccctgagcccagagcgcgccccgctctttcctttgctccccggcttccctggccagccccctcccggctggtttcctcgctcactcggcgcctggcgtttcgggcgtctggagatcaccgcgtgtctggcac

SEQ ID NO: 46521 - DNA, 530 bp, Homo sapiens
atgggtcttgactcactttcttcaagtgctgaaccaagggctgggagaggggggtgggatcaatttttaaaccatagcccactcaggtgggttgtagcaagactttctggactcctgtaattatagtcactacccttctctaaacatcttcctcatgcagtgtgtcttatttgataccactgcaaccctggaaggaaggtgtactggcattggccccacattacagataaggaaaccagggctcagactggtgacctcattcctcaatgtcacaaaggtagtaagaggccaggaagggttagcagttcatctggcaaatgagtggctggctaagtaagccagaggcccaaagtggccactgccctgaagccctccccttacctggagcctgaagccagaagccagtgggcctctggggccagggctgaatgggggaggctggtccctgggactttggattgggaagcatcctgcagttacttgtagggccagggctcgttgctctgaaaagccctctgttttatatctct

SEQ ID NO: 46522 - DNA, 663 bp, Homo sapiens
aggcagcgaggcctcgagcatagtggatgctaaggaaatgtctgttgatgagtaaattagagcatttcatttccaacctgaaagggttctgtgatagaaaagcaacgctgcccgctggccctaagtagccactctagtgccatctgcaaactcgataggaagtggggtaggagagggtctgtggaccacacgctggtcccattctcctcgtactctctgtggctctccaagctcctctgcctttgtctgtctgttggtccttgtccctctgctctcagtaaacaagccctggaaatgcaatcctggcctttgggagtaatgagttgacagagaggagagagataaacagggcgagtcagaagtcaggcctgttacaggactttaggctgaaacaaacagtgctgaagagggtggccacgtcactttggaacaagagcaggcacttgtttccatgcaacgagcaggctgggagcttgtttaaacagaggctggggggtgacctggcttggctgccaggccaggtctgactagagggagagggtccttggctggctgccccatttcagccctcaaggcccagcttccacctccttcatcccagcctggtcattggtgagtgacagagccatatcacctccacgctgtctttggggctttcaccaa

SEQ ID NO: 46523 - DNA, 1542 bp, Homo sapiens
ttgctgactcagcccctgtcttgcaggctctccaagtggcccggcagttcctgctgcagcaggcctcaggcctgagctccccagggaacaatgacagcaaacagtctgcctctgctgtgcaggtgaggaagagagcaccccgctggctctgggttgggctggagtgtgggcctggcacagagggagggcaaggacccgttggagaactgctcttgccagttccaacaccaaaaagtgggcaacttttcaaaggaaatacagtcactgcaggggtggggcaaaaaggcttcccactttctctcgtctccacctgatcagccagaccttccgctagcttagcctctttgtccctgtcactcaaagtttgtctgcagctctccctgtctctttgtacctctctcactgtttgttctcccctgcctcttcccttcagggtctctcttggtcacttctcatgtttctgcgtccctgtcggtcactccctctgtccctctgtgttcctgtgtctggggctcagcccctcccaggccatctctgttgctgcagtcacgtcaccaagtccccccttctcttatcctccccccttatccctcatccaccagctctctcgcagtctctccatgcttcctgtctcttgatgtctctctgtctcttttgttttcctttgcacaatctgcccttttttccccttctcccttccctccagcttgccagcccatctggctggctgggggaggggagatctgtggggggtgggcggggggtgggggagccaggccttctgtttaccttttgtgtcacaaagaacttgggagaattgcagtctgagtccgggttgggtcactactcgggcagccactcccctccccctctgcccagcagcccgggatccatgctccccccacccctcccccagcagagggaggctcagaattggggaagggattaagccaggctttgaaaggaagtttatctaagggaagaagggtgagtatggttggttctgagctggaggtgctctggagtctggggctgggtgctgagggaagtgaagaggagggtggggtgggtgcagggtgctcagagaaggacccaggaccaggctttgtcctgggtggagattccagtgctctgacaaagtctgagttttatgtaaaacaagtttatgtttggaaaaagttcaaggtgcccaacagatgtgcagccttaacagtaaccctcttaaaattcttgaccctaaggagacaaccctcaaaggggaggagctgggcaaagatcagggcgtggcctggggtggaggaggggaagacacaatctggaaagtcaataaagagaggaagagaaagatctcatcagaatgagatctaaaaggttctcatacccatgctggtcaggattgggcctctttaaattaatgatccccacatacaatcccagggtttgaagtggtccttgggcttccactctgaatcctgcccgccctggacccagcttagaacaggaaggagtaggctggacaacagcaaacgttcccccaaacca

SEQ ID NO: 46524 - DNA, 723 bp, Homo sapiens
ctgtgtcggtggccatgatgtcgccgcagatgcttaccccgcaacagatgcagcagatcctgtcgcccccgcagctgcaggccttgctccagcagcagcaagccctcatgctccagcaggtgagtctggccccagggcagctggtccctcctcctctgcctggcctggctcctcccaccctgtttacacctcaccaagggcccaagctgtcccagaaaccagagagactgctcaggccagactgatctgcattcctctagggtagtggggagaggtcaaaggtcaggcatctcttatggtggccctgcccccacaatactccccggtcctccctccctgcatgctggccccacttctatctcctgaacagggaagggcaaagtactggaacattctggcacgttgtcccctgtgacctgctcaggagatccaccaaaagcagggagggttcagagctgtgggaatgaaactcctccatcccttgctccctccctccgcacccagaccctgctcagggcccctccaggctgactggggaaagccagaccatgttttagggaaactcccttctcctgcccccaggagcccagatgggacagggctggggttgtggggatagcagtaccctgccagtggtaaccctcctccacccccccagctacaggagtactacaagaagcagcaggagcagctccacctgcagctcctcacccagcagcaggc

SEQ ID NO: 46525 - DNA, 1195 bp, Homo sapiens
tcagttctgtggaccagccccgggggcattcttcctatgccagactctggagggacaagactgcacctagctttattctcaggaccgtccttcccgcggtctaacttcagtttctcctgcttcaactagagtcctctttttattcctctcacagggatatagtgaatggtcagtgcatttgcaggtggggtgatgatctattttggacactggtacaggagagggtcttgcaatataagaaacaagagctgttatgaaccaccaccttctgggtgcattgggcttatagactcagtaatttattttcttcctgatctgacatcctacatggggcagccctcccacaattattaccttattcgaagtatgaaccaacatgtccaccccacccccaacccccatcacgctttgcctcaggaagcgctgcatgctgggtatgtagcttctctcctttctactgttaactcacagccagggagtaggctgttaactgcagctggcagcttgtcctggtcttagcattgctgagccctgttggggaagctatctttggaacctggggaaaaaaaaaagagaaatactccaagccggacgttttaggggtgggataagtagcgctctgcgctctgcatccgacagaagtcccccttccccttggcactcagcacttcgctcccccaccatgaactcgccaccttgcccaaggccttcttgccgatggtcagcagagggcgctttaaacaaagcagaccggctcctctggacaaacttgcctgtttccggggcacagaacaacttccctgagaatgccagccgccgtacagcggagggctcagtacctgtttttaatagtaataattattaacagttaatgagccctcattatgtgccaggcactatcctagaagctttatatttcatttcatccccaaaacgactctgagttaggtattattatccccattttatagatgaagagactgaggcagagtcaaagagatgagcagataaagcattaagaataaagaatctttgcagatgagcaatccgggttctgggtttaaaaaaaaaaatgaacctgtggctgacggtggggaaagagaagagggagaccctgtggtttgcccctgctttctagtgacacgatttactttggtgatcgctgcttccctccttctctggaggctccgagtgg

SEQ ID NO: 46526 - DNA, 751 bp, Homo sapiens
gctactgcattgtagtctgggagacagagtgagacttcatctcaaaaaaaaaaaaaaaaaaaaaaaagaatttcctccatggacctgacacttggaaaggtgttgtccaccaaataaatattgctgaaggatgcattgccctcttattgaatcagagtcgttcataatcaccagccagattccattccagccacaaagtgagggtccttcaggctggtctcagaaacaggaacactttctggtggcttattgaaataccggaagtagttcctgggccggcctcagccaaatcggtaggactgcaggactcccaggcaggatgggagccacccaggcagacagcttggaatgtacaatgaagctgagactcccccacccccaccagccgcggcgggcagctgcctagtcctggcccagggcaccctcttgtggacagaaccccactcacaccctctgtcctgtcgaatatgcagtccatactccaatgccagaggtagtggccaggctgaaggagcccaggggcaggaaagcagcaggcaggtggaggcggggatatcagtgatctttttctttttttttttttttcctttttaaaaatgttttaaatatttatttctttttagcagacatctgctggcaggaagggctatccgtgatcttgaagggctgtgagaggaagcaggtgggcagccctccactccactaggtcaatccccagggtgaagtggaagagccagtggggtcgggagag

SEQ ID NO: 46527 - DNA, 1498 bp, Homo sapiens
acaggactaagtctccctgctcttgtctctcatagttgatagtatccaaaaggtcctggtaccccacccaggactcatacccttaatcactagtcctccctcttcctcctcaccaggggcccaagggctcaagcactggcaggggctgctgaggagctgacggagccactgctgttgatagagccggtgccaggccctgggcaggcacggggcccaggcacacaatggggctgtgtgtgcacccagcgttactctggagtggagctgggcaggcaggctggcatctggggtcaggccaagaattcatgtctctggagaaagcctccccaccccctcccaggcagcacagctctttccaggggtgagcaagcaccacccactcccccacccggcctaggaagggaatgggaacttgctctggtggcaggtactgggaaatggggactcctgagtctagccactggctgggctgctcgcttgcgaggcattttggacctattacgtaatctggggttgcagcctcctctttggccagagggagggtgaagtctgcgggggccaggagaaggagcaagagaagtctggctgcgacccccaccccatacagagggcctcagtcctccctccccagcttaccagggccctgggctcagcacaggttttctgaggcacccaggactcctggccacccagcctgcaccagggtgctggggtaccccaggagaggagctggctcactccccaggagaatgagtcaccagctggctgcagccaggatggcgaggcgggtggtgggcaggtggagcttgtcctctcctgtccctggcaggtcttctcaagctggaaagccactcagctggtatcagtgctgaccacagcatcccagcccaggcctcactgggccacttcttctggtgcagggaccgtctggccgcaggattcagagagacttgatcccctccggtccctacgctgactcactcttatagctgtaggcatgggcagcctactcctctaattgtctctgagagggtgtcaggctgcagggaagggcagccacctacccccagggagaaacgcggtctgaggcgaggaaggaggggagaactcaggcacctggtgggcagcagggaaaggcagacagccaggccaccttactcctcaggctgtggccaaaacagggagggcccctttgcatgaatcattttctattctccccagagccaggaggcacccaggaacaggagctaactggccctgctccctggctggctagacatgtggcaccctccctcacgcccagtcataacgacacagataggcgtcctgatgcatgccacccacactccctgaaggtcatacacaaagtcactgtggcagcccagcccagtggacacagttggatggccacccatcccctgacacccacaggaaccccccagcctgagctagagtgggccacaccacatcctgtaggccccaaacagtgctgagtctg

SEQ ID NO: 46528 - DNA, 1296 bp, Homo sapiens
gtccctttccctgagggatgaagcagcccctcactcgggatggggggagggcagaggatgggagctgggcagtaattaacctgcacttccccagcgagctctaagccaaaaactgcgctcaagttgagtgcagaagctccgcgctgaaccgtccccagaacagacaggcgagagaacgacggctggagctgaggggggttcgggggaaggcgcagcggccaggggctggcggagagcggagggcgggggcctgggcccagcggggttcgcgcagacaagccccgccccgggctccctcccttcctcacccggggcgcggggctggggcgcgccaggcggctgcggcgcgaacctgctcgcgcagcccggagcagctcggggcagccgtgcgtgaagccggaaccccgcgcggggagggggccgagctggcatctgcccgctcccttccaggaggcgagcggacgcgctgggccagagctggtcgggacagcccaggggtgggcggcacggactcgggggatcggggggaagggggcgtgttttccgggattcgggaccgagacggggggagggggaaactcggggggcgggcaggcagctgggaacccggggggaggcagacaacggggcgcacggagggagcgctccggggttggtgttccccagggtcatagaataacccacggggagaaagagactgcccagggactcgaggggacggggccaggggcggcttcttcaagagaccgagctggaggaagggacgggaagggagggagagatggtacttccacccgcccccccatcagcccagcccccggggcgtggcgccgctctggccctcccactccccccgctggcctggccagactcagcccccgcacacctcccctacctccgaccccctctcaggcatcgccggccccagccgtgtccggtggagggggagtgggcgcggggcccgcgcgtccctcaaacttcttgcgagttcaccatcacgcctcccgccccttcgactcccagctccgggccgggaaggcccatgcccgcccggcccctcccgcccggttacataaggtcgcggagaagccgcccccggcccgcgcctgaagggaggggccgagggggctcccggctcggcgggcagcgccgctcgggccacgcgctgggcgcccgggggcggacggactgcgggtgggtggcggcgcgcacggtcctgcttccctctcctgccggcatcccccaccctcccacctgtctccgggacccacgggataggggccagggagcctgggt

SEQ ID NO: 46529 - DNA, 444 bp, Homo sapiens
gctccggcaacttgtcgcaagttcgggtgcctggcccgcaagctgtgcccgccacctgctcccggcctgctccggccccgtgccaccagggaggcccgccccgtccgcccttcccgccgccgtcggcgccgcggccgctccctgcgtcccgcccgggccgccgcctccgctgtcaccgagccccgcgcccggcgcccgggctccggctgtcactccacgcacacttccctccgcgcccggcagagggcagcacccgccccgcctcccagccgctctgcctcggcgcccactgggaagcgtagttctcgctgcagtcccgctaggcacgccgggatttgtagtcccgctcagcggactaaggcttacagggaaagaggctcttgacttggaacctctgatccacttctacctctttgcaagttttctttctcctctcagtaaagt

SEQ ID NO: 46530 - DNA, 2185 bp, Homo sapiens
tcaccatctcttctccttaagatatcaggatgtatcagatagcccactgaggagggactgcattgagtggaaatggggagaggcctctggtctgggataggtatggatcaggggcaggagtgagaggggggtgtgggggctgaaaacgtatgaggacgtttggggaaacatgagcaagaattttggatgtgggcattttggatagtgcaaggagaatggggatatgagggatcctaggaatttccgggcagtggaagcatttgggggcatccaagagaaatggtgggtccgtgggcatagcaggagatttgttgagtgaatgagggggttctgagggctccaggagatgcgatgatgtgtccagggcggagagggtagaggtgggttgggggagccagaggctgcaggacaggctacaggactgtcaaggggaatttctacatgcccgtaaggaatgaggaggtctgggtgcgcgctgtccccggatccccgcccccagccccggtgctccgccgcctgcccgcccgcccggggcttcctagggagggagtggagactgcggcgcggcgcggcgcggcgcggcgcggcctcggtgaagccgcctcgtccccgccccgccgcgccccgactcacatcgccccgcggcccgggcggcgccgggccccgctcccgggtcccgctgcagcagccgccgcccgcccggagctaaggcctccccgccccgccccgccccgcggccgcggggtcggaggtcaccggcagcaccaacgagacgctgcgggctggcggacccgagcgggggcgaccggcacgcagcctagaaggtccctttggaggactttgcagtcgggagcagtgagcatgcgcagacgccagagggcgctcctggccaggggctgagcaagcccggaggggacagggcggagcctgcggcggaggcggggcgcggaggcggggctgaggacaccaaagttgggggtggtccggggagcggaaaggggacggagggttgggcgagaaacgaagggaaggggagagggtctgaagggacctgaaaggagaagggcaagacgatggaacctggaagagggttgaggggaggggaaggggccagggggaccactggggacaagggggagagaactgaagggaaacacgcggaggagcggggctgggagaccacagggagagtttggggagacctgggaactgcggagagacagggctgcgggcccggcgaggcgtttccattcagcgaatggttgaaaacccagcgtaaacgcggctcccggcgtctgctggatgcctgccgggcgcagtccgagccagagagcccttgcacctgcatggcagaggccatggagcccgcacatttccaccctgagatcccataaatgtggttttgttttccttttttttttcctccccccaatctgcagctccaggcccctccctgagccgcccctctccaccagccggggaggggcgggcgggggccgctggggcgtgggagaggaagggccgcgctattagggcgggcgggggcggacgggggcgggcgctgaagccttggggtggggaccgggtgaggggcctgacggcagagtcggtccagaactgcccggacagcgacgcacagcgagggtgagaccccagcggagtcctggtcccctcccctaaaatcccagcagccagaccgggaaccccagcggactcgggaaacaccgcgtcccagccccggaggcgggcccgccaagttccagaaaaactctggggatctatcgagagggcagttggcgggactgggcactccccttccttctccctcccactgtccccagaaatcttcccatccctccacctccccaagccctaagtcctctcgggctctgcccttcagggcagcgggtgttggggatgtccagctcctgagccctcttgcacggaggctctgcacggaggcaagacaaggggttcagctctgtcccttatctgaggtgggagggggaagggaattatggaaggaatccagctggcctgttagtaagggtgttccagtgctaggtggaggtggagtttggctgcctttggggagattggaagggtgaggaatagaggcctgatttctgagtgttgtttctgtgttggacaattctatgcaaactagagccaaaatggaagaggg

SEQ ID NO: 46531 - DNA, 2245 bp, Homo sapiens
tggcgctgcaccgaggcggagggacagcgctggcatgagaaccacttctgttgccaggactgcgccgggcctctgggcgggggacgttatgccctgcctgggggaagcccctgctgccccagctgcttcgagaaccgctactcggatgcaggctcgagctgggccggggcactggaagggcaggcattccttggtaagggagaggatgcagagcaaagcgggagggagcttgggctgggctgtgggggttctcccgggctgggaccctcgccccggtcccacgccgtcccgtccctccaggagcgcccccaccgcaccccccagacccaagcctcggggcccgcagctctcaccgcgcatccctggccggagcgttccaagggccgcccgaacccaccccgcgccgcggtcggggttgcggcgccagactccctcccaggcgcgggaggcggacgccctctggtggaggcgggggaccctggcgaggactctcggcggcggcggcggcgcgcacggcccaggggctgggcggggcgggaggctgggcctcacccccactagctgcggtgtaggtccagctccgcggctctgagaccagcgtttccgacccggcccggaacaggggagactggactcgaccgaactgaaggaagggaccaaacctcggtgaactctgcaaccctctcccgaacactcctcgctgctgccggcggttccagcctgcaaactcagagggggctgcctggatccagtccccagcaggagaaccgacctggggacaaagcggaggcacccaaagggcaggagcaatgccgcctggagactattcgtgatcccaaggacacccctttctccacctgctcctcctcctctgactcggaacctgaaggatttttcttaggcgagcgccttccccagtcctggaagacccccggaagcctccaagcagaggacagcaacgcctctaagacgcactgcaccatgtgctagtggcgcagctcagagaggggatgtgagtgggaggaaaggggtctgtaaagcgggagaacaaggctagcctccccctaacaatcctagactgagacgcagtcaggcgcacgcccgcaagaggcggcgaggtgacaagtttggagtgcgcccccttcagtactgcgcgttctaagacttttggcggagactttcttggcaaaacccattccccaaagctacgcttcccctgctgagatagcccctacccccacctccacaggctgggacagccccgtccccaccatcctcctcccaagccaattaaatgatcacagcacgcgtgacagttaccggctggagagccggaggtgggaccgggagcaggggaccgtagaaccgggccgcgctcctcccctcctagagttcgtggaggcgcagcagagggccgtccctcttccggatgtcggactaagcgaacagcgcccccactgccggccggtagcagccggaagtgccagaccggaggtgcgtcattcaccggcgacgccgatacggttcctccaccgaggcccatgcgaagctttccactatggcttccagcactgtcccggtgagcgctgctggctcggctaatgaaactcccgaaataccggacaacgtgggagattggcttcggggcgtctaccgctttgccactgataggaatgacttccggaggtaaccgagcccgaggaacttggtccttttctggcccttaaatccgtatttcccctttcttgcgaggctggcgcctcagggttttttgtttttgttttttaacattaccagcattgtggcgtcttcgtagctctggctgtgcctcactgagatccctggccaggagagttcccgtgtggcaaaagcgatctttctgtcatgtggctgtatctgtaatgtcaccctgatcaagggaagaagtgctagcacgtaaacaggctttttcggccctggactagtgctttagctgggctttgcgtttgatcttacatttcttttttgttttttttttttttttgagacggagtctcactctgttgcccaggctggagtgcagtggcgcgatctcggctcactgcaagctccgcctcccgggttcacgccattctcctgcctcagcctcccgagtagctgggactacggccgcccgccaccacgccctgctaattttttgtatttttagtagagacggggtttcaccgtgttatccaggatggtctcgatctcctgacctcgtgat

SEQ ID NO: 46532 - DNA, 1951 bp, Homo sapiens
gtacccctcaccccaacaccacccgctacgaagatttccccttcaaacccctgctcttacacctaaccccaggatccctttccccagccctaacctcattccctgcccggcttccttaacgcccaccctggcttttgcctccttcctatctccttggctggctttttctcactcctcctctccctggcttctaaccctttctccccttaatcctcctcatctcattctcaacccggttcccctcatcgcctccaagccttcctttccctctcccttcaacgcttttgccccaacccagccgtcgcccaccccgccaaaataaggcgcccgcgcgccccgactcccggctctcgcctcccgccgcccccgccccgggcgcccccagcccgccggcgccgcggtcccgccccctgccgccgctcctcccgcccgcgaggcgcgcgctgcctttgtcgcccctcacccggtgtgtgaggattttgcttctttaaaggggagggctagtgagccggagactcctatccccgcctccgagtcttagaatgggctccctggccgtcgcggcctccccggcccccgttccccctaccccctggagctacccactttgctgcctccccacctcctccgtcccctcccccggccccctctatttaccgccatcatcagcacgcgcgagctgtcaccagggcgcgagacaaccgaacacggccccgccccctgcccgtctattggcccgcccgctggagccccgcccctcaggccctgcattgcgccaacggcgcagcgctgggccgcgaccccggcaccggcacccgttccgagggttcgcgccgcaggcgcaaagtttagggtcagccacaaacgcgcggccgctttgagcctggcgtaaggggcggcggcgtagggggacgttgtgaatagctggtcgaagtttggttgaagcacaggagggtaaataagaaggtttccagacaaagagactcttaaaggtacagactcttatgtctgtccctcctccttaaagggccagagacgctcccgagcccatctccgcccccttcttcccggggaactgtaaaggtattttacatgagtttcccatactcttttcggttcacctttaacacctctccccactgcgaaggacaaaggctttctcactatcccgtccgtatgttttgttttattctgttaaaagacgttatttctgtgttgttcctaaagcagcagccctcaaaccgtggggtttccggaggcagcgtttgcaaaagttactattggctcccaggcgggtgagcacgtgtctggcttttgccacagatgacccaagagagattcagctgttttatggaaatcccccacaagttagaggatcgctgccggaactgaagaagttcagcagattgtaaggcttgggaaataaaccagactgacttggtagtggtccattgggaaacagaacagcacctaagctacaaaaggcttaggttaagcagtctcctaggtgcactgtcttgaaactacttgcggggtggtagtggggggaggggatgggagtctcccaaaataagatcaacaatttcaacacccaacacatagctaaggcagataaagacttacatttaaatataaggacaagtaaaagaaacagacattagctatagtagtggctcaagttacacacctgtaaacaggagaactaggtaagcacaaaaaaaaaaaaaagaacaccacacacaataggaagggggaaactacaatgcctggaccaagcgctgtgtaggcaatttattaacaacttgcacttttaaaagaggtttgatagaaggagaggaagtggagtgtttcaatttggtttggtcgggatttatcatgaggttcaaggcctcagagttagattcagaatttagctctccctttgtcgtccatcacagttaacataattctt

SEQ ID NO: 46533 - DNA, 1094 bp, Homo sapiens
gagacgccatcttaaaaaaaaaaaaaaatttaagaccagtcaagtgcagtagttagagtggggaagagtagaacaaggagtccaatctgtaactgaatgtgaacaatcaattaagataactcattacacttggaccagtcccccattgtaaagacaaggaatagaggaccacagtccctgagagcccctctaagaactggagcacagttctcaggattctcgcaccagggcaatgaacttcctatcacagggcgttctcaagtgtggcatgccaaagattctagatgacacacggactgagaattcaataatgctgagtcatataatgaaaaagggattccttttgcaactctttcagttctgactacatcaagggaaaagtctccgtttgggttaacatgtttttaccaactctgtgaacttgagctgttcagcacagtagcccagagccacaggtggctgggactagtgtattggacactgttgttagagaacatttccatcatcacagaaagtgctattcaacagccctaggaacaaaaaaagaaaagcagtcttcaagtttataatctttgggaatgagaggcaacagtattcacgaaaattgaatcaaaagaatggaacaaaacaaaaaaaaaacgttatttctaaggtttcctcctatggtgagtgaacctcttatggtggcttccactttaggagtggtaggtaaccaactgccaaccaacaacgtgccagactgcatcctaaggcctttagatgaattaactctccaaatcctcacgatagtcctatgaaggtgtgttatttatcaacttgttacaaatgaggaaactgccgggcatggtggctcacgcctgtaatcccagcactttgggaggccgaggtgggcggatcacttgaggtcaggagttcgagaccagcctagccaacatggtgaaaccctgtctctaccaaaaatacaaaacttagccaggcatggtggtgtgcgcctgtaatcccagctacatgggaggctgaggcaggagaatcacttgaaaccaggaggcggaggttgcagtgagccaagatcgcaccactgccctccagcctgg

SEQ ID NO: 46534 - DNA, 2406 bp, Homo sapiens
taaggaacacaggaggatcgtgtcaatcgtaggaagcaagagtgcaatcactgagaaacctgcaagaacctgggctaccaggaggaaaagtatttcccctacacatgcttttgtatgagaagcctatatccactggcttcaaatatcctggcctccggatttctcccacgggaaaaatgctcacatctactgagataagaaaaaaatgttctgggacctggcaccttacaactaacgcctccacgagcactggacccatacctttccctgccacctcatcttctttcaactgagacttaaaacatatgaaagataaaaactccattgaaactagaccaaccatggaattaaacatagtgggaaacgggtcctaaagagataaagtgcctggaaccatgatctccttattatcaatacccttttttcctctagacccaagatcttaaaatgagcaaattagaaacagacacaagcgggtctaactgtatttgatggctgagggaagagcaggcgaaaatcttaaaaaatactatctcctgattgcttatggcccactccctccaaccctgtctgcaggtgggtcatagtccaaagaccctatttccaaccctgaggtcccactgcaggcagtactatggcctcacgggaaggaagatgtatccagaagagaatgaggtatacaaccattgataggttcctgggataaaaagtttgctttgtcgacaccagcgtggccaatatggtgaaaccccatttctactaaaaatacaaaaagtaaccgggcgtggtggcgggcgcctgtagtcccagctactcgggactacaggagaatcgcttgaacccaagaggcggagtgttgcagtgagccaagatcgctccactgcactccagtctggcgacagagcgagaccccgtcttaaaaaaaacaaaacaaaacaaaaaaaaaacctttgctttcccgccttccaagaggaaggggcgcatctctgaggaaacaagcccggggaacccgcagcccggacggcatcctctcatctacacaacccgaggacatctccctcagctcccagaggacggcggaccatggtcaaggtcctctttccggcctttcacaactccaagccccgccccacaaaaccccctgcagtcctaccaagtcactcccatggcgtcgggccaggaaggtggcagaatcacacagtagaaacgcagggttccctgtccgcccacagaaactccttcagttccccaacacaaccttctgtctcagaagggactccggaaatacgtaaaaacagagcgccgggtccacgccttccccaaggaatggggcgtgtctcggcacccctcggtgacgcctccactgacatcatctgcggattcccgccccgaggtttctaaatccagacattcccgtttggctgagcactctaggcctacatccatgaagctaggagagcgacactcaaagactgcactattgagagaagctaacgttaaaggcagtgaatatattcgggagtccagctccggaacccgggagctcttttagtgggaggggcggcgctgatggcgcttctggcctccgaatgctagggggcgctgtgatcgccgggcggcctcttgggcgctgggagtccaccgcgcaagcgcatcctggcctttcttcagtccccacgtgcgatccttcccggcaactttttcgagaaaaatgcccaaattcaaggcggcccgtggggtggggggtcaggaaaaacatgcgcccctggccgatcagatcctggctgggaatgcggtgcgggcgggggtccgggagaagcggcggggtcgcgggacaggagaagcggaggaagagtatgtggggccccggctgagccgacggattttgcagcaagcacggcagcaacaggaggaactcgaggccgagcatgggactggggacaagcccgcggcgccgcgggaacgcaccacgcggctgggtgagtgtctgggatgaggtccgaggaagacagtggccagtagtggggcggggtgggcagctaaaaagtgtctggcaggggaattgcttcgagtcaacaaaggggtccgtattacacttgcaaaggagactgaaccctgtctagagccctccgcgtccactcctagttttaggcactcccttctagacacccccgaagttaggccaacagtaatcgatcgcgccactaagtgctcctagcatgtatccattggttttgtaaatatttatgggatacccactacgagctttgcgctatgctcggaattctatcgaatgtttgggtacagaagtaaacaacacaggcacgtctaacttaaggaccttacagtcaagcccagcagagaggcaattaagtagactcttagaataatatatttccatgataa

SEQ ID NO: 46535 - DNA, 1101 bp, Homo sapiens
ggagggaagcgggagacgctgtgagaagccgaaggggagagagtgtccttggtcccgtttgctcggcccgaagagaggcacagttagggtgccaagtgactggcagtcactgtcgggaggagccgattagggctcgggaaagcaagggaggcagctggcgtgggtgccctagtgaaaggccaggccccgggagtcttagcctcggagcatcctgcagattgctgtggggaccgggatgtcccgacagggcggccccggtgtgtccagacccgggagcggtgggggagggggacgcgtccgggcggtacctccagcatccagtaagccagcatcttccgcatgtgcggcttgatctcccgctgcacgcactggaagtaggaggcgcggggtacgtagcgctcctccaggcggagcaggctctgcaggacacgctggtcccccagcagccgcgggtccggcccggcccggggcgcgtgccgggtgccttcgcaacacagcagctccatactcgggcagcgaacaggcagggcgggagtgcgggctcgcgagtcccaaggcaggcgacgggccggagagcgcggggcgcgggtctggcgctggcgctggcactgcgcggcggatccccagcccgcccgccgcccgcgcgcgcgcgccgcttccctgacaggcgccccgcccctcgcgacgatgtagcaaccgtggaatgctcggacgtcgcaacgctccgaggggcggggctgcggcgccccggacggaaagggttggctgagcgctctcccctccctcccgcggccccattgggccgctgagcgcaagccggccggcttccgggcactccaggccctctggaccaccgggtgcagagaactttctaggaggtgggcctcctacccacccacgggccctcccattttgcttctcggactctagtcacccaggaaacaatttttctccaaaggtcattcattcacttattcattcgtcaaaccctacttcaccggctgcttgctctaaggaatgcgataaataatgtcagagctagttcttagtgaacgctgctcgaaagcctcacgatgtaatgactcactacatcttcacgaa

SEQ ID NO: 46536 - DNA, 885 bp, Homo sapiens
agtcaatgctcagactgagagttaattcacgagtaaagagcctagactttgaaatcagatagatcctcgttcaattccaagctctgccacttactagctaaattactttgagcaagtttgcctttctgagcctcagtttcctatctgtaaattggagatagaggtgtttactacctagagttgtggtgaataaatattaaatgagacagtacaagtaaaaacttagggacagctcccgcaacaccattcagctcctaagtggcaattacagccacattcctctgagtttaaaggttgtaggaaatgctttggggaagagaaaagtgaaggggccaaagaagagactttctggaattagcctttctcaacctgcacgaatcccaggggaattccaacagatgggtaacttgttccaatgccatttctagcagtgtctgttgccacccctagaaaggggcaggccttgacagctctttgaaacttgaggatttaaaatttaaatgtctttgagagcaagataaacacatctactgctcagcagggaaagggaaacttggcaggggccccagaactttccccacccccagccctccctaaacttcctcttgtggtttttcaagagtacaacctgttctccacagccaagccagtgcctggggcagggggccagggcgtgccaagggctccgctgcaccccaccctaccagcgagtgagggaggaaggtgcgtgcgtgggagaagagcagcttggaggtttatagttcttaaggttcacgtcctgcttacccgttttctcagtgcagccaccctccacccagttcccaccctcgactcccagcatcaatacccatgcccccaacacacatccctttctcaaagacagat

SEQ ID NO: 46537 - DNA, 1329 bp, Homo sapiens
attccatataatgccaggcacatagtaggtgttcaatcaatgcaaatgaataacttaatgctcccttagtaacagcaaccaatttattcagttattcctcttgttggcacttcaagagacacagaagaagctaagatcatcatctatgtatcaatcagacaccactgaggggtccctccctccagtttcatcccggtgcacttgccagagcactcacagactccccatccacactggtctgccctcctactggccttccaccccatctttgaggcatgagaagaccaacagcccggtaaagccacggggcttccagatcagctggagggggttgtgccgatgtgtgtacatacagagggctcagggcctttgggggtttctctgcccttcaattccgtgcagaacacctcactcagtgggaaagtgagccaagctttcggtgccaactaggaagtgatgaggatgcggcgaccccattgacccacccagcaccgatccccaacgcatggtctccagcctgagctgacatcccatctaccccggtttctccagcacccaagcctacctcctcgtcaggtgacctccccggagcaccgactggggtcgcaggcgctctgtcccgccgcctccggagcctgcctttggggagtgggggtggtcgcaaccaccagccgcgaggagaggattgcacctctcccccccggccggcatccgaacagagccagtctccacccctgcagtggcgaagtgtttacaaagtccgcgccgcgccgccgatccagagctgggcaggaagtggggaagagggggcggaggagacaaaggggctggtgctctgctcagccaagtttcggtccccggcctgactctcccaccccctgtacaccctcggcgaggccaggaggctcatccggcgccgcgcacccccgcccgcagcccccgccccacgcggcataggtgcgggggcggggcgccacggaggctcaggtgtgggcggcggggccggggcagcacgggttcccggaccgctgcctcccggcgttggcaactcctccacgtgctatccaggaagtaaacaacatcatgaggagcgacttctttttctttttcttttttttgagatggagtctccctctgtcgcccaggctggagtgcagtggcgcgatctcggctcactgcaacctccgcctcccggattcaagctattctcctgcctcagcctcccgagtagctaggactacaggcgcacgccgccacgcccggctaattttgtgtatttttagtagacacggggtttcaccatgttggtcaggctggtctcgaactcct

SEQ ID NO: 46538 - DNA, 1285 bp, Homo sapiens
gaaccgattttcatattaaaataggtttcttttaactcagtgaaaccgggcgcgttttcctggcccacaaccaagccactgaaggccccagaacacttcactctcaaaaggtcacgtgaggctggcgcggtagctcacgcctgtaatcccagcaccttgtgaggccgaggccgcggactgcttgagcttaggtgttcgagaccagcctggccaacatggcgaaactcggtctctactaaaaatacaaaaactagcggggcgtggtggtgcccgcctgtaatcccagctactccggaggctgaggcgggaggatcgcttgagcctgggaggtggaggttgcagtgaaccgagatcgcgccattgcactctagcctgtgaaacggagcaagactctgtatccaaaaaaaaaaaaaaaaagtcacgtgagccggggtcaccggaggcgtcccccaaccgactgggcttcggaaaaccaaggggcgcacgccgccccgccccgccccgccccgcgactacaagtcccatcgcgccccgcgctcgcgcacactacgccagaacaagatggccgacgcggcggccacagctggggccggtggctccggaacggtaagggcaggaagcgcgggctcggagccgagagagtttgggtatcctgcaactttcccctcgactgagcaacaagataatgcccagaaattcagccccatcatgagctccgactggcggagggtgttttcaggccgtaggcgccccctccttgggacttggctgcggcctccggagttggcggacctgtgtcttgattggctcgttcgctgttgggggttgggagcccggaacacccccgattggtctgaagatgccgttttcgccttcttattggccggccaaagttgaaaggcattcccgtttcaaaatatttagctttcttacttttttgtgcttttatcttttgccctcctctcctcgcggtcacctcttgttactgttttcattttccctttcaatgaaatggtgtgaagatgggaggcacaagagagggatcctgttttttctgcgggacacgtcttaatcccatcatgcgtgtttcttcagctatgtattctaataatctgctaaagtagaaagtaaaagacctgctattttatctcattgggactgtacgttttaggtaagcggagaagtggtctctgtatttaaagcaccttgggtgctcaatttttactcagttggccaagatctgtaaatctaaacattaagcactgatttttaaaataaaattatt

SEQ ID NO: 46539 - DNA, 409 bp, Homo sapiens
aaaaaaaaagaagaagaagagatgaccagcgtgatccttgtggaagaattaattgacattcttcccaggcaagcttcctccctccccagagatgtcgtcacctgatgggtgggcaggggctgggctatggaccaagcacaccctcctgagagtgcaagtgacatgcaggaatgggaagtgttgcactgtggttcataggtgcctcagcggggagggagagaaggtgacctaggagggctgcattcttggcctgtgattcagatgttggcactgatgagttggtagctctgccctcttttggaagattggatgggcaccctccccacctccaggaaagccctgccccagaaatagcctgggccctccagcccccttcactgcagagctttctacggcacagaagagatcc

SEQ ID NO: 46540 - DNA, 2067 bp, Homo sapiens
cctccctgtgtgatcctcaggctctgtgtgcattattattgcagctgacatttattaggcatctactaggtgcaaggcactgttctgagtacttcacatatagcaacccagtcttactgttagttttcacagtaaccctaagagacaagttattatttttattttatagatgagaaaactgaagcacagagggctaagtacattgcccaaggtcacacagctagtaagtgccagggccaatattgggacctgacagcctgcttcctttgccagtacagtgtttgctctcatactttccctctaacacaactctatgtctatagacatagagttgatgactgtagtccctgctgcccagcccagtctacttgagggctcggtgatggctgcttctttgtatgtgcctgacacagaccgggcagttaaacaaatgtttgttgaatgaatatgttcctggatgagtgagagtggcagaaagaatatgggacaagtgccgggcatggtggctcacgcctgtaatcccagcactttgggagcccaaggtaggtggatcatctgaggtcaagagttcgagaccagcctgaccaacatggtgaaaccccatctctactaacaatacaaaaaaattagccaggtgtagtggtgggcacctgtaatcccagctacttgggaggctgaggcaggagaatcacttgaacccaggaggtggagattgcagtgagccaagattgtgccactgcactccagcctgagtgacagagcaaaaccctgtcacaaaaaaaaaaaaaaaaaaaaaaaaaaagaatatgggacaaagaggcagaaaacctgtgttatggctctagctctgctaccaattaacttggagcaaagtaacttctcactctggtctcagttttctgccccttctgtaaatactctccaaggatcactttgactacagcgttctgtcagtccataaagtgtcccttctgtgagtcagctcacctgcgtcgtgtgggcagtgacctggacactcagggtcacccctcgatgacagggtgttgggacagacaactgtattgcctcgaggttgtcctctgactccagagatgccaaaggggcagcagggtagaggcaggagtaggtgggagggagagttctcaaagttcttttccaggagccccagaccaggcaggcagggctgggcttgaggtcactgttggcctcagacacagggctctgactgctgcagtcagctggggagcctgctgtgtcccaaccttacactgctccacccttggcatcaggaaaatgacagacttaggagcccagggtgctgccagcaggggttgccatgtgcctcaaacattctcaggggagtggagtgcatggccctccgagtgtggcagcccacatcgaaaggggcagaccaacctgtgtacagtgaagcaaagaacatgcaaaagagcatctgagcgtgctcctggtgggcctggctgcagcacctccctctttgggccagcctgggcagccggccacagccactccctgcactgtggctgcctggggcagagtccagccctggctctaccagcttgggaactccacgaaactgggcctcagcacttcctcgtcctcacacccagacaacacccagaagctaagaccatcggtcacttcacttacttcacagaggtgtacaagccagcaactcagttcagttgaagcagccctttaattttttttttttttttttttttttagagataggatctcactgtcacccaagctgcaatgcagtggcaagatcatagctcaccgcagcctcaaattcctgagctcctgtaatcccagcactttgggaggccaaggcaggtggatcttaggtcaggagtttgagaccagcctggccaacatggtgaaaccctgtctctacaaaaaaaaaaaaaaaaaagaaaaaaaaaataggcaggtgtggggcaggcgcctgtaatcccaactactcgggaggctgaggcaggagaatcgctatcacttgaacccagggggcagaagttgcagtgagctgagattgcgccacgtcac

SEQ ID NO: 46541 - DNA, 1129 bp, Homo sapiens
cgttagccactgcgcccggcctccttttgtctttaaaacatgcatttattcatattttagtgggattttgaaaagaagcagagataagtggaagttttcagtctatgtataactagaagtcttgctcattcaatcagtcagtcacccaacagaccctgtgggctgtgtccttaagatgcaaagatattaacaggaaccgtcccttcccttccagatcctatagcctgtgtagggtgaggggcaggatccccatgaggcgtcttcactcccacaacaaacgcctcctcccctaccctggagaatgggctccctcttgaggttcaccttggtaatgcagcctccatggacgcccttagaaaccctttaaagaaaccggccaaggtaccaccttgttttgagtgagataggcccaggaggcaactgaacctgtgctcagggtccttctgtgtttctgtggagtagaggggcaagcaggcagccttagggggggattagtctggcctggatcactgcccctcctgtctcttcctggtttgtcttcctacctctctgcagctgccccatcctccctcccctcggccccattccgccaggtggagcctcttcctctgatctggcttctgtcccaggagggattcctgcaggcagagcagccagggaaggcaggaatcctccctgtgtatgctgtgtgacctgtactctggccctctgtgccctaacgcataccttgtgcatactgcttccttggggccttggtgttgatctcagtcctccttgccttggcatccctgtctcaggggattccattcccaccctgggctggagacaaggggtgggggccctcctccctcaaagggagcaagctctctgtcaatggaattgttgggcagagggccacaaggggaggactgagggagatggcgctggagtgaggggctcgtggggtccccctggctctatccagcccttctgcagggtgtgaaggcttaggagaaaagcatgatgatgaggtgggaaaactttggtaccaccactaaagtgctcgtgaacctgagcaggtgatttaaattttctgccccaagccccttttgtctcacatggcaataataatacccaccccacaggactt

SEQ ID NO: 46542 - DNA, 2560 bp, Homo sapiens
ctacagttgtgcgccaccatgcttggttaattttttgatatttagtagagacaaggtctcactatgtttcccagtcttgaactcctgggttcaagtgatcctcttgccttggcctcccaactgctgggattataggcatgagccaccacacttggcctttattttggttttaaaagaaatttaaaatattgggccctaggcactgtgcctactgggtaaactgacctgcccacatcccctgcccagctattgtcctaaattttgctccccttacaacaaagccccttgtggcagatgtatcttcagaaaatggcaggacgatcattctggcttcacgcattcctcccatcaaagggaggagtctattatctttctcttcaacccggaggaaactttctggctgccttgttgaagataactgcagaaatgacacaatgtgacttccagggctaggtcatcaaaagtgataggtttccaccaggctctctttctcagaacttgcccttggaacccagccaccatgttgtgaggaagcccagagcacatgcaggggttctggctgaaagccagtctcaaccaccagacatgggtgaatgagccttcagatgactccagccccagcttctgagctactccagccccagcttctgagctaccccagctaataccacatggagcagacactatccctgcagagtcactgttttaagctactaagtgttaagtgttttttgaggtagcaatagataactgggaaattctcaaacctattttgcatcctctttttaaatctcttattctttcctcaacttactccaactggacgttcatccccatcactccacagaaatggcttttattgtggtcaccaatgatctacttttttttttttttttttttttttttttttaacctaacctgccacagattcatcacagttcaccaaactaagttctttctccactctacatttcaaggacccacactcctctgatttcactccagcctcactcattgctcattttctttgctagcacctcttgcttttaaccaaatctctaaaagctgggagctttccaggcttgtctttagtactcttcctttgtttacccacacttgctccctagatgatctcattcattcccatgccattacacaccatttacaggctggcaggttccaaatttgtatcttcagcctggacctctcccaggaactccagatgcatgtattcaactgcctactggacatctatactcagattgcaaacttagcaaggccaaaaccaaattactgatttccttcccgagtcccaccttatctcttctccacctcagtaatggcactgctatttacgcttaggtgaaaacccaggaattatccttgaatgctctttcctttagatttcacttcaatctactagtaggtcatttcatcagctcttcctgcaaactatactctaaatcaaaccacttctcctcacctccattcctgacattctcgcccagaccagcatcatctcacctggtccaccgcagcagatccctaactggtctccctgccctctcgtcactcctctttcacccagcagccacagtagcatacagcagatcctgccactctcctgctcaaaccctcctttagctttccatttgctgagaataaaatccacactcctccccatgcctatgatgcattacacgatctagtccctgcctacttctgtcttcatggtcttctacactgcaaacacaccaaactccttctagaatcagtgtgtctttgcatgtattgttcctcctacttggactgtttttcctccagattttttttttttttagatgggagtctcgctcttgttgcccaggctggagtgcaatggcacaacctcggctcactgcaacctccgcctcccaggttcaagcgattctcctgcctcagcctcccgagtagctgggactataggcacccgccagcaagcccggctaggttttgtgtttttagtaaagatggggtttcaccgtgttggccaggctggtctcgaactcccgacatcaggtgatccacccatctcagcctcccaaagtgctgggattacaggcatgagtgaccacacccagcttcttcctccagatgttaacaccactgcctcctcctcagagagaactttcccaactccccctcaggtagccactcaagtaattctgatattatcccattttattttcttcacagtacttaattgcatctgaaactatcttatttttttctctacttgtctgtctctctcactaaagtctatgatctttgaggagagggacttcactatatacattccagaattcccagcgtttagaacagtacttggcatgtacaggaaactcaaatacttgttgagtaactgagcaaggtccttggcacatggtcaatgctgaattaacgtcagctatcactccttcattttacaagacaattcctctttgactctgtttagtgtctagattagcaggtatttgttgagataaaaatgataatgggattttagaactggaaaaggcct

SEQ ID NO: 46543 - DNA, 2348 bp, Homo sapiens
ttaagcccaggaggcggaggttacagtgagccaagattgtcactgcactccagcctgggtgatagagccagaactgtctgaaaaacaacgctaagggctgggtgcggtggcttatgcctgtaatcccagcactttgggaggccgaggcgggcggatcacgaggtcaggagatcgagaccatcctggctaacacaatgaaaccccgtctctacttaaaaatacaaaaaattagctgggcgtggtggcgggtgcctgtagtcccagctactcgggaggctgaggcaggagaatggagtgaacctgggaggcggaccttgcagtgagattgtgccaccacactccagcatgggtgatagagcgagactccatctcaaaaaaacaaaaacaaaaactctaaggtaaatgttatccctaccctggaggtaacctgaggtcttttccagctggttcttgaacagtatagcacacaagcatctaaagtatcatcggaatggtactgccatttactgaatgtctgttacctgctcaatactgtgcaaggttttttatcagttatcgaatactccaaccttattaagctggagcattaaatatatgtcaaatgtaagtatgtaggtattatttcctacagacttattattacctttactaatgagtacactgaggccctgacagggttaaatctcttgcccaagtttacggcagtcagtgggtttgaactcttatctgactcatgtctgtctgactccaaagtccatgtttgctctattctgtcattcattagtcttgtaatagaactaacttaataatgtaatgtaagacagggatggttgcagacaactagaaatgttaagaaactagactaataatttaaaatgattgctttatgtattcactgtggcatgtttaaatggtcatagggccaggaacatatgccattctttcaaagcactgaaacttggcacttgaactagtttagtctgtcttaccagagatctgtagttatactaagactcttggatgagaacatgattttatttaatatgaagaaaatataggctgggcatgatggctgatgcctgtaatctcagtattttgggaggccaaggccgaagaatcacttgaggtcaggaatttgagaccagccttggcaacaaagtgagacccccatctctacaaaaagattaaaaaattagccatgtatcatggtacatgcctgtggttccaactacctgggaggctgaggcaggaggatcatctgagcccaggaggtcaaggctgcagtgagctgtgttcatgccactgcactccagcctgggcgacagagcaggaccctgactccaaaaaataaaaaaatgagctgagtgtggtggtgcacacatttagtctcagctacttgggaggctgtggtgggaagatcccttgagcccataagttcgattgtgtagtgagctttgatcgtaccactgcactccagcctgggcaacagaacaagactctgtctctacaaaaaaaaaaaaaaaaaagaaaaagaaaaaagatcatctcacttcctacctgccttctggttcattctattttttttcttttttttgagatggagtttcactcttgttgcccatggcgtgatcttggctcatcgcaacctctgagttcaagggattctcctgcctcagcctcccaagtagctgggattacaggcatgcgccaccacaccctgctaattttgtatttttagaagagacagggtttctcatattggccaggctggtctccaactcccaacctcacatgatccgcccgcctcagcctcccaaagtgctgggattacaggcgtgagtcaccactcctggccggttcattctattttttttttgccattacttttaatggcaaaaactgcaattacttttgcaccaacatatattatcaaatccactcttctctcaccatctcccatacccaccatggacagaaagtgtgacccaggcattaattctaattttcaggatatgcattttactcagaggcctaatttaaaaccaacaaaagaaaaccaaaaatcttcttagcctatcaagatagctatatcctgataagctaagaagttattttgtttatatcattttttcagtactgtacttcatgccaaacttgtttatatcaagaagcgggcttcaaatatgccaaatactttcgtcgaagaaatactgctagttttgggccaggcgcagtggctcatgcctgtaatcccagcactttgggaggccgaggcaggtggatcacgaggtcaagagatcaagaccatcctggccaacatggggaaaccccatctctactaaaaatac

SEQ ID NO: 46544 - DNA, 640 bp, Homo sapiens
gagtcactatgataacaaagcataattccataattttgtaggtcagactcacactcaattataggcattaactaccatttacagacttccatttgccaaaactgtcatctggaacaacaactgctatcataaaactcaagccaaaataaacactgcagacagcaatagaaactttttcccacaggctcaaaaataagccctggcatgtcaagtgtgcaagcatacacacacacctgctgcttttacaccctttagtcttttattgaccaaatatattaattgtgaagagcagcaccagtgtggtagacatagttgtaacacctgctgtatgtctgttgttttaggaaaatctacagataaatcaaaataacaaaactatagtctgttttgggaaaccgtggccttctgtttttgtcagaaggccagactgccaaagccccagatggggcctcgttcaacagcagaaggagcagatgacaagacaaaggagacagttatgcttgaccctgcagtgactccaaggcttaccttgttcaagcaagaaattactgggtaagtggtgtttcttagggaagatttgaaatgatggatgtattagccaaaaatcatcacatccaaagggtctaaaacgattgttcat

SEQ ID NO: 46545 - DNA, 1418 bp, Homo sapiens
ggaaatcaaaactattttcataaaaccaaaacgtcatttacaacttttccactcattctcttaccagtgtacagtgaagttttcccgtgacagcctgaggtgtgatataggaaaagattaaatacagaagcagatttgaatctagcttttattaagccagaaattaaagagagctgcaaaaatgtaaaacattgctgctccttactcagtttgttcagaaaatatatttttcataaagtattagttgtaacatgtaatgagttagtgttacttttaaatcaatatatattcttaagttttattttccaaaaagctaaatatagatagcaaaaacccacaaaaacaaaagctctctggagtcctgaactccgaaagtgtaaagtggtcccaaggccaaaaagcaggagaaccgctgctgaaaagtttttgctcctcctgcaaataactgcgcagaggatatctaacccacttctctggcttgagaccttcatctaaatttggatgccaggaaagcatctcaatttagttccatgggaagagtctgatatcttgcaccagctcagcctctaattttcgcgaggcaaatttcctgtcttctctgagcctcagtttattttgcaagcgtgaaaggaggggttttggaacatacgaagtacaaaatcttttccagctctgacattctacgattattcttgttcctatctttgcctggactcactaacttatatttaattccatgagagaattctgataaaactagcccctttctcgtcactttcctgtaaacggcgcgaggtgagggataaatatcaggaaaaatcctgatgggcagagcggctggtggcagggaaacttaaaagcaactatcccggtcagccctcctagtctccctagccaatccagtacctgccagaggcgccggcacacagcaccgaacgctgtccgcgccgccatcttgccggtcccgacctctcaggattgcttccggggttacagcggcgtcctcagaccatagagttccgcaaaagaagagagtacatcctcatgttccggcgctggaacaaccatagagacatgaacctgtgctttttgggggcgggacagttggctggccaggctggtttggctccggccagtgtctggatagttaccaagccctattaatgttttcacctttaaattgttgtgtgtgtatacacacacacacacacacacatttatttatttacttattttttccttttagagactgagtctcactcggctgcccaggctggagtgcagtggcacagtcatagctcactgcagcctcaaactcctgcctcaagtgatcctcctgcctcagcctcccaagtagctggactacaagtgcgtgccaccacagccgactaattttttgtttttttttttaattttct

SEQ ID NO: 46546 - DNA, 4307 bp, Homo sapiens
agactctgtctcaaaaaaaaaaaaaaaaaaaagtaaacatacagccaggtgcagtggctcacacctgtaatcccagcactttggaaggccgaggcgggcctcagacggatctcttgaggccaggggttcgagaccagcctggctaacatggcgaaacctcgcctctaataaaatacaaaaattagccaggtgtggtggtgcatgacctgtatagtcccagctacttgggaggctgacccgtgagaattgcttgaacccaggagtggaggcttcagtgagctgagatcatgccactgcactccaggctggggaacaaagcaaggctctgtctcaaaaaaaaaaaagtaaacatacttactcaaatttgaaaatgcaggtttaaaatgcaaataaatcggggtggacttagaggagctgacccgtgagaattgcttgaacccaggagtggaggcttcagtgagccaagatcgtgccactgcactccaggctggggaacaaagcaagactgtcaaaaaaaaaaaagtaaacttacttactcaaatttggaaattcagatttaaaatgcaaataaatcggggtggacttaagactttgtggaggatttagtgtaagacacctgtatgtcacagtgtgctcccttgaatcacagtttgagtcataaggtttatgactcagtttgagtttatgacacagtttgagtcataaggtttacgaacccaagtggttcatccactgcttgaatagcagaaatgtatgtcctggtcttcggagtcgggggacactttaataatgatcattaaatttgatcagccgacttaaacttgttgtctacggaaaccaattaacaggtaaactagcatttatccagcattgagaagtcatagcaatggctagaaagaagaaatatttaagccaaacgaaacgcaaaagattaatattttattttcagagcagctgatgcaatattgaatcaggttttcacaaataaatatgacagtgtctgtttggttacatctccatttgatgaatgcccatctataggaactgtaataactttctgagaggctaatgattagaatgtgttaaataaaatttccctggttccctttttgaagaagcattgtgataattaagaaaaaaaaaaagcttatcacttggaggggaaacaacctagaatgccccagtttcctttttttttcttttttttttttttaaggaatgcacctttttaggacaagtctataaaacatctttatttatttgttacatatgatgtttaaatataactttgctttcaagcttcaaactttttttaaacccctggtaaaataagacttttggttcaccttaacaaaaactgacctaggaagaaacatttttagcaaaatgttattataaaattcactagaaaatacggtcctcttgttgccaaaatgttacataaaatccttattaaaaatacacacgttacaaaagaaaaattatgaatatgctatacatagtgctttaatatggaccaagggacttgcattccgggaaaatacagttaagcacactagatattatgatgtcaacttataatagtgcaaacctgaataaattacatcctgatatggaaggcatgcaattcatctgctgagaatagaacataacgaagccagaacaggaagcaatcacaaccactatttaaaaatgttttcctttttattacattaatttttttcaaaaatacttttctttacaatagaactcctagaaaatatttacaaccttcctctaataaaatataacagcagttaaatatatttgaaaataagatgggtttttccataaaatatatctgttaactttttatatacaagctttctcaaagaggtctaaattcactaatgaaaaaccatctgatagtaaacagtaaccgagttgagacattaaccattaggaagaaaagatctttggggtggggtaaggggagaagctaaaacacaacacatacatgcaggcagaattatttcagaaaaaaaaataagtgcaacattgtactaggaagtccattctttaagttgatagtcaagaaatactaattcaggaatttgaactgtctcgttaaggaggagttctttggttgtttcaagtcaaaaatccttatgctatactgcatggaaaattataagtaagctgtgcattctatttttgccatggcaactgagtttattttttaatgtttaaaactggaacagctgggcaaatctctaaacagaggcaatacatttgctttataaacacttttctggatgtttgctcctttgatagataagcttccatagacccaatagcagcacccttctaggcttaccctcagacactaagtggagggcagtagtccctgggagagacgatcagccaaggatatgacagctgtaatggttcggccacaaagttgatgcacactgcccaggcagttcctgactcacaactgcttggataaaacaggatagcataacctttctgaaatggcagcaaatgaaacttttttccccctctaaacaaaagatgtaggaaaacgccaagacctctttgaaaatagaatgatggaaaagaattttatttttttttctgtccatggctttcctgaagttcagagaccactgtctgtgtggggctgctgtggctcacagccagttcccccccatgagtgtgtgctaaatgcttttgcagagtcaaagacgtcaggtcctactctcatgcttctgctgatattctctctcatgtcaagctatgaatgttgtcagcaaagtggcccagcgtgataggcacacctacgtggagctgggaaccagcatacctggggtgggcgatgcctgaaaacaccggcccaggaaatcacgctgcattaactccaaaaggggagttgcatgaagcaggatcctctctgtactggcgctgtgtcccagcctgacttttgccctaacggtgggatgggtcagtctgactcagctcagaagcctggggctaaatggcatttttgaaggattacaggtttattaccttcaagtacaaacagcaaccctgctgacagggacaggaggaagcagagcaaagtcatggaggttggagaagtctagaagtgctttggtaagtgacttgtgatgaatacattcattgtttgaatgcaaacattatagctaaggtgtatctgaagccatttttgttggccttcaatgctatttgtcttgtatttgctatcgtatgtgttagaaaactatttcttatagctaacatcaaggtaaacttcagtccagcggatgtgaattacagcaaaatcccagtgaatgcggtttcacagtacttccaagtggcacaaagtaatttcagaactccactaatcattaacagcgttgcaaaaaagaataggcttttctgatttgttttttgggcaatagaacactttctggcattctaggtacttcaatatgtgtccttcaatcaccctgaagtgaaagcagtcctggcaacttaatatttgcctccagatgggtctctagtcagttcatgctgaaacacagctctgccacccacaacttggagctgaccagcccccagggaacatggaagaggacaggacacacctgttctagaaaaccaggtcctcagtaaacactgctgggaatgaaagcctaaaattatacagtactccattcctgtgaacgggccaaaggatgacgggcaacacaggggaaacctgttttcacatttggtcatctcctcacatgtcgtgtgagctggaggagagccgtgtaacacgagggcttgctttgcccctggaaagctgcccctagcatagtatctccaggcaaagatgccatgctcactgcaaactatggaatgaggtcagaacagaatcaaagtaacgcttgatgggaaaagttggccccaagaccccagtactaagagggtcgcctgcgtctcacacacacacactcacagcaagctttgggataaaaggcaaccgggatggttgacatctgaatgcaatggaacatgaaggtcagcttcagtccctactgggaatgatttcatgagaaggtagcccagatgaaacacctcttaaagatagttgtgccaattatttattcccccaaccccccacaaaaacaaatttttttaaataaaaggaaaagaaataggatttttttttctaaacctgaataaaatgaccacttttaaaacaggtagtttaaaagggttacaaaacaagcaggcagtccaggtttcctgattaatgaagatggaggccgtgggttttc

SEQ ID NO: 46547 - DNA, 1960 bp, Homo sapiens
cacctccattactcgtataaaagatatgggttcgatggatgacaggacatagaaccacaggaatagaatgtaattcattcattcctttgacaagtatttgagtgcctaccctatgccagactggcaagtccttgagggtctaccatgtgccaggcagtgttcttgaagctggggatacaaaaatgaacaaacgagattcggagaataaaactacagttcccacagtatctttctctttggcttttttccagggggcgctgctttccgcgactgtcttcccatgattctcgttgggcagaaaagccccgcccgcttatctgccatttaagccagcgccccttgagaatggactacaactcccacaatgcattcgaggggcaccgtgttagggcgccacctttttcccggctgtgctgtacctacagcacccagaactacagtacccagaaagctccgcttcccctcctgggtgttattgcccctttcctggtgcaggacgcggtagtggccagcgagagtgtcaggcctggggttttctgtgtccttccctgggtcagggacgagccagtgacttgactcttgggcgctaagcttgggagggagcgcaggaggccgctgtccttcctttccggttcacgtcacccttctctccctctgttgctccacctgcagccacttggacggctccgggactgattgcctggggcaggggtggcagtcgaggccgccggggccgaggtgaggctgcagctctccgggcggcggtagcgctggggaggaggaggagagaagatggcgtcggagctagagccagaggtgcaggccatcgaccggagcttgctggaatgttcggccgaggagattgcgggggtgagtgccggaacccgggcgggtgcgtctgcccctcgcaggccgcgcctgtggggaggaaccgactcctggacgtcctggagcagcccgacccagacttggggaaacagctgtgccggccctcgccttgtggggtaatagcccggggaggccaccgatcctgcccctctctttccattttcaacagctgccagagctgcgctgtgcactaactacgtttactttccctttctgcccaggagaacccacggctcttccatcatacctcctttcccccagcctcccattaagtctcccaacacatgggcctttgccctttatatcagctcttggaagaggagaagagacgcttcttgtgtttttggtataatcgccctagtttatctagttaattgcttttcctgagacaagcgaagccgtgtgctcctccgactaaacatgccaccctaaccgagcccctcttttgtttttgggactgccccaggcaccaagaaggcaaacgacactacccttcgttatccgtttcagtgctatcttttttttttgcaccggtttgattagttgacaacgttgatgcatgtgtggaaagtttactgagtatgagaaagtagtcgtggagtctgggaaattttaaaaatattttttctaggagttaggggtaattggatggagaacaaatgttatataacgttgatagagcagctttcaacaaatactgtataagctaaacgtgagaactggtcacagtgtagtaggagcagttatattccaaacgtaaaaccgttcaaacgcactattgcattaaaactgtaatatgaatatgctagtgtaaatagcagagttgtaggaacacccattagaagagattgccgagaatgattatgaatggaccaagacagcttgggccccacctctaagacctccaattaaaaaggctgctaggaagggagtgacccgtgaataaaagtcagcaatctgaatgctacgaacaaaatttgggattgggggcactgtggagctgttggtcagtgagtagttattttgcgtgaattggtgaggacattaagtccgggtagaaagaaatgtcagg

SEQ ID NO: 46548 - DNA, 642 bp, Homo sapiens
ccaggtagggtcgagtcagacagaaagaagaggtgagggaaagcggctgcctcaaggcaggctgccctttccctgaaaagtcactcgagccccaggttggtgggtgtgttgggaagagcagcccgctggagccagtgcacaggctgttccctccgacacagtggtcgagagtctctctctcaccagcacctcccacagcccatcgcagcattttacttttacatatgccaagaatactttagaaatgctttatcacattgcactatcatgactcgctaagtaaacaccagcaagcatttaatgagtacctgctgcatgccagctaccaggcagggctaggaggtgacttccaaaattacctattctattccagtgctcatttaaaagatgggcaagccaaagcgcagagtgactagtgacctgcccaaggtcacaagaccttgaacaacagaaccaaaacttcaccctagatctcatgacttccccttcctatgctctttccaacatatccagacaaacatcttgggaatggatgctcagggttgaaaggttggaaaacaagggaactaactaggaaatttaaacttctgggactgaatccatctactttgaatgaatgggacaaatagccaaatagtacct

SEQ ID NO: 46549 - DNA, 3055 bp, Homo sapiens
gaaagtccaacgtggaaagtatttggtaggagtgaagaacagagtgacaactgcttagtcccactggatatttcgctcctcttcaggaagaatactccagtttggggaggccatatcccgggccagccagttaaaatcgtcaacatcgttccagttatttttgctcctatctaaaccagagctctcgaagtccttgtcgatctccgggtagctccaggtgtaaggggcgaactggatcccactgcagtcctccacgatggccctgctggtcacctgcaggaagatgcgggtgtctttcgtactgtgtatgcggagctgttggcaggccactgccagcacgcagtcactgcagtcctccaggaaaacagaggtagacaccggaccgcagagcagcttgcagctgtgggccttggttagccgcagggtgttgggatttccatacagtctgaccgtgcagttgctcagttcggtcaaaagaacgtcgcgctggtgcaactcgctggctctcttctccaagacttgggactccaggttggagaaaccgcagacccagctggggccgaggtctccttccgccttcttgggcagcggggagtcctgtatgctttcaactgccggggggatgccaggagccgcgtctactttggtagacgaagcagcatcctttccccgggtcttgaaagcgaaacgcttcttgggctgcagcccccggcgccgctcggccaaggccgcctgcagccgcgccagcgcctcttgtccctgccgcaggtcgtaagcggctaggaaaaaaactgagtcgttgattagtttctgcagcccctggagccgagaggccgcctcctccagccgctcgaccgactccgcgcgctccagaagctcttccacggccgctcgctcccgaacaaaggtggcgacgaaaaagtggctgttctccttctctacctcctggttctgccgcttttgtttccgcctttcaacttccagctgccgttcttgttcgcgtctctgaagccgctcaggcaccaggctcaggtcccgctgggactccatgtctccggtcctgacagcagcagcggagcaactgacggactccatattggcttcaagcttcctctctcttgtcttccttcctccgggcgcgctgtccgtgaggcctcccaccaacgcgtccggtgattggcctaacatgatgatgtcagatccccggccttattttcttcgcctattggttcctctgcgtcggagggggcggggagatggggcggggccgactgactatgggggtgggaagacaaaggttcttgtggatgggtggggtgggaggcaggcgggggaatcttttttttcctcttaaaggggcaggacttatatccgggattgtggggtgagttgcagcagcggcagctgcacatgtgggtttgtttataagaacaaggttagaaactcgcaggcctccccctccccccagctcctccctactacccccttacaggccggagatccgctactaggggtgtgggtgggagggatgagtgcgtgtggtgggttggggggacaggtagtggtgagaaagatggagcgggggggaatattgcaccgcctggcccgcgccggaggaagcagcagctggaacagctggctggggagccgcttgcatgcctccggttttttcttttcccttccaccaccccttcccccaacccatttctgcctccccgtagccctcatccttaccgcccccctcccccctatccactgcagttcggcgcggcctgggggctcctggatccccgcaggcagttactagggcaggagaaggcaaggggcactgcgatgggagagactgggttcctcactgcaacctggttcgaggggccctgggggagtccataaaaggattactatttttttggccaattgctgcagtcggaggggtgggggcgggggaaggtgagatccacacccccttcctctttcttccctgccctccccgagctcggtcccggccactccctccgcagctgggcgtcgccggccgcgctggggtgagaccctagccccgggctccgtggctctctggggcggtcggtcttaggaaagcggtgggagaagcggtacattatttctaggggtggtgggagggatttgtcaccggaagtgaatggcctagcctaaagtcgggaccaacccgaggtgtgggtgggcagccaagacggcgcagtcactggcaaaaacccgaggcagcgggcagggcgagaacccgagacgcagccgctgcccgggcgcggcagcctcgcatgcttcgctcagatctgcggagctcccgaacctctttaaccctgcccgcccttccaaccctaggtttcctccttatatccccagttcccagcctccatcgtttaaattggggtatttaacgacccaagaaacttgaaatttcaccgatctacctgcattttgatgcagagaaagatgggaggaaacgcgaaccattgaattaaatctgagttaaaactgatctcccattttcacgccccactctcttcctttccttcccacttaaaacaaacaaaacacacataaattgctgggccagagtatttctccgctgagagcacagttcataccgtgtggcagattccccgcgcaggcggggcgcgggggcaggggagaggcttgtgtgtccgcgtgcctgcgtgcacccgatggaaaagggggtgccgaaaaacaatggtgcttactcttgtgcatagtcatcgttttcactagtcttgttttatgggcagattaggtgaggcttctgtttttgcttttttgttttattttgttttttttttttttttttgagacggagttatgctgttgttgcccaggctggagtgcaatggcgcgatctcggctcaccgctatccgcctcccgagttcaagtgattctcctgcctcagcctcccgagtagctgggactacaggcatgcgccaccatgtccggctaattttgtatttttagtagagacggggtttctccatgttggtcaggctcgtctcgaactcccga

SEQ ID NO: 46550 - DNA, 4166 bp, Homo sapiens
tgagccaccgcgcccggcctgggccacataatctaaatactttggatactagatagtttacagagaagtttcaacaatttgagatttgagattaaaaataggtggtagttatacttggaccaaagaatgttaaaagattgactagctctcttttaagaatgagggggttatgtaatgaaaattccgcaaatatagagataaaagatatctacataaagagaaggcagtagaaaatgaatgttttgagagtgatttactctgcctcaccttccttttagtcactgaagttttgttttcctttttaatgttcacatacgggcttcacaggtaaggtttcaagaattttggaatggacaaagagtgttgcaaaggaaagcttagtacatttgaaagttaggatgaaccagttatttgcctaataactaagttaaaagtcgttttggtttttaaaaagcatatgcaaaacgtattcactgaggcttgctctaattagagttctaaacaaatcttgtagggttttttttttttgtctttaatctccccccttcccgtgtcaagttaaactgggtgggtgggtgggtgtgtgtgtgtgtgtgtgtgtgtgtggagagagagcctgcaagagaattagcacgcacctcgtggatcttagtaattgttttaaagccaaataaaactgtttcttgaataaaccaatacatttctgaagttgaaaagaatcccaaaggaaacgaatgaacatccttgcagcttgattttccaaaaaaaaaaaaaaaaattttttaaattaaaaaaatcctaatctccacattttttgccaggcgagaaccgaagtttggaggtagacgagcaggcgagcggtttgcccgggcgcagagcatgaaggccgggcgggcgcggggagcggcgccccggcccggcgcgggggtgagcgagagagagagcggagcgcgtgtggccggcgccgctcggccgggagctcccgcgctccggcccccggccccgcgcccgccgccgccgccgccgccgcccctgttgcgatggcgcagaaaccccgttgacaaggcactgctttttcatgacggtgagtttccctttgagtgtattataattttgtgataaaaatttcaaggagaaaaaaaaaacacacaacctccttcctctgcctctttccttcggggaggggaaaagcgagggagggggggctggagatctgtctccagactgaaaagaaaggagcaaattaaacaccgagttgccaaaaccaggatattaggtttcagcccagagagctattggctaaggctgtgttttttttttttttttgggggggggtgggtttgtgggtgggtgatggtggtggtgggtggatgtttaatggacacggagaaaaggggaatcgagtgtttatgcctttcccagcgctgccggggccccgggaagaccaagttcagtgtctcgggcgggggcgcaggcgggcagggggcggcgaggccgggccgggggcgcctcggcggggtgggggcccggcgcctttctttttccttttttttcttttccgcggatgcaaatttctggagcggggagagggagagcccgggaagggggtggcgtggcggttggtggtggggaggggaggggagggaagccttttaatgactcattgattgagccggtttaaaattagttgtgtgcgcgagtgtgagtgtgttttccgccccccggagccgccgggagccgggaaggagggagcagggctcggcgaggggaagacggcgcggcggggccgcgagcagggggcagggagggcctggagtgacggcgggcgaggaagaaaaataagcttttccaatctcctcccctctgttttccccccctcgtttcttttctctctcggaagctctagggtgtgaatcacattttctttcttctcggcaaaatggaccccgcgtctggggagggggaggggagagggtggggagggaggcggcggagacggggtttatttttcatcctggcttccccattcccgccgcatctgcgggcggccgcggcgaggagagcaggtccggggtgcggcggggagagctcggggcaggcgagtcgccccggccccgttcccgctcccgctccgagcccgcggcggcggcgcgcacctgccgcgggactgccccttcccagccgcctcgctgccttttcgaagcaccgccgaggatccgcggccgcgtccggccgagcccccagccgcgcggaggaccggcggcccagccgggcgtctcctgcgaggcccgcgctgttcgccgcgccggccagaagagatgtgcggctgggacggcgcatttttggccgagtgcgcgcgggcgttatgctgttcgcgcccccccgagtcgccccaaatgcgggatattgggtgggggggtgcggttggaaggcgctaagatggcgctgggcctggcctgtcgccagggctggtggcgcagttgctcggcgggcgccatctttctcgcggcgcgggcggcgccctccgaggacatctcgatgaccagggcgccgcgaggcccggggctagcgggagccgagagcagggtgctgaattctggagatgggactggggtcgcgcggccttctccttccccacgcccccagacccaaaagacgaggccgccggctcggagcgggaagggctggggccagcttcttcctcctaaccacttgtttgtgatggaagaagggggctgggggtcgagcctcgcggctgatgggttccctccctgaccccgcacccccactcctcccagtcgaaattggaggtgaggcgctcctgccattttctctcctgcggtctgagagtggacgtctttgtcttctctggcccggcgtgggggcagggcattgagccttttccttaattcttcagttattgaaagtagagtccaaccaggttacaaaactaaaaaaaagagtccaggacattgtctgtctgccttccggtagcatggttctctgtgggtaccctacgcttcgtttcttagttttactctaaaacaaccctgaggagacatttactagttgtcagattacgggaaggtgatgggttccagttttttgaaactttttttgttggctttcatattacttcaaatggcagtgaattaaaacagtttcttagaactctaatctgaaaagttaaatacgctttaaaacagtctgaaactcttctaaaaagcaaaactgcattattaaaagcatccatgtaagtatctgttggtagtatctattagagatgggggaggggtttaacttttacattattattgaaaagaggaggggaaaggtctataaagctctgatctctctagaagtccacatacatggaaagtaaatagttaatttctagtgtagaaaaataacaccgtggtgccagtaggtgtgtccttgtgtttataaatatacatagtggatgttttagaccatttaatgagacctattatatattgaatacctgctgtatgccaggaactgtgcctgatgctttgtataatttctattatatcagcccagaaatagtgattttatgatctgtctaccggggaatgaactaacgttcatagaagtatagtaattgttcgaggtcttgcagttttaagtagtaaagttgccattggatcacaaaagctgtattcttccccctacacctatggtttccaaatgtgagcatcagaattaatttgggagatgtttttaaatagagatttgtaacatcacctcttccaccatcatttgctagggccaactgggtcttttaataatgtgtcaggcactccaacttcttgatgttcaatattgacattctggcccaccctgcacccgctatatccaaagatctagtattccaaagctctccaggtgattccagtgacacagacacacgtttggactgtcttgtactatgctatgcactgttctgctcttttttgaattggaacatgagaattgaggtccatgtaattttgagtttcagtagttttttgctcacattagtctcatttttgtttttcctcttgtagctgccatttatcaaatcgaaattatttcctcagagaaaaaggtttaggtatcctaagactttaaaatctcagtacgtttttttttaaagtatgttgtct

SEQ ID NO: 46551 - DNA, 1500 bp, Homo sapiens
aaaaaaaaaaaaaagagggtgttgcagaaagaagatccacagagtgatgcacactgagaaggaaggtaaggagtgggcgttctgatagatttaacaactgggaggctgctggttggtatgacttgtttctgtggaatggtaggtgcagaagccagatggcaacagactgaggagagagcaggaggtgtgctcatgagcatagacagctgtcagataaatgaaagtaactgaagagcaatagctatgaggatgtgtgggattaagggaattatttttgtagtgaaagaagagcttttttcacagctgatgagaaggagaaagacattcattctagagcattgctaggattctttgtagacagaggagggacacctattgtagcaagagaaggtgggaaagggtaagattgtagctttcgtggtagaaagttatctagcttataggtttgcttataataaaatagcattcaaaagagctgactaaagggaaaaaaaggattactggacagctgtggggttggattccagttgaggctgggcaccataattataacacactgatctatcatgtttctgtgagcctgtgtgtttcttggatggtaaatttgagataaagactgtttggtatccttcggctgccttctctgttttttgttttttgggtgtttttttttttttttttttttttttttttttttttttttttttttttttttttagacagagtttcagtcgtcacccaggctggagtgcaatggtgcgatctcggctcactgtaacctccgactcccgggttcaagcgattctcctgtctcagcctccggagggattacaagcgtgagccacagcgcccagcctgccttctctgtgattaccacagtgctgtgtacacagtggttactcaaatggctcatcaagggactttggattgcagctatcagaaactccccgtaacatgtttgggagatgtgttttgtgaatgagcccaagtccaggaagtatagtgtagcaccttatgagggcaagaattcaggttctctgctgctctctgggcctcttcacgacagcatggccttttagctctccttcattgttctccctccttgttctcctggactaaaatgattgccccaggctatctttacattattccaaaccaagcatttaacagccactggcaggtgcgccggtttccaatacttaacaatacatcagaatcaactggaaagctttaaaaagttatagattcctggccgggcgcggtggctcacgcttataatcccagcactttgggaggccgaggtgggtggatcacgaggtcaggagatagagaccatcctggctaacacggtgaaaccccgtctctactaaaaatacaaaaaaaaaaaaaattagcttggcgtggtggcgggtgcctgtagtcccagctaatcgggaggctgaggcaggagaatggcgggaacccaggaggcggagcttgcagtgagccgagatacactca

SEQ ID NO: 46552 - DNA, 1422 bp, Homo sapiens
aatgctcaataaacacatattcagttagtgaataattgtttaagaggtggggctcctttctttttccctttgtcagtctggtggagtaaggggattggcactgagaataagtattctcctagcaccatctgctggcagtagaaagccattcctgaatcctggcctcaatcccattcagtcttggagtactggttttttgggggttgttttgacacagattcttgctctgttgcccaggctggagtgcagtggcataatctcggctcactgcaacctccgcctcccaggttcaagcaattctcgtgcctcagcctcccaagtagctgactacagacatgtgccaccatgcccggctaatttttgtatttttggtagagacagggttttgccatgttgctgaggatggtcttgaactcctgagctcaagtgatctgcctgcctcggcctcccaaagtgctgggattacaggcgtgagccatcgccgcctggctgaagtattgttaaccctaaaattcctcctccttttaatattattggtaccacagactctaccttttatccatagacaggaaaaatcacaaaacatttaactttttgcttttttgtttactatttagtgaatgtcttacactttggtgacccttgtgtttagcctctttacaaagacacatggtgaggtgctgaaagagaatgagcctccctctttcagtgtgtgaccttgaatgctgggttgtcctgacacttactcatcagaaagtgacctgtgcccatggcactctttccggttggactagttacatggcaacacgaggcctttagctgccaccagtatcagtatcaatagtgccaaaatcgagaaattggtgctagatccttaggatcagtgatgagtaagcagtcatggttcctgccccccctagtatcatgtggaagaaatattaaaaatataataatgtcctgagggaaatcagacactactctagagtcttactagtcagcccatagaccagtagcaccagcgtcactctgaagcctgttaaaaatgcagaatattggccaggtgcggtggctcacgcctgtaatcccagcactttgggaggccgaggcgggcggatcacgaggtcaggagatcgagaccatcctggctaacaaggtgaaatctctactaaaaattcaaaaaattagccaggcgtggtggcgggcgcctgtagtcccagctactcgggaggctgaggcaggagaatggcgtgaacccgggaggcggagcttgcagtgagccaagatcgcgccactgcactccagcctgggcgacagagcgagacgccatctcaaaaaaaaaaaaaaaaaaaaagcagaatatcagctccccacccggcctcctgaataaaaatctgtattttagtaaaatcttcaggtgactcc

SEQ ID NO: 46553 - DNA, 2285 bp, Homo sapiens
taaaaaaaatttatttcttgttttttttgagactgtctcgctctgtcgcccaggctggagtgcaagtggcacaaactcggctcacgcagcctccgccttctgggacttcaggcgcgagccaccacgcccagctaattttttgtatttttagtagagacggggtttcaccatcttagccatgctggtctccaactcctgacctcaagtgatccacctgccttggcctcccaaagtgctgggattacaggtgaaagccaccggcccgacctactgtttttcaggattctatatagactgggagggaagaacgcaaattccgggcgatgagagctgcataagggttttatttttattctttttttttcttttcttttctttttgtttttttgagacggagtcttgctctgtcgcccaggctggtgggcagtggcgcgatctcggctcactgtaacctccgcccaagacggggtttcgccgtgttggccaggctgatctcgaactcctgacctcaggtgatcctcccgtctcggcctccctcccaaagtgctgggattacaggcgtgagccaccgcgcccggcctgtgtaacggttttagacgggaaggaagcatgttgtagttttcggtccagcagtaatagtaacaaacatagtgctgacagacactgctaaacgctttatctaatctcctgtaatcctcgtaacgccattaggtagacctattattactgtacacccattttatgggtaatgaagccgcagtatagaggggttaaataacgtgttcaaggacgcatcgacggggccaagcagacggaattgcagctacctgctttaccactctaagtcctcaacaaacacttccacctacacgtgagagccaaagccatagcctccaagtttttccacagagcgaaaatgtttcgcggagtttgcctgtcttcctccccagagacgcagcacagccgcgccggaagtgcggcgccgtagctaggagcggacgccataggtgcattgtgggaagcactttgctgtccacagccaggccgcttgtgatgaaactgtaacttacaagaaaagggctgggttttgaaaataacacaggctctaaaaaccctaagaagcggtgcaacttttggcaggaatcggggttagcgggacctcaagggctcactgcggctaagtgaacgctgactggtcctccagcgtgagctagaacagacgtctctatggtcaagtaaacagagcgtgtgctgtcttccccatgtggtggggttgcgcatgatcagtagctgcaccactagaaagatggcggagcaagagtgagtgtttggggctttgaatatctggagtggggtcttgagtatccggtgccatccacggtgtttatgccttggtggcggattcctgtgggctctaggaatagaaaaggccacagtttacaaagggtgggggtgaggaggagtagcgctgtggcggaggagggaggggaccgcggtcaagttcgggttatctggagaggcgaggattgacttcaggcagcgggctggagtgccacagttgaattcacccagcccgacaagtgttaactctgcagataggcctgcccccgccccaaccccatagattcgtcgctgctagtgcctatgaagaactgtggccgtgaaaaccctgttaacttatacgaacccagaggctaaaggattcattattttccgaggctttggggatgagtgactattagggatggatttatgaggcctggagtcagaaaccgcaggtttcaggggaatctttcttcagatacttgaaaacagtaatgttccctaaagcccaggatattgaattggtttggaaatccattgaatgttcgttttcttttttgttgttgtttttgttttgagacggagtcttgctctgtcccccaggctggagcgcagtgtcgggatctcggctcggtgcaacctccgcctcccgggttcaagcgattctcctgcctcagtctcccgagtagctgggattacaggcgtgcgccaccacgcccagctgattttttatttttagtagaaacgggggtttcaccatgttggtcaggctggtctcgaactcctgacctcaggtaatccacccacctcggcctcccagagtgctgggattacaggcttgagccaccgagcccggccaagtgttcttttctaaatgttatctctgatctcaattttctgcatcaggcaaagaaaaatccctttggttccagaaaatctcctgaaaaagaggaaggcttatc

SEQ ID NO: 46554 - DNA, 1369 bp, Homo sapiens
gtaccatgacataactaattcgttgaacaagttgtgagacaatcctttctgagaaaaggtagacctgttacatcgtctgtgggttagggtcatgtcagcacgtaccaggtacattctagcttttgtagagaaagtaaaatctagtgttgagtatgtaggcactgagccaggtggcctgcttaacataaaaggactgatttcagggtggctgtgggagcctttctaatgctctaattctctagccccttgcctgatccagctgattccaagagccaagattttagtctttcttggttggcttttttaaatgctttgggctttcctttaatgtatcttcaaaatcattctggggccaagttacatcataaaacattttattacatataaggactgaaacaggatttttcttaactgtaacatggtccacaaatgtaaatgcaaaacccccatggtggttgcaggagcaagtctagttgagacaggtcaggacgaaagcataaaagatgagtaactgaatggcatcccgggtcctgtagccacgccctccagatcgccgccgcaaaggacctggaacctcaggggcccactgtatgccatgaagaaggcgcagtcgctgcctcaaccaagccaggctccgccggggccgttcctatcctgagggtcggagggggaagggactcagccaaagccgcggcctcccagggcttgggcctccgcggcagccgggacgctgtgggttcgccgtggatcgccgcgatgtggcgtttctccaggcccgggagttcctggccctgctggaccagctgcaggagctgcgccagggtaaccgaagctgaggcagaggccggggccgagcattggggactgcggggacgctccatgtcgggtcgcgaatcctgaccggcgtgtaatgcagagaagcgagcacttccgggccgaatgggtgcaaccaccatgggggaggtggggaaaggaaagggaggctgtagaccgtaccaagccggcccagaactgggggagcacttgacaactctgaccagctccctgcagaaacgctttagaagcgtccacgatttagccaaacccagagtgcccaacggacgcgccaaagaagaaaaacggacggacgtgccaaaacttgaaggctagcacaggacagaacaagcctgcggacgcgccgctgcgggcaaaaagacccatacatacataagcaccgcgcacatgcccattttcatgcacacccccgggcgcgcgtacaaggattcagatacaacgcatggcgggggataatccccatactaggctccgcagcacgggacaaagcataactgtagagttgttcccagaggcctcaggagtgacaccgcca

SEQ ID NO: 46555 - DNA, 1969 bp, Homo sapiens
ggcgcctggcctttttcttcttcttcttctttgttgagacagggtctcaatctgttgcccaggctggtctccaactcctgggctcaggtgatccttccgcctcggcctcccaaagtgctgggattacaggcgtgagccattaagtgttccccttaatgacacagcagatgagagttttactgagtatctccttgtgccaggcaccctgttgttgctggggaagcggaagggagagacaatcgttaatcggctaaatttctgccttctgagagctcagaatcaagaaataaataatagggcagtaaaaggggctgggattacatacaaaaagaaaattaatgcctgaactttttacaatctgctcgataagctttaattctattaacctatttgagcttcccaacaacaggcaagctcccacagcagctaggaggatcactttgtcgtcatacaaatagaaacaggctcagagaggaagtcatttgttctagttctcactaggacaaatctactggctactaaaaaagtgtgaaggctggggacagtttgagtcgtcctgcttgcaccttaagcgcctacaagagtgcccggctataacaaccacaataccaataataaaatttaaaaacagatgttcagtaaggacttgcggcattaggaccccaggagggaagtgacgttcgaggaggcggagaaagccgcgaagacggccttccccacatcttccagcacctgcgcgcctgaatccgtcccacccaggcccagacgcaggcttcttctcgggtcttggtcctgcatcctctctctcccagagcctccgttagggggtgggaaaggactttgccataggtcgctgaggccaccatctgctctcttactggccaagggcgtaaaaagatagtcttcccattagctagagagcaaaccccagaaagcctattggctgcgccgtccgcgggccttggtccgctttgaaggcgggctgcggctgcgagaggagggcgggcgggaggctagctgttgtcgtggttgctcggaggcacgtgtgcagtcccggaagcggcgaggggaaactgctccgcgcgcgccgcgggaggaggaaccgcccggtcctttagggtccgggcccggccgggccatggattcaatgcctgagcccgcgtcccgctgtcttctgcttcttcccttgctgctgctgctgctgctgctgctgccggccccggagctgggcccgagccaggccggagctgaggagaacgactgggttcgcctgcccagcaaatgcgaaggtgaggaggcggggcccgtggggcgtatcctgccggaggggctggctccagcggtggtgcttgcggagcagcgtcgggggttgcaaggttccgagctctgcagggtgtcttccttccttgaacaggcttgcgccgggacgctgcggcggacgagagatctggtcccggtacccctggagttcacacattggtagaaacaagcaatgataattcagagtagtagatgccatgataggggaggtacagagcttccttttgggggccggacgaggagcatctggtctagcctggagtgggggagggggtgggcgaaggctgtgtgcagaggggagtcaaagagggcttcatacaggaagcacgaagaggcattaggagttagccggatgaagagaagtggaaagagaggggcccactcaggaaactacagaggcagaggcctgccggctgagaagctaagaacgagtttgaggaactgaaaagctccagatgactcatcttgggggaaaaaaacctaagactttccccttttgccctcactgcaacccaatctgtgtagttgtctgttgcacccactaacaactcctcgaaggcaggaatttttgtcttagatacgtattcacacagtgtctggtaggcactcaataaatgttttgagaatacagatgattaaatgggagact

SEQ ID NO: 46556 - DNA, 578 bp, Homo sapiens
cagggttgtcttggggtgaggggaggcatgggcataggatgaggcccagggcagtgcactgaccttacgctgctccctcgtgtcctggacacctggctgccgttccctccctccctctctcctgctgctcctcttcccaaggcctcccatttgttgtgtaaaatgcagtgtttacctggccagctcccgcccctgttcctacttccacctggccttgactgttggtcctgaaccttgttttctgatgaccacacttgatcactctgaggttcctagctgttgtacctggagtgcagttgggaggacacccggttcccaacaccatctggtcacaccatgttcctcagggccaagggaggagcagagaggctggcctctagggagaaggggtggggaagctcaggcacctcccagtttgtcctgaaggcagggatcggggcaattggtacagtagtgatgacaattgtatgtattcaaattgtatgctttaacttttactattaccacactcttgtgaggtgtgctgttaacctcattgtgtagaggagaaaacaggctagagtcaagtgatatgcttg

SEQ ID NO: 46557 - DNA, 1139 bp, Homo sapiens
tctgccccaatagatctggggtggggcttaggcacctgtattttttgaaagcttccccagcaattctgatgcataaccagggctgcgcagtagttggcgagtgtcatagtgagttagggttattcaacctactaacggggaataggatgggtagcaggaacagctactaacccaattttccagataaagaaatcatgaactacttccctctttaatcctcaggcagcaaggcaatgacagagtcaggctataacctagtcctctttaaggtccaatcaggctgcaaattcctctgctcacactgccccacagtctcaaagctgctctctctagcagcaaaggggtgtgagagtgcagcaaggtggaggggaagcataccaggttagtattatgaaactcttctaagtactacagtaaacctggaacatcaggaagcctgaatctgcctataattaattataaataggtgacagtgggcctctaacctaggatctcgatcaagctcaacagctgagtcatggtgtgtatgactcaccatggaagccctgcataggaatgagatgggggacagcactgtggcatagggagagaccaccttcttcagtggagggtggttggaccacctcagtgaatagaaaggccagagctctggaacctatgtggacactgctaaggaacactgagctgtgctccagccagccagataggtgatagtggagctggctcccatgcagcctggtttggggaagtggagcaccagggacaggatgaagaggctacaccaacagtggaattcctttccagggctcacaggaacttctgcagggcttcccttctcaagcccagtgcagcttaaaacgctcatctgtatctgtccttggacccattgggccacttactccaaccctgctttccttgcggggaaaagaactatgtgctcggcactcaggaggaaagcagggttctacagagttgagacaatagaagttcaggaacagaactggcttgccagcctgtctcatgaggttctagtgcctattttcctttgaaagtacaaagagtgggcattctgtagttttcctactgaaagctagctcaaagacgtttgctaaatttatgataggagagagaggtgggaa

SEQ ID NO: 46558 - DNA, 1983 bp, Homo sapiens
ttatcgcccaggctggagtccaatggcgcgatcttggctcaccgcaacctccgcctcccaggttcaagcgattctcctgcttcagcctcccaagtagctgggattagaggcatgcaccaccacgcccggctaattttacatttttttagtagagacggggtttctccatgttggtcaggctggtctcgaactcccgaccccaagtgatccgctcgcctcggcctcccaaagtgctgggattacaggcgtgagtcaccgcgcccggctagaaacattatgttcaaagtccgggatgatatggggcacgagtcctaaatcttccaatttacctaagacagagaagagggtataagaaagaggaagcactcctgaccccagtcctttatcctacctgaattctgagctctcccatttccagggggtcacagccaagattaaaagccaaagtggcagggacaagcgccagtccgtcagcgaggggctctcccagcggtccagagccgggtcccagtctatcagagaggtcccagcgaggttctaggacctgcaccctagccaagtgcggctgtgaagtgttcgatgactctctggcctgggccacccacacccattcgccctggaagaggccaaggccacggagacagctccggctcacccctagtgaatctccagtccctcccagaactccctggagtcgccgcactgtgccagaaaccgcaaaggaggacaccacgggcgggggtgggggccgactgctgtccccagactctggacacagtctggcccgcccgcggagctcagtcacagccagccgagtccctgggcccagcagcccttgcaacgccggccgcgtctccagcacccgcggtccgggcactgggagggtctctccgcgcctcaccagcagcggcccgactcgcggtccgagcccaggccccagcgaggtgccaagcagtgcccaacctagcgccgggggccgccgcaccgcccgcgcccgcacccaggccccggagcccagtgccaggagccgcagcagcgcgcggctaaccagtagctgcggcggcccgggaccctgctcttcggtgcccgcgtccggcccctccagggctgccaccagcagcgccggccctgccgggctctcccctgcaggcctcagggccagcaccaggcccagctccgccgccggccacgggcccccgggtggcagcagcactgccaacgggggtgtctcggtcggaaagggctccaggacccgcaagacagccagcgccatggtgacaggacaccaacgaggagggtgaaggagcgcagcttccggagccagagagccagacgactagtgtgcgcgagggccgcttccgcttccgtcaggggaggccagaggaaaaggggaggggggtcgggtgccgcgaacttgctctgagggggttagctgcgcctcggattgatctgcgtcgtgcctcgataggcagtaaccttcatcgctgcggttgcgtagcgtttacccatgcgccatttgaacttgtgcttaagggatttatctttgccttctacggaagtaatgttctcttaactatttttccccgtggcatgaacgtaacagtttattgactgataaatgaacagtcagcatgctcgggatgactgggcccagtactgggagctctaggtgaaatgtttcggaaggagtccgctcctctgcggagctcctgcagcttcccctgtggaactgtgagcactgaggtttgagggttgcaggaaaggttgcaggagggagtagcaggattagaaaactgtctcacacttgcttataggtatatagtggctgctgagtgaattactagatgtgattcatacagccctggagtgcttggtgccaccacacatgttccagcacatctggcacaaaacccatgttccaggacttcttgccctgttcattgttctgtttgttttactcccaccaaacttaagttgaagaca

SEQ ID NO: 46559 - DNA, 1082 bp, Homo sapiens
cagggcctgcagagccacagaagaccgtttgggtctaggctttcagggagcccagcttcacctgttcaggaaccatccctcctccaccctacctggattcgatcctggatgtcagcaactacatctccatcccccactggtgccagttccacctcctcttgttcaggatcttggttcaggggctggtaggagtagccagctgggcccgaccccgtttcctcctgctcttcctcaggctcctcactgctccaatccccagtgccttctgaagggccctgatgtcccagttcctcagtctgattggggaagatacgctcagggcccatggtgtctcctcctagaactactgttgccatccgggcaggggctgcaagaacagggaggcggtaggacagggatcggatgaaaccaggcccatcttcatcctctcatcatctccttgtagtctcctgcgtgcaaaaaaccagctcctccccgaggctcctgcatcctccacccctccgccccaattccagcctctcgttcctccccctcctaagtcggggttcttatcttgaaccaggccccaccaacttgctccgccacttcctagttaaacgcccaaccggaggccctgccacctcctaaaagacaccccttccagaaccccggctccccgcgccacgcctcccccgcgacttgggaactctgggtcatcagactcccctaaacaggtcggcgtacccgcccccttctcccctctcctagaggaccccctctgtaccgcctgacagatgcctttcaggccccatgggctcccctcaaatggccccagctgcagcgtcccccacccgcccccatccgaatcccggcgccggtgttcccgcgcgcctcacccgctcagagcccgcggcctccacttccggcggggcaggacgtgcagaggtgcctagtcctccagccccgccccatatccatgattgacgctggcgaggacgaggagtccgccccttgccccgcctccgtcattcccagcccaaaaaacaaaggactgcattacccagtggcctcctcggtctcgacacatatttgcacatgcgcag

SEQ ID NO: 46560 - DNA, 1582 bp, Homo sapiens
ggtaggaggaagtttctgccacctcccctcctgagcctgctgtcatcttcactgcccctgcccatctgtcacccacctgctcctttgacccctggacttggtatacctccatgtggagttgttgggcgagaggtgttctctgtgctgtgaattcagtggggagctgtagcggggtgggggctaggttcctccccccttgggccgagggccccttccccttggtgctctgtccccatccacctcctttcagctgctcctgggcctcagctctgcccagggccagccaggttctgctgggaagggaagggaatggggagaagggagaagcaagcagtgtctgagcctcaggagcttccccctccccctttgcctatcccctcccctctgcttgagccttgagccttgactgggagctgaaaggagttgcagctgttggcatgagacctccttctccccgtcttggggaggtggggaccagcagataaatcccacccttccttgagctgtcgctgtactctgaagttcagccagctcagattttataaaaattaattaaaatctccaaacgtgttgtgtgtttttgtggaatatggtggagaaggctggagtttgcagtgggggcagggtgccgaggacaagcaccctgaggttctggcttctcagccaagggtattaggaaaccaaatgccaccaaggcctggtccaagcttctcgggcgtggaacccagcaccctgcgactcgggcagaaggttgcgacaatgtctccagagcgggttatcctttgggcccggctccctggccctcgaccgcgcagttttctgcccattcgtcaccacgttgagaccgggaacgccggaagaggcggggcaggggctgccgtgagcggaagcggcgccattcgtcttccgagcgctactgccagctgatgccgggagctaactaccgcgccggggccggggccggggccggggcccgacgtccccgcggggcccgggaccgcgaggaggacggcgggggcctggagcccgcggccgtggcccgcgacctattgaggggtgagggcatggggcagggcgggctggggaggggaaggagattcccaggcggggccctgagcctgcagagacggtgccggtaagactgccaagttctctaagaggcagacgctacactaggggtgcccccagtgcagtggaaagtggggggtgagagtagatgcttccgggattaggacatcctgagaagtttcttcacggcaggatgagggttttcggcgatggggaacgtatgtgcaatagcatggaggcaggaaaaggcatgcatggctgctgaaggcttagtagatcagaattcagcagattccgtagactttgtttttttaattttttttttttgagacggagtctctctctgtcgccaaggctggagtgcagtggcgcgatgtcggcaagctccgcctcccgggttcacgccattctgctgcctcagcctccagagcagctgggactacaggcgcccgccaccacgcccggctaattttttgtatttttagtagagacggggtctcaccttgttagccag

SEQ ID NO: 46561 - DNA, 2349 bp, Homo sapiens
ctcttttgtgtgactcaccagtcacccactaggacctcaggataccttcccctgaggccactgttcttggtatcttgccctgcattctctaatatcagcagtaactcatccttgcaggcatcatatcataatggttaagagcacaggctctgaaagacagactgtttagctctgatagttggtgtgtgaccttggactccttattttcctcatctataaaatgggaatagtaactgccttatagagtatttgaaaggagttcatttatttgaaacgtctattacctatacctggcttatcataggcactcgaaacgttattactgaaacctgcacaaccggtgatctgcaaagcactttcaccttaagtatctcgtctgaagaatttcgccctatgagaaagcaacacttgtagaggaaaaagctgaggctaagtgtgccttatccaaggtcacggacctgcatgactcctgaccagactcgcaactcccgcctcgcatgcccgcagaccccatctccggcagcccgaatggaagcagccttcttcccgggtaagatggattacctgggcggcggggaacagactcggggcaggggcggcgacggtcgggggcgccaggttcagagagcgcagagcgcgggtcagtgcgcacagggccatcagcacgacacccttacttttagccaagctgctcggtgctcctagatgacgttgactgtccggcgccgtcgctccgcaataacgtaaaaggaggcgggcagaaaactggagcccaagctggatacacacctcctttcctacctgaacgccgtgagagccaatccgcgggcagctctaatgtcgcgtgactaggaaacaggccccgcccccccagacccgtcaaaacaattgcctcgagcggcagccatcatggatttaaaggggcagtaccggcaagagcggcagccacaccggcagattgcaggtgagtctttgagggtatcctggggctgaaggttaaggtctctgccatctcttattctcgcactaccagaaagatgaacaaaccccctccaaccaaccttacaaaactccagcctccaaaactccgcccttcgcgattcttccccgcccctcggcgtccagacagatagacagacgacctgccccgccccctgcgccaccgactgactcagtgacctcggggtcgttaggcctccacgtcctcgctggagctgcggacctcagtcgtccatccacacctcccccctgccgcccccgcccatctcactctcccaaccctgggcaccagggcaggtcgacagcccgaggcactcctctactgcgtttccaggcccaggagacccactccagcgccgcggttccttgcgacccggcagccgttcagcagacctcccattctttcctgcatcatcgggcattgtggaggcaccctacggtgattcctctcagagcctgtttgtaggtgaccgtgacagagacaaaaccatggaagtgactgggtttggagtgaccaggtgttcctccctcccctttcccagacacgcctcttgctgtaggtctctggttaagtctctctctctcattcccttcctgggagacagtagctccctaggcctgcaatgagggaggctggcttggggaaggagacgggaattgggcgtctttgaagacctgtgggcagagggagggagggagggtgtttgtcctgggtggggctctgggccaggtcctctgggtagctgtgaagtggtgaaagaaggggtgggaacgctggacttctggactttgggcagggcagatcctctgactctctggctgcagaacagtttcttccgtgctctggcctgagtgccacagccagggcctctgctctgtacacaggtaagaaggcttcaaagatgagaaacaagacccctctgaggaagtgggaacacagtctgagtcctggggggtgggaagtatgggttgaaggttagtgggaaaatatgcagggctgaccaggtttggagatgctgggcttagttctgcaggtgatgcagcctgaagaccttgagctttctgggaccctgtaatgtggatcctgcaaggaaggctcttgttttcttcttttccctttcttccctgatttaactttgcagagattccttccgttttttctagacccctgcattattttctgcatatctcccactttaaccctgtgccatttgcagctctcccacagaccttctgtgatccccatagtgctgtctctcatcccttgattccttttcctaactcaggctgtaactgcttttttgttcttttcctaagtcctaaatccttctgctagttctaagcaccttt

SEQ ID NO: 46562 - DNA, 3304 bp, Homo sapiens
ggttcatgcctataatcccagcactttgggaagccgagggggaaggatcgcttgaggccaggagttcgaaaccagtctgggcaacatggcaaaaccccatctctacaaaaaatacaaaaattaggccagagtggtggcgcgcacctgtagttccagctacgtgagaggcggaggtgggagaatcgcttgaacccgggaggcagaggttgcaatgagctcagatcccgccactgcactccaggttgggcgacagagcgataccctgtgtgaaacttttttttttttctccaacgggctttccagagaagtgtgtgtatgtgcgtgtgtgtgcgcgagcgtgcttgcttgggcttaaactttctgtcgggccacactttcccaagtctttgcactggctgtagggtgggctttatcctcgggacgtcctcctccccaagtccagcctgcagctggaagtcttcactgatctccatctctcctccctgatctccgtctctcctccctgcccgcctcaggactgggaggccgatctctctctctcgccctcccctccaccagccttttccagatgtatgtctgccaaagaccccccagtgcagaggatgatgaatgaagatcctcgagccagcccggtgggaaagtttcgtcgcctacaaaagcgagggaaagggaagggaagttgggggtaggggaaaagttagagctgagaggctggggcgcgacgagtctggacaccgggcggggacccaagctctctccgctcagccaataactgtgcctcccttaggaaggcgtgaggaaatgctccaatcaatccctgcactcctcccttggaatttgggctgtatttttttatttactgcaaaccccacaatccacccaggggtttccccagtgtttgcctccagcggtcccggtgcccatttactagtgctgctccctctcttccgcaagactgcgctccagtcccagcctccttctccgcgggtgcctcccaaaccgttctatcattctcgggttcagggaggcggaatcgtgcctgctctccggttcctttaagaggcgtcggctccacccctctcagagtcgcggtctgacgcgagatgacagcaacgagttcggtatgtctatgcaaataagcgccctcttgtgggccaatggggagcggaggtgccggaaccacggaccaatggggcgggggcgctggggctcaccatataaggagcggcctcgccataaaaggaaacattgtatctctttatatggggggaagggtcgggggatccctccgccgccagcgcgtggtcccggccccctccacccgccgtctcggccgcggccagcagcccctgccccccgggggacgctgacggccgcccggcgcgccgccctagcagacggacagggggcgctgcgcgcggcctggggcaacccgggccacaggggcaggaaagtgagggcccaggtcggcccgggcgtgcaggggccccgggttcgcagcggcggccgcggcagcgatagcggcactagcagcagcgggagtgccgggttgagccgggaagccgatggcggcggctgcggcggctccgattcctcgctgactgcccgtccgccctcctgcatcgagcgccatgttaccgacccaagctggggccgcggcggctctgggccggggctcggccctggggggcagcctgaaccggaccccgacggggcggccgggcggcggcggcgggacacgcggggctaacgggggccgggtccccgggaatggcgcggggctcgggcccggccgcctggagcgggaggctgcggcagcggcggcaaccaccccggcgcccaccgcgggggccctctacagcggcagcgagggcgactcggagtcgggcgaggaggaggagctgggcgccgagcggcgcggcctgaagcggagcctgagcgagatggagatcggtatggtggtcggtgggcccgaggcgtcggcagcggccaccgggggctacgggccggtgagcggcgcggtgagcggggccaagccgggtaagaagacccggggccgcgtgaagatcaagatggagttcatcgacaacaagctgcggcgctacacgaccttcagcaagaggaagacgggcatcatgaagaaggtaccaagccggggggctggccggccccggggcccggttggggtggggatgtgcaaagggagcccgggaggaccgcagagccgaggcggaggtgagaggctgcgagtccgcaggaggtgtgtgggaggggatggctcctgcccggggagggccgaaggggaggggccgccggggaaatgtggggagaggggagatcccgcgaacgctcgcaaccgtggggaaaggcgcagaggtgggagtgaccggcgccagagaggaagagggcccttgctgagtgaaggggtgaggagcggtgatgggaggctacgaggctgccggggaggtggataatgagaacccgggatcagtaggtccagtgcactccggtgttcggacgagggcgccggaaaagcagggagcaaacgagaaggtatggaggtgaggaggctggagctgcatgacaacaatgagcgaacatgtgtgggaggaagtgggcaccacgagagtagtgctggttggaaggacaggcagggttagggaccaggtaagggagcggggcaggagaactggtgctgccctgagcagcaggaacctagtcctgcgccggccgtgagtcttccatggcatccactgggaaccacatgctcctggcaggacccgctgcagaatctcctgccgttaggacaagtggggtttccagccctagggagaatctatgcttggatggggtttgggggaagtcagggaggcttgcagaggtacctaggaattcctcttctgccagccagtgaaaagtgttgaggaaaggagtcattttggggtgtagacgataagggaagagatgaaagcagaggaactgggagacaaggagctggatccttgggaacactggctggtgtttatttctgtcccatgtagaaaccagagctgcttccaaggtggtttgcagaactttgttgggagagtatggcatctatggggccatccttgaaggtccccttcctgggctcatggcaggatgtttagtgctaatctaggtctcgtctcccatcactccagacactgttgtatcagtgtcccttgtcacttgatcatcagtggagaagattgtggggggaggtaattaaggaaaactctcttctctccttccataaccttcttcccaagacaaaggagtaagg

SEQ ID NO: 46563 - DNA, 1657 bp, Homo sapiens
aggagaaactaggctgtggcaacaagttggagcctgtgcagtttctggaaagaaacatgggacagttggagcttaaatggtccattatcactaatgtcttgtacaaattccagtgtgataggtagggatccatcctggtccctgtgacagtgagaaggggtgaggctctgggacattccaggcactaagctgtgttggggagcagctagctgggtccttcgtatcccctgaagttatatgttccatcactgggggctgttactgtttgcttggggtatcttcaggtcaatggggctgctcctcaaaggaggagcatgggtagttttgctgcttccagagatcctgataggacaccctgccctcagagtcattagagacgaaggtcattatgggaatgggggaatgacatcactgtataattctttttccaacttctcaaggaaggtagagataaaaagtttgctgacctgcccatctccctcctcacccctcaggcctatgagctgtccacgctgacagggacacaggtgctgttgctggtggccagtgagacaggccatgtgtatacctttgccacccgaaaactgcagcccatgatcaccagtgagaccggcaaggcactgattcagacctgcctcaactcgccagactctccaccccgttcagaccccacaacagaccagagaatgagtgccactggctttgaagagacagatctcacctaccaggtgtcggagtctgacagcagtggggagaccaaggtgtgtttgggttgcctatgtgagaggagggaagggagtggggtccctctccctttctggcccaggacaggtggataggtgcccaccgatgtggagtggagccggattaacgaccctcgtcctaggggacaggtgtccatcctcactttcctgatagaagaccgcccccctagataagcgggcggcctccgtgcccatataaggccggcttgggctccacgccggcctcccgcccgcagcccgcctgcctggcagggcctttgcattcctcccgccagctgtctccccgctaggggcgggggtgtagtttagcccggccctccgggctgggtcgccagggagtagaaagggagcactccggtcccggggtcctgggaatccagcactcttggcaggcgggctggttgactgggccggggactaccttacaagccagccgctgccctttcagggtgttgggggcctgggcagttagggagcgcatttgcctgctgctagggatgcctgcgctgttactcctcccccttccttttcccggtaaggagagggggtggggcttcctcccttgctgtctggggagctccaccttccgggtggcacttaactgactggccaatgggaggaagcggcactgtttgccttagcaacgcctctgccaatcaagggtcttgggcccagctgctttgcaaacgtctcgtgctgacccaccccgcagcctttgagcctctggttgactcatttcgggtctgggcttggtggcttggttctcagtttccttcttccccttctaagaacgaagtcttccttaggggagagtcagtgctgtaggctacctcctctcttagtggcatatcatctgtaataatttttaaacttttataacagtagggctcatt

SEQ ID NO: 46564 - DNA, 1381 bp, Homo sapiens
tacagagctttcttttgtattaaaaaaaaatactctttcaataaatgtatcatttttgtgcacagactgtggggtctttggttctgtttttctacttagggagggatgggggtatgaacgcgaggcaaactcctaaaattgctgctctgagtagcgatccgggctgcttgatgagaacggtaatgctaaggtgtgctttgggctgtttaattctatacgatttaatttaaggaaagttttgcggggccgaggaccttctccctgtgcgtggcttcgctaggtgttaaggccaacgcagaggagcaaattttaattaacaggaaaagtgacacaactaatccaaagcattgctgaagggtttgggaaactcatgggcacctgacctactgaaaagtcaaaaagggcagccttaaggtgggaatgtgggttaccatgtttcgtcagcatgatcgctgtgatgggagagggaggattaggagggccgacccagtgaagaggagggggcttcacagttgactggatggaaacggcttcttcctgctgctgagagaggagcaacgtgacctcgatcccaggctcctccggtagcgcgcccccacgcccctcttccagtgcagccgcccgcggtagcacgcatgctccactcgcgcgctgttccgccacgctcggcgtgggccgcggtgggacccgtaggtgcccggccgtgcgtgcactcgccgtgtgacccggaagggagctctgaggaggcggggccaggacggcgggaccggccgctgggtcccagcgagggctgagccgggcggtgggaggtgagaggagagttctgcgccgacccaatccctccccttctcctgtcccctccccggtcctttagccactgtccatggggctgacgaagggaaccaggtcttgctctctgagattcactggatcttttcagcttttttggaccgcgcccccaaccatccttccccctccccccaaacccgttccctctgcggtgctggcctcctccacctccccacggctctgcaagcttgggcttgaccttgctatctgctggtctcatccatgcgtccagagctcacccccacacctcagtttattgttgctcttctaggccgacgttacacctcctacctcctcctatccgattcttttacttccccctgctgctaatcagttgcccgctggcacatcgctggctaccatccaggcttgccccccatcctaagtggacccctacctccattgaggtccacatccatctttctccctcctcttcacctctactctcatcttctgtccctgtaccccaacatgacccctgccctgaccactatatcttcatctgggtttaccttcttccattcttattctc

SEQ ID NO: 46565 - DNA, 1193 bp, Homo sapiens
gggaggccgaggcgggcagatcacctgaggtcaggagttcgaaaccagcctgaccaatatggtgaaacaccgtctctactaaaaatacaaaaagtagccgggtgtggtgacgcgtgcctgtagtcccagctactcgggaggctgaggcaagagaatcacttgaacccgggaggtcgaggttgcagtgagccgagatcacgcaactgcactccagcctgggcgacagagtgagattccgtttcaaaaacaaaacaaaacaaaacaaaaaaagttggtggggaggcaggaggatacctttcgtgttgggtggtggaaaagattccagcgggtgaggtgggaactgagcccaagcaaagcagcccaatctaccttctttctgttgcaccctacaaacgctctgaaagcagctgaagacagagttctccaagaaggaaccaaaggtcaagataatgctgagtctgccttacacccgcaggcttgctgggacccacgcagcccgagccccggcccgtttccttctcgggctggggcgctggatggagcaccggggtaggagggcgggctccgggcgccgggagcgcagctgccgggggtcgggggggcggacaggccgggtccctgccaccccagccaggtccgcgcccgcgtccccgcgtcccgcggccccagggcctcaccgcgcgcgcccagctcggcggccgccacgtgctcggtgagcactgtcccgaatcgccgcagccgagacacgatccgctcgtacagcgtcctgtcctcgcgtccgccgcgaatgctcccgcagaagtacagggccgggcggccaggctccccgcgctcccagctctcgctgcgccccggcaccatggcagcagccattccccagccgcccgcgctctccggcgccagggggcgccagcccgcggccacgtgaccccgcccggcccagcgcagagcccggctgctgagtccacacctgtggaatggggacgacgaactgggaggatccagccgggaccctttcgggaacacacccttcctggacttgacgttcggatgcctaacacgcaccttaacttgaccttgtccaggcagaactcgagggcttccccacctcacccgcttctgctcccctcctccccgccgtcttccccagctgcatcctcccagctgctcaggcccaagaccctcggagtcat

SEQ ID NO: 46566 - DNA, 816 bp, Homo sapiens
cagaggccagtgtggcggaggaggaagaggggtgggggagggagctttttctctgacggaccttggagaagggcagtggacgagcatgtgtccctccgcttccgcagaggacggaaaggcttgggtttggggaaagaggccctgcaggctgctcccgccgcacccgcactccatcttctccatccagcctcctcccctcgccgggtcctgcggcaggtgcagcacggcgagactccatctcccggcgtgccctgctcctccagcccggggcttcgggctgctcggcctgctgggagttgtagtctcagcctcctcgggagccgggcctgcctcggagcgggggcgtgagggctgggggaatgatagtatttggggagcgagacctactgtaaatcacctccctttttccgtcacttaatagcgctctggtgtcctcttattattgtgggggcaggataatgtggggcagactgtgggcggcagtgtggggaaacccgtgtgtgagcctgtgggactgcaccggagtggggagccagggggaggggagggagaacaacagaggtcaggtacactcctgacctctgagtcgtgtgtgtgtgcgtgtgtgcttggcgcgtgtgcgcacccgcgtgctttagtggggaggctcagttcacgggagtgcggggttggagaggagggtgaggcccgggtgcaggcgggtctccacggcaacagccaccggccgtgcaagtcccctagaaacctagaaagaggcaacggtggcgacgttttcagagatgtctctgggactgggggttgggagtggaagggatg

SEQ ID NO: 46567 - DNA, 4520 bp, Homo sapiens
tttgtgcaggatcagagagagcctggagcatgcgtgtgtgtgtgtgtgtgtgtgtgtgtgtgtgtgtgtgtgtgtgtgtgtgtgtgttctgtgcatacccactgtctgggccatgtcagcaggtgtgcctgtggccatgtcagtgtgcagggcagcctctgtgtgtgtctctggatgaacatatggggtacaacatgtttcgccaagtacttcaggacagcggggtgaagcagagatcttccttcatcaagggtagaggagcagggagaaatggactggcctatttttttcttctgtctttgggctggcctgaaggaagtggtgagcccagcctgggcctatggcaggacctcccaaatctggctgcttcctagaatcacagtttttgggactctccacccacaggcggagattatgcggctcagggcaggcaggaagtctctgctgaattccctctttcccaccacctttttggaggcgccctctctagacctacctcaattttctcagtgcctgatgtgtgaacttcctcataacaccaatcatttaaactatgagcacctacaactctgtcacctgcacatgtggggaaccgggagggaaacagtgtgaaagcaggcacaattttaaagtatctattgttctttggtgatggtgggtttttttgtttttgttttttttcttttttcacacctggctttgttctcaaggaaatttaaggtgcaaattaggagttgcgggaaaagctagggcaagggtgaagcaggctagcaagtgtgtgatctgggggagggctgtttgcctgcctttaccggttgtctctgaccgatagcacagcaggtcagcatgcgctgagtacacagacactgcccggcagccaccaaagcatttccctgccacgtgctggacagtgtgctaggggctgggggacaaagatgaataaagctgcccagtcctgcccttttggagctcaaggtcacaagcagtggggtggagatgcaaaggtctagaaagatgttaacaatccaggtccatcagggagataacagagcactcttatctgctagaagctgggagcttgcaggggagggagctggagcggtctcacagaggtgatatttcaactggtgttgaagacaagtaggtggccacaagtggtgcccaatctgaagggcaagagccctctgggattcaatgccatcctatgaaaatccttctgcctggcagctgagcaaactctggctggaatgttaactcaagccacccacatgtgctgtgagagggggctttgggcaatggtggtgcctctgtcccttggcctctctgggtgggccttagacccctaacccttggtgcagatgggactagctcagaaggatcctagacttggccaaaaagaagctgaaacggaaagcaaggtgggagcaaagccagtcctattagaatgttctccctcttccctactctgctggaggctccatgccaagtcccttgtgcccccatgtgacagcagcaagggatgctggggctgagtgtcccaggccccctccttcctggaggagctggcccaggcagtccttgctgctgctgtaaaagctatttcaactggcctctgtctcaggaagagagagggtcaggctgggagaggtctggtaacaccctgggcgccatttctacccccacatatctgggacacttccacttcactcggagggcatgggggcacagagcaggattcttccagaaggcgatgaggcagcagttctgcccagccctgtacacaagctgcctggtggctcagactttgagggggcagggaaaaagccactttcaagaaatgacttcagtttgcccctcctcctacgagtccatcccttccctcatttggaagagtgatttaaaattagatactaaaatagctcagtgaagagcacagcatttactccatggcgggtgctgttccaagtactgcacatcttataacatcgaatcctcacgaccaccctttgaggtgggcaccattatgacccccattttacagaggaggaagctgaggctcagagaggtgcagtaacttgctcaaggtcactcagattttaagtggtggagttgggattcaaacacgagtaattgggctctagagtaccaccttatgccgcatggtcaccccgatcccaacacctccctgtgatggggcgggggtgccaaggcggagggtgtacagggaaagtttctgagccctaatgagtagcacggaatctagctggggagacatgccacacacagctgtcaacacatggcaaggaactctctcagagcacacagccacgttcctgagagaaagggttccccagtccagaacaaccctgagctaggtaggactaagccaggaaggcttctcggaggaggtgagtgaccatggtctccttgcagagaccatagtgtgagaagttccagagagaaggaggagggggaagggcgttggaggccagagcctagattctgaggcaggaccttggggcgggtggtttgcaccctcctccaccctgcctgaccccgcccacttgcccgggacgccggcgccgcaggggctgtgagcggtgggtggccccggagacggagctgtcgagtctgtgcctgacacctcttttccctccactttcttggtctctttcagttggaggaggacagactctcggggcactccctcccgcggtacagccccctgcgacgactggcgtcctccgtgttctcctcctccacgctggagacggagcattaccctcaccccggcggcggcggctcctcgggctcctccggttccctcattcagcgcagccgctcggctgagagcagccctgtgcgggcgccccaccggcgccacgcgcccctcgctgctggcaaccacagactcatgccctcggtgctccgcatctcgcggtcccagctgcagcaggtgtgggcccggttcacccacaagacctaggctgggccccccccctcctggagggggcaggtgggggggggtggggagcaggcagaggaccatggttccttcccaggacgcaataatcacacactcacacatcccatcccaccccatcatgcaatacagcccccctagaacgttggcccaaggtactgtaatactcccaccccaagcagagtctccgtcccacctccccatcagctccctttgtaggtgccagccaaatggtgcagggaggggtggggctggtggtacagtttccaggacagggcaggggcgctcagctggagccactgatgggtccagagtccagtggaaagagaggtgtcagggagatgaggcctgcagggccagaggcactctggtatgggctttgttctgtttaatttgtgatctcttggcatggctgggtctgatccaccccgaggggctggcgggaggccaagaccctccttgcatggtgtgtgtgtgtgtgtgtgtgtgtgtgtgtgtgtgtgtgtgtgtccctgtgtatggatggaggccaggacagccaggtttggaatgtggtggggagtgtttcaatgctcagtgatcgggggaggagccctgtgacctagcgagactttctcaggccatcatcattgaggacagagttctctcctcacacatcttaccccaggaaggctcagtccatggtaggctgcccctcccccaagacacctgtgccatcactccctggtaggattgggtgtctgtcctcggctcctcaggaactgaggatggatgagaggggcctgggatccacctcccaaggcaggctggaactgagcaacgaggagacccagcttagaagcagtggcagctaaggtggttgttaaggatgacgtgagaaaccatgtgcttgtcagcaaaaccagtgtctcaggacaaatcccaggcgggagcagccccacctctgcccttctcagaaggtgactccttcctgtaggtgctcggtcagccccaagggcggtggtgaagacacagcagaagagaggcaggttggatagggatctggacacttgggagtggggaagtgtcaggatgccagcttgcgcctgcctcttctgcccatttctcagcccccaaccttcactgcagggagcccaagtttccctttattcatcctgcccatgtcagccagcacctctgttcccctggggaatgcggtagtagtgaagtgggtactagaaagggccgtgcctgtatggggaggggaggaggcccaaagatttgcaaaatgtttatttcagtgagactgtgtctgtatgtttgcttgtgtgcatgcgcgtacacttgtgcataagagtgtgcttacgaatgagcgtttgtgcatgtggaagggctgccatggatgaatgctcaggctgtgcactgtgtaattccaggaagtgccatttacatagacctcaatgtgactggcacgtgcgcaagttgcacagtgctgtatgagtgtgtgtatgcacatgtgtgttagggagccagaaagatgtctatgcagtcattggta

SEQ ID NO: 46568 - DNA, 5988 bp, Homo sapiens
agaggtggcctaaactcattttgcaaccactgtgagcctgaggacttcctgcaccaccctctgtccagggctgcagcactcaaaggcgacagtgttcttgcccaggaactcgaacctggccagtggggatgtgtggtgtgtgctgtgtttatacatgtggtgtgcataagtgcctgaatgagtgtgggggccagtggacctttttgtggtgagtgggggcctcctggtgggactagtattttctccatgggagagggtatgttctgaggaccctgggtccgtgacaaatgcgctagtaaattttcgataactcaatatacatcccccacacactcaaggcagcttgggtcacagcaataaccactgaacactcatcccaaccgctaacatcctgaacccaacgatatccctttgcatttccagttttggggaaaacagacacagccctgcctagtgggtgggggatggtggcacctctgagccatgctggtcccaggacacccggactcgctctctcttctgtcctgcctagatccctttttctggggaggggtggtgctgtcttgctcaggcagtggtcgggggagccttgggcccctgggtaggcagaaggagctgtgtaaatgtatttatatggagtgggcagtggagggaaccatacttggggagggtgtggctctgaccggggatgggggcaactccagctgtgtgtggggagcctggaaaatgctgtatcctctgctgtccttgggttgatgtggtacttggggatggaagtgtagatctctccggagggcctgaaccccatcccaccctaccccaaactccacttagacctgggacacactcaactcaaggggcaggaaccagcccaccctccatacagtcagcccctgaaaatgtcaagcatccttctccctaagggaagggctccaggtctgagggccacaaccctcccatatccctctggttccccacacaccatccagtgggcgtcccagcccaggaggccccaagcctgagtgcccgcttcctccaaatgaggggtggggaaggggtggagaggagggggaaatggagcccacaggactccttcctacaaccttcctagactctcctccgcttggctccgccgtcagtcccaccactcaccctccctccctgcacaggctgtgggggtgcgggcagtggggtccacttggccactcactaaccggccctcacgcactcacactcacacccacactcacacactctccctccgtagctgcgcgcacttcgcccactctccggaccctgcactagcggccccggccgggagggcacgaggactgcgcagccggacccccgcaggtccccaagccaggggtcccgtccatccgcccgcccccgcggccagcgccacgaatgtacggcccgccccacacagcgccccgcggcgccctgcaccccccgccggacttcggccccgccgcgctcccgccccaccccgccgccgaggcttcccctgggttcgcgtcccccgccgcccccgtcgccccgccttcgcgcccgttttcgtttgcttttccctgctgctggctggcggcctttgggtccctggccccggggcgggggcgggctggagtggggctcccctcagtgctgccaggctggggtgcggatggggacaggcggaggcgttcggctaagcctccaggctcggagggccctgtcgccccacccctgactcccgttacctcactgcccgtcgggctgccccccaccccgccccaataattggccttgcaattggatgccaaagagcccagagttgagggggagcagagctttgagcccaggtctctcagagcaacccaacagccccctttttgcccacgccccaatccgcgtcccctgccccaccccaccactgagggccctgggggtcaccaaacatgcccccccatttccagctcttcccacacccccacccccgaaaataaaactcagggaccaacatctgcttcctttgcacttgctccgtcgaccccgctccccgctcggaggggcttccgtgggggagggggcggggctccgggccctcagagttctcagtgtcgagcgaggagaggggctggcccctgcccccggagaagcgggactggtaggagagagaaactcagcaccggggcccagctgagccccttcctgcgtaaggagacgccttctaattgcggggtgggggcggagtaggggagggataggaaggggattagcgagaggaccctcgcggaggtcctgagtcccagtcggtttattcctgagccttcccctcccatcgtaagtccttccctcgaccccccattttgtactgcaataatactgtattatacgcttgcactatttcccgaccctggccagcggaagcatgcacgaaaaactcaaaaccacacacacgctcacacgcacacacacgcacacgaagatgggacgctttttttcttcctctctctctccggggtgcgtcctccttagtgtacatagcggcgtcggggggtggccccaggcccgggtagaaaagcatgcactgagccccctgcccctagactgcgagtactgtacaaatccaacacttgaaaccgacacgcacacgcgcggcgccgccacgggggtgggacacggacacgcacccacgcgcacacggccgcgcacgggcggggagggggcgccccgccgtcacgcgtcgctgtgcgagggattttgtgcctttttaagtccctgtatgttaatgcagacaatccggagagcttgtgtactaccaaatcctgattaaagacgccttccaggaacctgcgcctccgcctgctttctttcaccctcccccttcctttcccagctctcagtgtagaccctggctctgaggtcgccgggctgggcagagggcaggggttagtctgttgctgactctgggactgaggggtgggcaagttctgggtcagtggatgagcttcgtccacaccttagccaggcagctgggtgaggagggcaccccagaggtttgggcctagttggacttgagtcacccttgccctgctggcagtctcctttcactgaacgggtggggagggaaggggtgagtggactctggtctctgggactcagctccaaattgccaacttccgggtggggatggagggtgtgtagaagtagggggctgggcccaccaggcccagtgatcagttctgtatgggatcaggcttttgagaccaagtgtctggtgggactagaaagctaggatgccagaggcctgtgagaggacactgtactgaggagcctcccactggccctctgctacgatgggcaatctgagagatatgggagatgcagccctggccttgggggtgccagggtgggggtggcccgccaaggagggacactggagcatggactgtgagaacctggggttgggggtgcagggatggaacatgggttgaaggagaactcagtcagtgggaggggtgggccactaagaaggaaataatggcagacttctgagactggagagagaggggaaaggtgaggaggacaatgtaaaagaggaaggcccccccatacctccaccccatccccgcacactgccaaccagaaaggcaaaggggcaagctccagctgcattcccaaagccccggggcatttagaagacgccccccacaggctgtcagctcctcgccctggggcaggcaagggtgggttttggacacagagatgtggggtcaagtgggtgtggttctgcatagacccagggtaggtggccacgttcccgggtcatcttaccccttccgccaccttccccttccccggcattcctgggtgtggggtggagtggagggagggctcttggcttggcagagacgtttggagagtggtggcacagacagacaaatgcaagtgaagggtctgggagaggcggtgctgagtgcggagctgacagaggtgatgcaggcacatctcatctcctcgcaggtggagcaggggtgttgggggtgcttcttccctactggaggagaggaggtgggaggcatgcacgaggcagtttctgagagaggaggaggaactgctgtgagaggcacaagcctccgacctcagcataggaggagtggggagccagggctcaccctcctgctttcatcacacatcgcctcccagccccacatcttggactttgggactgtgggccggggtgcagtgcctgaagtctggggctggctggggtccaggcaggagtggctccatgcaccctgtgtgggggttaagggtggggctatgtggagccccgtctccagtgtcggtgtcagagaagtttccccaagggcatgagagcccagttttgttggtggcaattgaagatcagagtctggtccatcctctcccttcacttttcctcctaactggagtaaacatggacttgggctgggctcttgagctggtgaggcctagccctctagatgaggcacagtgcatggaggggaggggctggggctttcattctctctgagggtatcagtttgattggcctgtcctcctcctctccccacagccgaacccttaccatatatgcctttggctgaactctgaatcactaaggagctttaaaacagccagatttctgggcctcttctctgacctacagaatctgggggtaggatccaggattgtgtatttttaaaaagcaactctggacaatgttgtgccaagccaggcctgggaaccacaataagcagattagaatcataaaggttgctgccctgagaaggaagcaagaaggtgtgaattttgtcagacagctaaagagccacgcacactgacggtgtctgtggatcactggctgagtgaatgaactcaagatcaaatgggcaaatggatgaataattcactgggcattcaggagaggcagggagacggttaggctactctctgaggagggaggaatttgagcccagcctctgcccctccccagcacagagccagatgggggaagggcagagggactttgaaaccgaaaagccagcatgcctaggttggtgtgggggtggcagtgatccttagggcaaagttgtcctcaccctgagattcagggctcttcctcccaaaaggcagagggttccaggtgtccccatgtgggactgagtgggagacactggaaagagttttgggtcctgggccaccctggtggatgtgcttcataacctggaccaatgcccaaatccatgcccctctctgtgcctcagtttcccagtctgattttatgactgatcattgatttccagttctcattcctcctctctcccaggtaataggaggggagggcttggaggcaggagaaagggttccacctacaaccatccaatgtgagcactgtgtgtgtgtgttgcgggggatcccatcctctacatggggccttttcagagagatccagggcctggccagagagcaaaggaaagggtgtctctaaccaaggtgccagggattagagagggacaataggtaaaggttctgaggagaatgggtggcctggtggagttaaaggccatccctactgggcaggatgtgctggtgccagttgggtgagttcagaggtggttgggagagagacatgctcagagctctctgtctgtctacctgtccctgactctcagtgccagcacccacccaccccatggtccccactcatccgggagcttacagcagcccctccacctctatccagccattttctctagccataacattggtgactggcaaagtgtcccagcacaaggcctggcacacagttggtgcttagtgtttgctaaatgaatgaatggattaataagaacgaatattgtgcagaaaaagtaaattcttctggacacttccagcctatatgtggaggggacaaagttttttgttgttgttgttgttgttgttgtgttttttgagacagtgtcgttctgttgcccaggctgg

SEQ ID NO: 46569 - DNA, 1318 bp, Homo sapiens
agtgtgccccagcagtctggctgcgtccagccaccatcacccggaaggatgcccacaaggcagctgaccctgaaagcagcctccccctcatggagagtcagcagcttgggcagccacttccaggccagggtggtggcttctctgcagaccagctgaggggaggactcctgggtggacagcctttgacgtccaccccacgctgatgcagaagctcccagaacactcaggaaacttctccggacagagccctccttgtcaacttgaggccctcccaaggccctctactgccctctgggtccagcagagggagtggaggaagggccactgcctcccacctagagcttctccgaatgacaatcagctcgtgccaggtggggaccaggatatgactcctggtgcccaggccctgggcctgctccttgccaccaaccgaaccgtgaatgtagggcccccagcctcacctctgccccaggaccaacaacaccctggtttggagctgggaggaagaagggggcctgagagagccccaggtccattctacccccagcttcactcagcactggagctggcagagacgcaaaacccagtctgcccttgggattccaaacctccctagggctcccaactgacctcaggcctctgagtcactgaatgtcaccaggagaggtgggggagggaaagtgggccagtggggagggggtcacctaggggactgcctctgtgcctctccccaggaagcatccagggcagaggaagccacatctcccggtgcccccaaccccagctgcagcctcctccccctgagcattcattctctccaccaggcctccaggtcctgagcccttcctctgtaaaagtgtcacaccacctccctcagcacttccccatcacaacaacctatgtcactgactcagatgcagggtctgctcaccccaacacatgccttccctccccagccacaccgtgcacgaagggggcacaggagaggagaggggctgtgccccaggctccccatttcccagctcctcacagaggcctggtttgctcagtcttctgaactccagggaccagccctggtgggcatggggtggggagcagggagttgcccttcccctccctcgggaagccacctaagaatgtttacatgccaaacagaatgtaacacccctccccaagcccttcccagtcactgcatggcctctgcccatcctgcacctgtccaccccaccccaacaccctggaagccactgtcaatgattagatcgggtctcggaagggaagtagccatcacaccattaaaaagcctgtggaccttttt

SEQ ID NO: 46570 - DNA, 1140 bp, Homo sapiens
gagggggagcaggagagacaggcacaaaacttgtgacttttattgagaaaaatcagtttatgagcagactagtgcagttcaaacccgtgttgttcaaaggtcaaccatacatgtacaaccatgtatgtacttctgatcccaacagtttggataagagactatggacctataaaagttcagaagaaatctaaatgcccaattggggctgctcagtagagcatggcccacccataaaatggggtcccaaccatggggtactgtgagactctaaaatgaaggaggctagctgagtgctgcggtgtgtctgtagtctagccacttgggaggctgaggtaggaggattgcttaagcccaggagattgactccagcctggggaacatagtgagacctttttctctaaaaaaattaatgaaggagttgtctgtttgtatagtatacacttatggaccagtctccaagaccaagaataagaaaaagaagcatacatataatgtacaattttgtgtctggaaaggcaggtgagatgagtgagaggtgtctggccgccatggggcaggagagctgggcagaaaggaggctttgttctagtgtacatactgtaggagcttgtgaattttgaaccctaggttcactcggtgtaaatctttcacctcgtcaatgtataaacaactttggttccaggccaggctcctggctttgcctgagatccaaggtaaaaaggcccaggctcgcaaagtcctgctgtccctccaagaaggccactctctggcattccagaaacatcctggctcctgggacactctttctgttggcatggatgccagcgtgctctaggccctgattcatcagccttcagtggaatctccatgtgatttcgctttccttcttgtttaaactgtcaaaagcaggacatacttatggtaaaaaggcaaatgctaaaggcatataaaataaaagccccctccctatccatgaagctgaccacataaaggtaactcttacaaatggcttggtgtgtaccatttcagaccttctttttcctgtttgtaattaatagctctctctctgtctatatatacatatttattataaataaaaaggagagcatattatacctactattctgaaatgtgtttttt

SEQ ID NO: 46571 - DNA, 2755 bp, Homo sapiens
tgctgtacttttgctgcagggaccatgattgagaattgagtgggagggtcagattgaacatttgagtcttaggtattgcatgtacctttgacaagaccttggtaactccccctcccccattccctacccctccaaaaggtaatcttaggcattgcaggtaccttggcaacatgtcccccgccattccctatccctccaaaaggtaatttaggaagctgctggaaataggggaatgggacaggcagttggaaccatatgtatggggagagtccctgagtgaagtgggaatgggatgagcctgggatcctcagagacatcaagttgcccggtgtgatcacaggtgtgtcttaggccagggcatcagctcccagcaggggagagggatgcgaggaggcctcatggctcagcagaaagaaacctggttaggatccagctttcagtcctgaatcctgggctgtcggccaggccatggctgtagctgcaaataggcaaggctgacctaaggtctcacaggacaaagggcaccctgggagagctggccccaggccccaggggcctcctcttcttagggatcctgggagctctgctgaccaaggggctaggggctcacctcctatgccatcacccagctacctcatcatggtagccttggtccctgaacactaatgggtaagccccagagccacgagccagtgacctctgaatggatggcttccccttcccccaggcaccaggcaagacaggtagaggtccctggagacctgatggctggggagggcccagtcctgggccagcccctgagggctggattctggctgcaggctctccagtccatccactcccacctccagagtccaagggtctatgtggtgggcagtttgagctggctggatactagagggaggctgcacctgaagcatttggtgggtgagcagcatgggctttgaggagctgctggagcaggtgggcggctttgggcccttccaactgcggaatgtggcactgctggccctgccccgagtgctgctaccactgcacttcctcctgcccatcttcctggctgccgtgcctgcccaccgatgtgccctgccgggtgcccctgccaacttcagccatcaggatgtgtggctggaggcccatcttccccgggagcctgatggcacgctcagctcctgcctccgctttgcctatccccaggctctccccaacaccacgttgggggaagaaaggcagagccgtggggagctggaggatgaacctgccacagtgccctgctctcagggctgggagtacgaccactcagaattctcctctaccattgcaactgaggtacttaagcccagaagttgagagacatgtgagagggatgggcctgccattgccttgggtggttactgtgtaggcattagatgtattactttacctcttaaagtctcagtttaccaatctgtagatgggggctatgaatataaggcacttttagttcatggcttgtagtaacaggatcctacacaagaactgttatcatcatcattaattgggaggtgattaaggcagggaagggctaaagtggcttcagggagttgagacaaagagctgagaaggcaatttctgcagcaagaggtggagaaacaatagaggccttcttttctcccttcctcttttccagtcccaggtcggtatttacataatccatctggaggtggaatgtcggtggaggcagtctccctgggaggcagcaggtcgaggccttccttgggaagaagctgaggctgcaggactggggagggacaaagtttcctattccccaagctggcgtgaatcgttgggaggtttattatctggcatggaggtaccagaatggcagagttcgcctcagaaggctccagggtctggagaggaggagctggtgcctgctggagaggggctgatgttcataggaggtccctttctgcctgtccttgcagtgggatctggtgtgtgagcagaaaggtctgaacagagctgcgtccactttcttcttcgccggtgtgctggtgggggctgtggcctttggatatctgtccgacaggtggggtgaggcactgggccaataagaaactggctgggggaactttctcccactagctggggtatgagcctagtctacctatgccttagaacctccttccacagggaactgaccctgcatgacccctttgcaggtttgggcggcggcgtctgctgctggtagcctacgtgagtaccctggtgctgggcctggcatctgcagcctccgtcagctatgtaatgtttgccatcacccgcacccttactggctcagccctggctggttttaccatcatcgtgatgccactgggtgaggcaggcaagaaacaggcaggacctagagggctggaagaaggcagttgtcagagtgaggctgagcccatctggtcctcactaaccatcttcctgtctcctgtcctggcccagagctggagtggctggatgtggagcaccgcaccgtggctggagtcctgagcagcaccttctggacagggggcgtgatgctgctggcactggttgggtacctgatacgggactggcgatggcttctgctagctgtcaccctgccttgtgccccaggcatcctcagcctctggtgaggactgcaggcagctggggagcgggagatacaggaagtgaaagatgagattaatcagagcctgagatttgaggatagagagattgagagatgaagggaaagagaaac

SEQ ID NO: 46572 - DNA, 999 bp, Homo sapiens
ggtctgtggtgcagggttcaggcctagagggaacttggtgggggggccagggtatgcttaaccacaggggaagttgtccacacatacccacagaccatgtacatgccatacttcaggcatgtacatgccatcccagtgtctgggatggggctgcccacctttggggccaaacaggtagccgtagcaggggacgtggcagtaggggactccatcatgctgagacacagagagaaagagagctgtctcagcctggttctcttcccatctccagcctcctcccaacataaccactcattcctgccctgctcacctcagcatgactcccagcagtcagggtcttgtggcaacgctggcacctcagacacggtcggtgccaatttctgcctaatgacatcaccttctcagctggtggtggaaagaagtggtaatgcttccattctaggggtagagtagggagacctacctgccttggatcacctccctcccccttgctgcccaccctgtatccccctccccaagttttccactgttacttaccaaaatagacgggctccccacagccagggcacagcgaggtctccccagtgaatgtcttcatatggggagggcctttaaaggggaagaggccctggctatgtctgaggtggagatgcccaccagcacctgcctgcatatggtgctgtcctctttcaaaagccatgctcattccagagtgccccacccaggcgcccaagagtctgccttctacaggcccagagctgagccccctctgactccacctcctgccccatccctatgtgtattagggactatctgcttccttctcctgcttccttttcatcctcccaggggctcacgtacccaccatcccaaccctgttagcaactcaatcctcaggaaacttgagctgatataggagctggccacagcacgggtgtcaggtgttggggagcacagtgtcattgcctacttcagggaatggagggaaagaacagggac

SEQ ID NO: 46573 - DNA, 1849 bp, Homo sapiens
ggggctgagaggagtggtgcagccagggctgggagtggggggattgtacaagtaggagcctacaccaccaatgttcacccctgaagagagaataggggaggtcaggcttgagcccccagctcccagccacaaggagggttctgctgacccatggccccttaaggctggtacttacccctgggtccaaagagagccccatagcatggcttgtggcagtatggcctcccattgtgctgggcacaagcagagggaagtgggttactcaaggccagcgggagccatgccccacaggccttcaccccagacaggctgccaggtgtgtctgtccactggctgagtctggtgggcctgggaggggtgggggatgggctggcatgccagcatttccactgtggtcaagggaggaagagcaagagcagctcagaaggtgacgctgcttcccactcaccctgatccccaaaaccatgggatccacagtcacgacccaggttcccaaattcctggctggtgtggggtccaccaggtgggcggccttggggttggctactgaggttccctttggcaggcctccagtgctgaagttgggggctggtgcctggggggtgggaggcagtgatgtaaacagggcagtgctccctggccaggtcttacctctgcatgcccgccaggggacaggatgctgtggcagcgctcacatttcaggcagaagcggtgccagttcttgcccagggagctcaccttctcagctgtggaggacaaagtggaaccgagctgcgaggagcctgtccaagcatagggcccctcctttccctcttcggccctctagggaattaggttggcctgccctgcttcctggagatgagtgtctccaggaggccagctccatcccgctccggtttcacactccccacagagctctcagaggaagggagaagacccgagtgggagcgggtggtgcggagactaccagccgctgcaggtgaaaagggtgtctgggactacactgtggctagccctccgcgtcctcagggaatccagcggctcccattcgccccatcttctccccctccgcagcccgggcctcaccgaagaaaacaggttgctggcaacgcggacaggtccagctcatagctccgctccaggcagcgcacgcggcacacagtaggtacgccgctgcggctcagttccgccccctccgcaggctccacccacggctcagctttgagcctccctgggcggaatccgcggttcctcggcgctcattggttatcagaaatttagaaccactccacttgggagacaaagggctatttcgctgttacttcaaagagcattaaagcctcggtcagacccacggggaggagagaggatcttgaagccgtggactccagactaggaaggcacatgtgtaacgaagacacctggacagggagctctactagtttctggagcggtaaggacaggaaaaatgtccacagtgcagacatcattaaaacactactctctccaaagcgagggagtaggcattctttgaaatgcaaaattccaccttggcagtatagcaagtggttgaaagcaacaaaatctggagcccgtctctggtaccctactctttgacttcaggcaaattactgaacctccctctctgcctccattttctcatctgtgcaatgagtatgataacagtctctgcctcataggattgttatgagagttaaataggttaatacatgtagagtgcccaaacagcgcctggcatgtaaacgctgtaacagctatagctatcactatgatggatcccttaatgaactcaagactcggtttggaagcctcagaacatggtctgtat

SEQ ID NO: 46574 - DNA, 1126 bp, Homo sapiens
agcgtgctttccttattgaagagcagaaaattgttgtaaaagtattgaagagtcagaaagctaaataaaaatgaagctttttgaataataataacagaaaaaagaagtccgaaaggaaaaacagtattctaaaaaatgttccctttccctcacctatcccccagatcagtacagctcagacaccattggagaactgaggtctaagcagcaaagcaggtgatggaggtagggctgtgagtcatagtttgtatgaaagcttgtgaccaacatctttgactgtccctgaacagaggaatgtgacagttgataagaaacagatcttgggctggaacaaaggagagaaagtggtggtgaccaacgtgttggcagccctggcaccaggttgctttccattgcttcatccaccaggtcatgcctcaggaataagtaatccttaactaatatatcagcagcatgaggccctgaggtactttttgcccttgattgacttcttattccactgatggctttgcttaatatcatgaatattcccgaaagttactaaaaccatagatgtatttgggcagtaaactagacctccaggactctaaaaatgcctggacttacaaatcaaaaacaaaaccagcctggcgtggtgctcacgcctgtaatccaagcactttgggaggccgaggggggcggatcgcttgaggtcaggagttcatgaccagcttggccagcgtggtgaaaccctgtctctactaaaaatacaaaaattagccaggcatggtggcacacgcctgtaatcccagctacttgggaggctgaggcaggagaatcgtttgaacccaggaggcagaggttgcagtgagctgagatcgcgccactgcactccagcctgggcaacagagtgaaactctgtctcaaaaaaaaacccaaaagcaaaacaaaacaaaaaaacaaaaccagcctaatagttttcaggataaatctggaattgacacagcttagatttaaataaatctcagagtttacaggatttaaaggtcagctaaattttactaggttctggttctcattcccactgtgtttctgagcccatagccccaaagtacaaagaggaataaaagtacctattagcattttt

SEQ ID NO: 46575 - DNA, 1893 bp, Homo sapiens
gtattaactgcctcacttcaaagacttgtgagggttaaaataatgtgcaaagtgaaaggctaggcataattcctgacatagaactcgataagaggtagtggctatggcagtgactgtggtcctgcacacttcattccgaagcagcagctccaattcatttaagctaacagtttacactctagacgtaaagcctggtagggttcaagcgtccctaactcgccacaaaaacggacatttcggctttttcccctaagatccaggaaggcagctcaggtgtaaggggatgaaaagtacggaaccccgaggacacatcaactctacaaaaagtaccaagacacacggtttggacgaaatgcccctcgccttggcaaactttccacacctcacccggcatgagagaaacagcctattcctaaggaacggagcgcgcactcccgacgagacgcccgtgcgctcccgagtccgttattgtgtcaacgctcccgggtctgacagaagcctccaggctcggcatccccgagggagttggccggaggcttcgcgcttaggaccctggtctggaggccccgggcgtttctggaaacgggaattccgggggaggggactgggggatggagggagtcctggacgaggggtgggattacccggctgccgctgtcgcctggatggtctccgcggccgtcccgggcatagtcggcgcgggactccccccggctgctgcctctgaagccggccgggcccggcgggaagagtcgtcggccccgcggtggcgacggggagccgcgacgggcccgaggcggggacggggagacgcgacgaccccgtggcggggacggcgaggcccggcggccgcggtgccctgagggcgagcggggtcggcgagccggggtccgcgacgaggagccggagggcggaggcggcggtgagctgcggcgagccgggcctgaggaggagccagagctgcggccgctgcgcgggccgcccccgccgtcgtctttaggccggtgggaagagacggaggagcgagcgctgctgcggtacatggttcttgcagcggcggccacggcgacagctctgacccgggggcgccctagacgcaggctcggagcgcgccgccgcagctgcagccgccgccacctcggccgctgcgcgccgcctcagccgcgggagcagccccctcccctcggccccgcgtcgccccgggggcccggccgagcgcgcccccgcggctggcggttggagggcgcgagcacgcgtccgacacacccccccccgcctccggggttccccgctcctccactcagggagcggccgcaggaaccaagaaaagtggggaggagcacagacgccggcgcgaggctgggcgaggggaggggaagcgaagcgcgcgccctgagctctgcacgccccgcctccgaatcctcaagatggcggccgcagagccgcccacttccccctcccgcggccgccacgtgacccctgtggcctccgcgcggggtgggcggagcggaaggaagggcttctctggagagggatctggttttccggggatgctccaggcctctggacttaggggtttggagaccgtgcggaggtgtcttcgctctttcgtgccgcccctcaagcctcttaatttagggatggacacgaaatggttgaaaaccattcgtgataatataaacgggcctgtaaacgttagctgtgtgggaggttacggaccccggcaggagcgcccaccgaaatcctgtccccagctgaagcaacacgacccgcatcagtttactttccagtttgcctaatttctagaggttgaaattgaggataggaaagtacgaggtggaggtggtgggccagaatcaaacccaaaatagacgttgtcaggcctctgagccc

SEQ ID NO: 46576 - DNA, 1521 bp, Homo sapiens
atccatctatctatctgagactggggtctcgctatgctgcttggactgttctcgaactcctgggctcaggccatcctcctgggatctaccggcgcgcagagactacgggcgcgcagggactaccgaggcgcgcaaccgtgcccggctccccacctcttcaagaaatggagattgcaatgcttgtgccaactagtaagcttacacagttgtgagcgaatactccacgtgagaggttataaatgacgttgcactaagggagggatggatccttaacgcaagtcaggccacaaaagcgtaccaaaacgcaactgtgcgtctgcaccagcgcgcctgcgtgcaaaggccagccgaagcagagagcagtgcacatgcgtgcagctaccagcatatgggcgtggcgaatagcgccggctaggtcttccaacctctaggtggggtgccagccggggcgggcccagcaccccggccgggcagtactttttttttttttgcatacaccagttctcaggatatcggaatccggtgcacagcagcttcttcaggtttgaggttccggatgcctgggggcggagaaacgggaggggaaaaacagatggcaaggtgggtgaccagcgtccagaaatccactggggaaacctcctcccgtttttacccttggtaccgcgagaatgggcggggtctggcttcggggcggaagcgacgggcggtcccggttccagggcggggctggagacagggagacccggctgggaagtgcaggcaaagccggctgttaccctgcacagccgtcaccctcaactttcccttcaggtgaggcgtccatggaacgacttctggcccagctgtgcggcagcagcgcagcgtggccgctcccgctgtgggagggggacaccacaggccactgcttcacccagctggtgctcagcgccctgccccacgcgctcctcgccgtgctcagtgcctgttacttgggcaccccgaggtgggtagagacgggcgcaaggcatctgtccatgtgtgcctgcagatctcacccgcggcctacatcttccggcagtgtcaccagaatagcgaggtctctggagtagggcagaagtagaataaaatctaagcattgctacttagcagcaatgtggctgttcttgggcaagtacctgccttctctgagtctcattgttgggaggtttaaatgagataatgaatttaagcatatagtgcagcgcctggcatgtttttaaaggtccgatgagtatcagaaatcatcagaattgtccattttcagctacccggactcagctgtcatgaattggaggcagaattgggggaacaacgtttttagccaaaagcgatgatgtgtttaagttgtaggctcagtttctcaccactgcaacccatgaaaccttagtgtttccagattaagaaaagcatacctaggctcagctgaagaggaagcagtagatagacaagaagagcaaaatcaaacattaagccttccccaattaagggctataaggtgtggat

SEQ ID NO: 46577 - DNA, 686 bp, Homo sapiens
tgcttgtctctccatgtccctcagaagctgcagcattcagaacaggccctggggtttatgtagcatctcccccagattggggatctgggggagaggcccagcaagtgcttccaagaaatattttgcaaatggggatcctctgtttaggctggtgaaaagcaatcacaccctgtgactcatgctacagcatacaaagaacttaaaatggggcattcctggcaataagccaactcctgttcacctcctgttctgagttttcactctctcctgacctttgtccaaccctgtgccccacagctcaacccggcattctctggtggtggctgaattgcctccaccacatttggctcacgtttctggcttgggctgtatgttttgtttttcctcttagttcaggcaagacaaggctagatttgtacaaaggaattttgctaatgtgttagttggggcttttttgggtataagttacagaaacacactagagctagcttaagcaaacaagaatttataataaggatgtagagatacattgcagaatccaaaggcaggaacgcagctggatcttagaaacagcccagaaccaggcctcaactcgcagagctctctgcttctgtgtgcctctctccctgtatttgcctggttctcttctctctgtggacacaccctccactgagcagaagatgtga

SEQ ID NO: 46578 - DNA, 1227 bp, Homo sapiens
tgacggggaaccagtagcacgattctctctcccactgtatctttgagatgtgttcccctattctttttttttttttttttctttcagtactggattctttccccgcttcccgctattgccctgctcctgacacctccttccttctgtggccagtcctccaatccctgctttcaggagagccccatttttcaccatcacctacctagtgtcccacctccccaacccgaggccccgcccccatggccccgcctcagatgacgcgacacgccaagtgcgtggggattcccgcggccctggccactacccggcctgccccgcggcaagatggcggcctgaacgcagctggcagcggcggaaagtttgttgtggggttggagtagtcgggcggggaagccagagttggggaggattgcgggggccctagcctgtagtaggggcgaagggggtactggctccagggttgaaaagaggagatggaatggagtaaggtccgaggcggagaggaaaaaaaggagctggggcggaccggggccctagggtccagtggcagccctaggggagggggatttgggggcggggcagccagaagtaggtgttgtgcaggccctggagaagcagagtcacaagttggaggaaaatttcttagccgcgaataaagaagcctggagcgtgggatagaggcccgactgtatctggccggccagaggggaaagggatctttctagtagagtgggatagtgaggaagagagatctggaggatgccgggcagatctgctaaggagggaactaaagccagtcaaatgaccctcttctaggcttagatcagcctttccacagctgttagcagcatctgccccaatttcagctgaagattcaggtgccccagggactggaagaaattacagtgcctacttggaaagaagaagagatagcgacttgccccagtccaaccccagagcgggtaaggtggcttccagtgacaggtttctggctggcatgctccctgggaggaggatgcatgggcttagagtgatgccaagaaacatttggtctgaaaagggctcacttttatagagtttgtcctttgtctgaggtccttaagttagtgtttggcgtagattgcaggctgacttttgagagttggtgtagaattaagccttgtgtgccttcacctatgcaagtaaacctggacagaggcctagagaccaggccgaaggatgttaaca

SEQ ID NO: 46579 - DNA, 1065 bp, Homo sapiens
ggacagactgacattagaatctacactgagcacaccttaaaggggtgtgtgtgtgtttaatgtagatgtacgtataaggctcatttctgactttgattactgacatgagcagttgattagccgtagtaaatattaaattcatagtctggatataatttttaaaaaatagcaagacatcaccccccccccaaaaaaaaacttaacagtcaatgtctttcctgaataaaattaataaaatttgaaacaataaataataaaaataggaagtagcaaactacacagaaaaaaaaaaaaagaagtggcattttaaatagcttcgtcccctcagctgaatgggaaaatagaaaacaaatgtgctgctgaagcctatgttgtttgaagaaggccctggcagcggtgctcagtctctccctttagccaggcaggaggcccagtgtagccttgaggtagaggtgtgcccaaggtttcattgactggctttcctttgccctgtatttaagactcactctcctcctccttctgagtcatgtcctgtctatttaacacaccttcagggcccttctttttcttcaacaaatgactctctaccctgccattgaagtaggcatgtgtctgccatctaattagatttcaggggaattgcgggctcaggactttgggctttccctgggaactctgcactggccctctgatgacctttcctatttgtttggcacatgtgattttgagaagcagacggtatctgtcagacgtatcgctccccacttcatgaacttgggagccatatatcttaggatagtgtattttatcttgcattgcgtggcagtcagcgtgctgaaacgtgttatctctaaagagtatacctttgtactttggtagacgtcctcaaattttctggattcgggtcacattttagtaaactatggagttgcaaggtgaaggatgatggattttgagctgattcttcccctttattgttttctttgttgtgtaaatcaattctcagggtgccccttattcagatatttatgaagccaatcccttcacttccttctcaccaccata

SEQ ID NO: 46580 - DNA, 924 bp, Homo sapiens
gtgcgcgttccgggggttgggcaggcgctgctcggcgcttgtccttgtccctcgcggtcgcggcggcggcggcggcagcggcagcgagcggctcaagggcttcggcttaccggtctcggctaggaggccgtacccgctccctccttctctgccgcccggctccccccgaccaccccgcgggcctggccgcacggctggcagagagagcctgaggcgggcggctggcggcagctccggctccagctccagagagcgagcgggcggcgagttcccatggcaacggccgcgtcaccggcgctcgccccgccccctgcccggccaaggccacgccggcccgcgaggttcgcgtacactgggtggttcggggcaaggagctgggagcgataggccgctcttcccttgggagtggggtcagccaactggcaggcggcaggcggcagggctgagtgggtagggctgacggggagcggaatggaggcacgccccgtggagatggcgttgggcacggttactgctgcttctgcccattcttccatccttccccgttcctaaggtccatacccccgccggaatccagggcactgttccctcctatttggaaggccccagggccctttcatccgcgccgcgcctcgctcccgcccccgtgactcgaggcgcagcgtgcgtggtgatcccggcccatggggacttccccgcttgctcctcgccaagatggcggcctcatcagggaggccccaggggccacggctgggcagagccagcttgagctgctggggagaagggtaccccatagggtccctagggcaggggagcctcagatagatgcaaggtcctggtgccacaccttctcaggtacgcagggcactgttgacatctgagggtgtgtccgtgccgcgagactggggcagccaatacaaagaa

SEQ ID NO: 46581 - DNA, 2005 bp, Homo sapiens
cgctgatgcagctcacccatatcctcgaagctagagcctgaggtatcatccatgttctccatgtcaatcacagctgagcctccgccctgtgaagacaatggctcctagagtgcaggacttttctgttccatccattaagtcctctgctcatcccagggtttagggctttgttcttccactgctgaggatacggcttggaatcactacagatcatgccactccattccccctcatatgctctcagaacgcctggtttctagctttggctatcttttctagcctgggaaacctactagtcttccattcatgtctttctcctatgttacctatcaaagactaaaaggctgaaaaagtgcccatttccttctttcctaagccccaaacaaaactatacacatagtatgttttcagcgaatgccagtgaatcccacccaaccccactccatgccttaccccgaccaacctcctaacttgttccaagaataccttcttcctaatgcctcgggcgggccctgaaacccgagatcctcaggctggagtagtagtctggccctttcaggtcaatgttaatcccactgactttagtgtgcacgaagacccaaagaagagagttttgtaaatggagcggacttccaggcccagagggggaatccccaagacacttctggacatcgccggccctccggctgctggcagctggtgccttggggccattacctggatgttttcttcgaaccctccccattccgggccagctccatttcgggcgccgcccgccggcgccgctgtagttgccatgtcccttgagggctcccgtcgctgaaacccgcgctagccccgcgcgcggagtgggcaagatgtgggcctccggaaggtagacgtccagggtcgaggagaggtgggatcggccggaacacaaaaaggagaagcccggatgtttggacaaaagcaacttccggaagctggggacgtggacgggggcggggaaaaatctcgcgatatttaagattccaggaggcggtgcgttgccacggagacggagcagggctactaggacgcacgcgcgagatagaacctctagtctcgtggagagattgaagatggcggcttctcaggcggtggaggaaatgcggagccgcgtggttctgggggagtttggggttcgcaatgtaagccttgtggccttgagctcgggcgggaggaatgagagcggaacagggatgggtcttgggattggcgtggggatagctgtgggctcactgtcccttcgtggacaaattcgtccctttgctctaggtccatactactgactttcccggtaactattccggttatgatgatgcctgggaccaggaccgcttcgagaaggtaagtggggccggagttgtctggggagggttatgaaggccagaccttgtggtctgagcagcctgtgtctgtctcagaagctgctcttgggggtcgctccgtttgtaagtttgttgagcaatgtgctagacgctccgtttacaggccaaattagacacggtttctacccagttctgcaaagatgttcagtcttgttgaggaatggtgtgtataaacagtgaatctagtgtaatatggtgaaggtggttgatagcgatgaagacggcagggttggggtggggagcattacgctgagaccaggaagaggggcggagaggtacttaacatttcaagaggagggtacatctcaattgagccttgaatggtaagtaaaaaagaacaggagttaaattatgaagggtttgtttcaagtcagtgaagttcaggatatacaggttttgtgtgtatttagtcttttgtattgtttcacttagcttaaaataagggttaaaattgcatttaaatagattactgaatgttaccgtttaggcaactgacctttgcgtgcagcttataaacatgatctgtaaatcagtgcttgggaaaattttacttttttaacctgttgatacaaggaataaagtatgaacaatgaaaa

SEQ ID NO: 46582 - DNA, 2008 bp, Homo sapiens
attgtattaacacccccaaactgcaacataagtcagtcccaagagcagagcattcgggtctcacgcaaactactttcaggaaaccaaagtgcccttgttaaaatgcaaagtaagtggtagaagttatctttgcgcaaaatagcctaaaaatattacactcaaaaacatgggagaagtaggggtgcgagaatttccccggaaaatgtccaagacacaaacgaaagttagcgagatgttaaagcatataagcataagggtaccagaggggctggagctcggtcagggccaggggagtgggccagcaggaaaacgtttagtgcaggagagaccataaagaacgaagctggtgttgggggcgggatctacacgtgcgcctcgggaaggcgaggggatgtcgggcttggggaatgaaaatgggcgagggtcatgttgcggacaagagtgcacagaagcgaggaaagggggaggagagggctgtgggaagctgcggcgagatgagaagcagcatagggaccggagtgtcccaggcaaaggacaggagcggcgagtagagaaggcggcgatttgggagaggcgcggagggccgcgaggggaaggtcccggggagttgggaaaggaggtccaggggccgcgtgggcgggagactaccccagttacaggcggcgccggagctgctggggctgggagagggtgtcgggaccggcccaggacgccaggaccccagctaccttgagggcttccagccggtagcgctgggtggagttggggtccatcatgaccgtcaccgctttcaccagctgctcgcacagcgcgtttacttgatccatcgccatgcctagcgccacgcgccgagagcgcacaccactgcagtcccgggaccacgaggcacgacagctccctcggcgagaccacccgttggtaccgggccgcggcgggcggcgggggtgggaagctggaggaggagcgttagcagcaactcgcgctgggaagaagccggcgctgcgcacgcgcccggcccgccactgcgcacgcgcccgcggaagtggcggctcccgtgtgcaggttgagcctaggtgggcggggcgggaggcggaagggccgcggtgcgcagccgcgtcaacggcccttcgcagcgggcgcgctgtcagacctcagtctggcggctgcattgctgggcgcgccgctctcgtctgatccctgctggggacggttgcccgggcaggatcctttacgatcccttctcggtttctccgtcgtcacagggaataaatctcgctcgaaactcactggaccgctcctagaaaggcgaaaagatattcaggagcccttccattttccttccagtaggcaccgaacccagcattttcggcaaccgctgctggcagttttgccaggtgtttgttaccttggtaagaaaatttagaaccgttcgctgtcactgtgttcagactttctatgttgccttggctattggttttataatgtagcagtgactgggccaaggttgcgtgaaatataaatcatgctaacagggataaggccctggtactgtcttctaagatttttcttgtagaaaaaagtatgtttttccctgtagttgttaaacctctctcttggaattactttcctggatgtattattacctggtgggcactaaacttgttttgtgcggattggggtaactcgagatgtttaaagggaataattgcaatcagtgaaggtttgtgcagttttgataattggccaagtgctatgtataaggtttcaaagtagtgtaatccttatccaaaagcatggcttgggcagaaagtcttcttcattttccatctttataaagctcttggccgggcgcggtggctcacgcctgtaatcccagcactttgggaggcggaggcgggcggatcacctgaggtcaggagttcgagaccagcctcaccaacatggtgaaaccccgtttctactaaacatacaaaaattatgtttgcatttttagtatttttatacaggc

SEQ ID NO: 46583 - DNA, 4955 bp, Homo sapiens
ctatcataatccacttctcgctctcgaagaacggttatgtctgccccaaccctgtcacagcaaggccacagctgccatatctcacctgtccttctcctattccaggctcgctctggacctacagacttcctgcacctcccacagagctcccaataccttagtgcacttcctaccaccctccaatctattcctcattcacagttccctttaaaacaaatatacatatcttaattcaaggagcaaaacagcctaggtccagtgaggaggggaccaaaacactaaccctccccacttcagccctttgtcaagagaaggaaagtcccaccttggcccctcaggccctaggtaactgggtatgcatgggtccccccaagtcaggtaaaggagaactggtggggaaggggaagcatacttctctgccatccggtgcagggtcttgagcgaagctcgcatttcctcctcagccagccccaccagcagcccattgtcctctaccccaatctggtagacggcctcaccacgtccctcctggagccgccacttcatttgtgtcaccaggtgctcaaagcggtactgggatggattcaccagcttcaacttagggcaagtggggtatcataaggtgaaatcagaggtgttcctcccaaacctacatggtccccacctgttctgctgcaaggaccaggactttctctttccacttaaactcatacctgatccccctccaacagaacgaggtacagagcccttaacctgaaccatatccttaaactgctataattatgaagttggaaggctctcagagaacttatcccatgctggtggatcaccagaggtcagcagttcgagaccagcctgaccaacatggagaaacctcatctctactaaaaatacaaaattagccaggcatggtggcgcatgcctgtaatcccagctacttgggaggctgaggcaggagaatctgagattgcgccactgcactccagcctaggcaacaagagcaaaacttcatctcaaaaaaaaaaaagaaagaaagaaaaaagaaattatcccacactggcaaggacaacctaccccagcccctgcttttccccagcctaggactcactttatattcaatgtttccatcttcagcctgaaaagaaacagtgagcagttaccatacactgtacagacccaatccctacttcccctcaattcccactgggtccaggtagctaacttgagaaagcaggaagccccactggcacttggttaggcaagtgcctgtcaaaggtcagtggcagacaagatcctctattcacccccagcatagcctctatgaagggaaggcctataaggacacaaggagtcacccatttaagccaggaacagaacactgaatcaatccattctttgatcactggcagcacgttcttcctagatgcaagatcatcccttcctccccacctccagggcctcaaacctgcttttcccagaagtctatgtctcctctgtgcccaggctgttaaaacctttctttgtcactggtctaggaaacaccatttcctccctgcctgcccctttcagctgatgtcatctagagtaagaggctgcaagaggttctggatcagagccaaagggtgagctcagcaatggtcactacaagcctgatgaccgagaagatctaggtgagagaggagaagagctccaaagctggggctgagaggaacagaaaaactcagaaaatgtaatgaagcggacagactcgctatggcctttacctcttgccccctaacctcagtggaggtgaaatcctgaatccaccccacagtctcttctagctccagtgggtagcacagcacagaagcaccctgttacctgaggcttcccctcccaggtacaaagggatatgggatttgcctgtttggccagtctgcatttttctacccgcctctctggatattttagttttcctcttcccttcctatcattccatcccttcaaggctgtctggctcccaggccctaacaggtcttcactcataatctccacttcatggtgtgttaaggagattattttttttccccatcaataaaaaccttttaatcatttttctggggatgggtggcttcaaaaaatgtggtacaagaatgacagtctagggcccagaccaatggttcccaaagtgaggtcctgggaccagcagcattagtatcacacgggaacttataagaaatgcaaattctcaggcccatcctcactagtaagaaagaatcagaaattctaggctgggcacggaggctcacgcctgcaatcccagcactttgggaggccgaggcgggtggatcacctgaggtcaggagtttgagaccagcctggccaacatggtgaaaccccatctctactaaaaatacaaaaattatctgggcgtggtggcgggcacctgtaatgccagctactcgggaggctgcagcagaagaatcgcttgagaacccgggaggccgaggttgcagtgagctgagatagccctacagcactccagcctgggtaacagagactccgtctcaaaaaaaataaataaataaataataaaaaaataaaattggccaggcgttgggggccagcaatccgggtgattcgatacatgccaaagtttgataaccactggcttaggctgtgtgtgtgtgtgtgtgtgtgtgtgtgtgtgtgtagtgaacatactgctcttttcccgagtactgtgtgtgtgtccgtgtggaacatattgctcttttcccgggtactccccttctccctgtggaacaagtttagaagaagtggtggttactgtctgcctctcgtcccaggatgcagtctctcttgccctatggcggcacacgcagttggtcggggtgctcttcctgggatcccctttctctacttctctcctggggtaatctagatcagaagggggagtcctccctctccactcttcctccctgaggtcctgtcacctgagagtccagtctctgcccttcctccctggggtcccgggacctgaaagaggtgttctcctcccgtgcccctcctccctggggtctcgacaccggaaggggagattaattatctgggtcccgcctccctagagtcctgggccggaaagagtggcttcttcccgccctaccacttctcaggtgctcacctcggggggcaaatacggggggttgttggctttgccccctctgttccttccgttcttcttctttccctttggccccccgcagccgctgctgctgccggcccccctagccttgagggttccgcccacggccgggccccctccgggccggcagcagccgccgaacagctccgatacccgcgagtccatccgccgctgccgccagccccccgcccggcccctcccccgaccgccgccgccgtcgccgccgcccttactgccactgccgtgtccggccggcctgagcagagtggggtggggctctgcacaagctacgccccccacctccctggcctccgggtcgcgtcagaaacagccgcggggcaccacgggatatagagtccccaggcctgggaattcacttaaatgacacgtcgccgccctacaactcccaggaggcatcgcggcgcaagtggccgcgggagtcgtcggaggcgtggggaaggagcgcgccttggcgcgcaaaggcttaagggagctgtagtctgacttccagtcctcgcgctatgttctttttctaggacttggggggaatttagagcctcgaggcctggggtggggacgcgaggacaccagcgtagaagagcttacatcagaatcgagctttgtgggcgctccgggatttggccctttagcgcggatcctagacaacaggttttggacctcgagagctgcagaactgaggctactggtgccgccagcctgctggctccgcctctgcctcagtttcttcccctatggcccgcgtgccgctggggtgagtcagggcgaacgccagggcggaggcggatggtgattagccaaattacggctgttattgttgggatgattatgctacctttacatagtagtcactgctttattaccaggctggcaccgtccaggggctggttttaataaccggaggcaccgcggtggccccgacacgagacccgaacccgtaaaccagcttcctccccgaaggctgcaagcatacccaaagcgagtattcctcctcccctttgttttgaagcagaaccaatcgggaagaactgagtttggttttaaacggccaagactgtaggaggggcctggcccctacttcgggcggggctagggctcgggttacaccaaccaccacgagggcggggcagtggccgggaatagaaacttggcctagggccacaggggatttttggcttttgactctcttgtgaagcaatctccagctctttagtgctgttgcactctacagagtacatacattcagcgacataagccagtgcacagaacacagaaaggcagggtggaaaagcagttatgttgctgagctgcgagtcaggacgctagggctcaattcacagccgcatggctgtctcatgactcagaccactcacagtgtgtccacttctcccctcttctcgaactgcgaggtgctcatacacggtcaagaaattaaacaactcagccgggtgcggtgcctcacgcctgtaaatcacagcactttgggaggccaaggagtgtgcggatcacctgaagtcaggtgttcgagaccagcctggccaacacagcgaaaccccgtctctactaaaaatacaaaaattagctgggcgtggtggcgcatgcctgtaatcccggctgctcgcgaggctgaggcaggagaatcgcttgaacccgggaggcggaggttgcagtgacccgagatcacgccattgcactccagcctgggcaacagagcgagactccaactaaaaaaaaaaaaaaaaaattagcccag

SEQ ID NO: 46584 - DNA, 1589 bp, Homo sapiens
tttcattccttgtacagagtatgctcttgtctcaaggtctccaggagcactaggccctcctctttaccttgttgacttatcctacaggtcacagcttcacacatttcttctgggaccactccttcccagcccctaccctctgtgggtcagccacccttgtttttcacttccacaccccgtgtacacttttctgtataattcatcacattgtattgtatctacaggcagtgaaccccttgagcacggggcccgcgcctggcttgttctccgctgtctccagcacctaggacagggcctggcacgaagtaggtgcacagtgagtagtgaatgctggagtgaatagatgcaagagggctggtgtcttttagaaagcagcgctcagtggctgagaactcctgggttccctgctgggcaagggttaggcgtacatttgccagggtgttaaaggaggaacgcagggttcaaatcccagctccacttaacctcccccacactgcggcgacgccgcgccttttttccgacccaactgagccggaagtggaggcgcgggcttcccatgatgccccgcgagacctttattctaaccgcaaggagtagcggaggggaggtcgtgatggcggcgccggaggcggaggttctgtcctcagccgcagtccctggtaaggcgtggggccaagagtttggggagccttggggacttgtttcttccctaccgccgcgccatccattcgtttatccgctggtcctctccctagcccgtcttccctgtcttccgggtgtcctacacggctctggctgtgactccatcgccctgggtcgcactggaccctgcttgactacacttttgactcatttccccagatcaagtcccgcagctttctgagcggggagccctccgaaatccccccactatcttgcagtcgattaaatctcctcaggcaacagggatcaggaatctctccctgccacggcccatactgtaggctgcggaggatatgggcgtatgtcggagtgcctgctttttcagggtggctggtttgtcggccacagggaatgagaagactgactggcttttaggtttttaatttttctctcttgtccctcttttcatctaccagatttggagtggtatgagaagtccgaagaaactcacgcctcccagatagaactacttgagacaagctctacgcaggaacctctcaacgcttcggaggccttttgcccaagagactgcatggtaccagtggtgtttcctgggcctgtgagccaggaaggctgctgtcagtttacttgtgaacttctaaagcatatcatgtatcaacgccagcagctccctctgccctatgaacagcttaagcacttttaccgaaaaccttctccccaggtaggcacaggctttgggagcaagttggtgggaagactttgtggctcttagatgggaggcaggtagaaagggggtctaagaaatcttcaaagcctgagagaataagcagcttccagggcttcggtcactttctccccactctagtctttggtagcctaacccttctggctttttcaactgttctttctttctgaaactcacgtgt

SEQ ID NO: 46585 - DNA, 1254 bp, Homo sapiens
tttgtgagcctgctcaagacacatcctctttatgaaaacttccaactgggtttgccgtttccagtaactgagtctccctgtacttcgtcacgtaaaaggctaacttgcatttattggagtgtgtatatacataatctcattagaacctaagcttttcagaaaaagggctgtattttctgtctccagaattccttcacagcttgaagcatagcacttggcattcagtaaactctcagttgatgctcgaatcaggccgctttcccagattaagattaatgaaaagctgaactaccatcctgcatttgcctatgtctcagctattcaatggcctttccactttggcctccccctcacagggagactagcggcccggggcagagaacgccgccatcagatcacagcattttgagaagggaaagtggaaagggaggctctgggagggtacccagatggccttccttcgtgatccagagactctttaataaaagagactgcgattcggagaacatggaaggaagaattaacatgcaaaccctttccgaaaacttttctgagccctaggacaggtttagtgtctgctcctgctaagtaagcaggcttttctctccgtcctcctccgccttgtgaagatactcacaaggggcaggagatcaagataaggcaccagggtgtggaaggggcttttaagcacgcctggggagccggtacctccaaagtttcagaatcggacgaaggaaaggtaggaaggagcgcaccggggctggcggaagcagtctctgccgctcttcttaatttcaggaggttgctgggacgcatgactcaccttccctgaacccgcgagctggaagccgagaccagctggtcgctgccgggcccgctagtagcccacggagaagccgcccacagccggacaccagagccttgagggccgccatcttcaaaaacctaccctgacctctcgtccatttccgcttccggaacgtagcgcccgccgccgcagtggtggggcaggaacggcggggcggggttgtagttcgcttgctcctgtcacatcatttctctcacctgtccgctttgggatacgaagagaggcttctgcgtcaagcctatatttcgtgttaaggatctaggggaggtcttctagctcctgtctgccaatgcctacaagtcttcaaggttgcattcgtttcctggaaggcttccttaggaaaatcgcacgcaacaccccacctatgtctttaaagctttctcttc

SEQ ID NO: 46586 - DNA, 6060 bp, Homo sapiens
agcaggaacaagggcctctgtctgcccagctgcctccccctttgggttttgccagactccacagtgcatacgtgggctccaacaggtcctcttccctcccagtcactgactaaccccggaaccacacagcttcccgttctcagctccacaaacttggtgccaaattcttctcccctgggaagcatccctggacacttcccaaaggaccccagtcactccagcctgttggctgccgctcactttgatgtctgcaggccagatgagggctccagatggcacattgtcagagggacacactgtggcccctgtgcccagccctgggctctctgtacatgaagcaactccagtcccaaatatgtagctgtttgggaggtcagaaatagggggtccaggagcaaactccccccaccccctttccaaagcccattccctctttagccagagccggggtgtgcagacggcagtcactagggggcgctcggccaccacagggaagctgggtgaatggagcgagcagcgtcttcgagagtgaggacgtgtgtgtctgtgtgggtgagtgagtgtgtgcgtgtggggttgagggcgttggagcggggagaaggccaggggtcactccaggattccaatagatctgtgtgtccctctccccacccgtccctgtccggctctccgccttcccctgcccccttcaatattcctagcaaagagggaacggctctcaggccctgtccgcacgtaacctcactttcctgctccctcctcgccaatgccccgcgggcgcgtgtctctggacagagtttccgggggcggatgggtaattttcaggctgtgaaccttggtgggggtcgagcttccccttcattgcggcgggctgcgggccaggcttcactgagcgtccgcagagcccgggcccgagccgcgtgtggaagggctgaggctcgcctgtccccgccccccggggcgggccgggggcggggtcccggcggggcggagccatgcgccccccccttttttttttaaaagtcggctggtagcggggaggatcgcggaggcttggggcagccgggtagctcggaggtcgtggcgctgggggctagcaccagcgctctgtcgggaggcgcagcggttaggtggaccggtcagcggactcaccggccagggcgctcggtgctggaatttgatattcattgatccgggttttatccctcttcttttttcttaaacatttttttttaaaactgtattgtttctcgttttaatttatttttgcttgccattccccacttgaatcgggccgacggcttggggagattgctctacttccccaaatcactgtggattttggaaaccagcagaaagaggaaagaggtagcaagagctccagagagaagtcgaggaagagagagacggggtcagagagagcgcgcgggcgtgcgagcagcgaaagcgacaggggcaaagtgagtgacctgcttttgggggtgaccgccggagcgcggcgtgagccctcccccttgggatcccgcagctgaccagtcgcgctgacggacagacagacagacaccgcccccagccccagctaccacctcctccccggccggcggcggacagtggacgcggcggcgagccgcgggcaggggccggagcccgcgcccggaggcggggtggagggggtcggggctcgcggcgtcgcactgaaacttttcgtccaacttctgggctgttctcgcttcggaggagccgtggtccgcgcgggggaagccgagccgagcggagccgcgagaagtgctagctcgggccgggaggagccgcagccggaggagggggaggaggaagaagagaaggaagaggagagggggccgcagtggcgactcggcgctcggaagccgggctcatggacgggtgaggcggcggtgtgcgcagacagtgctccagccgcgcgcgctccccaggccctggcccgggcctcgggccggggaggaagagtagctcgccgaggcgccgaggagagcgggccgccccacagcccgagccggagagggagcgcgagccgcgccggccccggtcgggcctccgaaaccatgaactttctgctgtcttgggtgcattggagccttgccttgctgctctacctccaccatgccaaggtaagcggtcgtgccctgctggcgccgcgggccgctgcgagcgcctctcccggctggggacgtgcgtgcgagcgcgcgcgtgggggctccgtgccccacgcgggtccatgggcaccaggcgtgcggcgtccccctctgtcgtcttaggtgcagggggagggggcgcgcgcgctaggtgggagggtacccggagagaggctcaccgcccacgcgggccctgcccacccaccggagtcaccgcacgtacgatctgggccgaccagccgagggcgggagccggaggaggaggccgagggggctgggcttgcgttgccgctgccggctgaagtttgctcccggccgctggtcccggacgaactggaagtctgagcagcgggggcgggagccagagaccagtgggcagggggtgctcggaccttggaccgcgggagggcagagagcgtggagggggcagggcgcaggagggagagggggcttgctgtcactgccactcggtctcttcagccctcgccgcgagtttgggaaaagttttggggtggattgctgcggggaccccccctccctgctgggccacctgcgccgcgccaaccccgcccgtccccgctcgcgtcccgctcggtgcccgccctcccccgcccggccgggtgcgcgcggcgcggagccgattacatcagcccgggcctggccggccgcgtgttcccggagcctcggctgcccgaatggggagcccagagtggcgagcggcacccctccccccgccagccctccgcgggaaggtgacctctcgaggtagccccagcccggggatccagagaaccatccctaccccttcctactgtctccagaccctacctctgcccagtgctaggaggaatttcctgacgccccttctcttcacccatttcctttttagcctggagagaagcccctgtcaccccgcttattttcatttctctctgcggagaagatccatctaacccctttctggccccagagtccagggaaaggatgatcactgtcagaagtcgtggcgcgggagcccactgggcgctttgtcacattccaccgaaagtcccgacttggtgacagtgtgcttcccttccctcgccaacagttccgagtgagctgtgctttagctctcgtgggggtgggtcaagggaggatttgaagagtcattgccccactttacccttttggagaaatggcttgaaatttgctgtgacacgggcagcatgggaatagtccttcctgaaccctggaaaggagctcctgccagccttgcacacactttgtcctggtgaaaggcagccctggagcaggtgtttttttggaactccaaacctgcccacccaacttgcttctgaaagggactctaaagggtccctttccgctcctctctgacgccttccctcagccagaattcccttggagaggaggcaagaggaaagccatggacaggggtcgctgctaacaccgcaagttcctcagaccctggcacaaaggccttggctacaggcctccaagtagggaggagggggaggagtggctgcctggccacagtgtgaccttcagaggcccccagagaaggacacctggcccctgcctgcctagaaccgcccctcctgtgctccctggccttggaaggggtatgaaatttccgtcccctttcctccttggggcccaggaggagtggagggtcccgggagaatattgtcagggggaaggcagggggtgtcatgggaatgggtgagggggctgaggtgcagaatccagggggtccctgcaggagccgcagtggtaagctgtccagctggaagcctggtaactgttgttttctcttgagaggggcttcctgtgaccttggctgtctctgggagcagggctggggtacctgagtggggtgcatttggggtgtgtgggaaggagagggaaagaaagatggacagtgggactctcccctagcagggtctggtgttccgtaggctagagtgcccctctgctctgcgagtgctgggcgggaggggagttggtgagagctggagacccccaggaagggctggcagaagcctttccttttgggtgctgtcaggtccgcatgtcttggcgtgttgaccttcacagcttctggcgaggggaggaatgatctgatgcgggtggggagggttagaggaggcctcaggcctaaggtggtgcagggggccccctaggggctgggcagtgccaaggcataaaagccttccctggtccctggtggcatttgaaggtgcccaggtgagaggggcttggcacctcctcaccctgggagggagaagaaaccagggaacaggtaggagtgggagacaggtgaggctttggaaatctattgaggctctggagagatttgtgtagagaggaaaatgtggttctcccccagggtctcctcctgggtttttaccctctaagcaacctgtgggcatgctgggttattcctaaggactagaagagcttggatgggggagggtggttggtgcccttcggtcctcggcacccccctccgtctccaacaccagctcaccctggtatttgtcatgtcagcaggagaaggtcaccatgttgtttttctcgcccctagtccttccttcctgccccagtccaaatttgtcctcctatttgaccttaatacttaccatggctttggaccagggaactagggggatagtgagagcagggagagggaagtgtggggaaggtacaggggacctcgacagtgaagcattctggggttttcctcctgcatttcgagctccccagcccccaacatctggttagtctttaacttcctcgggttcataaccatagcagtccaggagtggtgggcatattctgtgcccgtggggacccccggttgtgtcctgttcgactcagaagacttggagaagccagaggctgttggtgggagggaagtgaggagggaggaggggctgggtggctgggcctgtgcaccccagcccctgcccatgcccatgccttgctctctttctgtcctcagtggtcccaggctgcacccatggcagaaggaggagggcagaatcatcacgaaggtgagtccccctggctgttggatggggttccctgtcctctcaggggatgggtggatggcctaattcctttttcttcagaactgtggggaggaaggggaaggggcacaggaatataaggatcaagaaagaaagagctgggcaccacgaggttcaccctcagtttcgtgaggactctccgctgttcaggtctctgctagaagtaggacttgttgcctttttcttctgctctttccagtaaaattttatttggagaaggagtcgtgcgcacagagcaggaagacagtgttcagggatcctaggtgttgggggaagtgtcccttgtttcccctagctcccaggggagagtggacatttagtgtcatttcctatatagacatgtcccatttgtgggaactgtgacccttcctgtgtgagctggaggcacagagggctcagcctaatgggatctctcctcccttccctggtttgcattcctttgggggtggagaaaaccccatttgactatgttcgggtgctgtgaacttccctcccaggccagcagagggctggctgtagctcccaggcgccccgcccccctgcccaaccccgagtccgcctgccttttgttccgttgtggtttggatcctcccatttctctggggacaccctggctctccccaccactgactgtggcctgtgctctccacctctggggagggaaggccctggggtcttccttcccgcgagtttccctgacctaaatctggcgtggctgggtagtggccagcagtggtgatgcccagcctgttctgcctcctccttccccaccccaggagccctttccttggcctagg

SEQ ID NO: 46587 - DNA, 4467 bp, Homo sapiens
catactcagtcaagagaggaagatttgggaaaaaaggtgggactgaaagctcttgacctgtgggagagtcaggaagagaacagccccatcctcagggagccccactctgagggagacacagccccgtcctacgggagccccagtctgagcgaggtttagccccatcctcagggagccccagtctgaggggagacgcagccccgtcctacgggagccccagtctgagcgaggtgcagccccatcctcagggagccccagtctgaggggagacgcagtcccgtcctcagggaaccgcagtctgagggagatgcagccccgtcctcaggaagccccagtctgagggagacgcagccctgtcctcaggaagccccattctgagggagatgcagccccatcctcagggagccccagtctgaggggaggcacagccctgactcagggagccccagtttgaggggagacacagcagtgtctttagggagcccagtctgaggggagacacagcagtgtctttagggaggtccctttaggagttcaaccccttggtccttcttctgaggtagtgggttttgtggggcactggaggcccagagttggctgtttgaggaagagtctttcagggcattgccattctttgtcattctttactgtagccagaggtgtggtgtgatctgaagggtcccgggcaggtgtcctccttcccctccactgtgcccaccatcaccctcctagttctttcccttcaatcattcaccgtagtctgtaatcaccatgccccaccttaaattaaggtctagaaaggatcttggagacgtgtgagtcccagatcagaggagggaactgaggccccaaaagagaaggggaggaatcttgtgtgaggtcacccagggagttaatagcagggcctaaatctcagagcagtgctttgggcttatggagagactctgggagatgtggggccacccagcacacatgtgagcagagaggcgctgtgaaggagtgtgtgtgtgtgtgcgtgtgtgtgtgtgtgcaggggtgagtggggttaggcgtctgggtcccctgtgagcagatgggagttcatatgggtgtctgctgcaaggcgtctggctattttcctatgtcacagtgtggggtggagcagggagggacaggcctgtagcagggacatcagactggtcttatgagtcctggcccagccctcttgagaccaagggcagagggcgatgagtcacagatgactcaggtgctggaggccacagccacgcatggcacgtgacagccaaggagggccaggtctatttctggaccggatagacaggtgacccaggaggctgacactgaaatctctcttcctagaggataggagggattctattcacagactcagagcctgggcccctgggatggggctgaaaagacggcctgtgggcttacctgtcccttggagctttgctccactggctggttgagctgttacttcagtggggcagggctgtcctgagccatccccattctcctgaagatgtgcggttagggtcactctccactggggatgagttctccctggccctttggatgccagcatctagcagcaaagcacccctgccctgccttggtaatgcagtgtctgaccacagacagcccctcttctttgtctgaggcaagggagccaaatccttgacctgccacttgaccccaaggcctaggccagaagatgaggtagtctggggtgcagacagtgccttgggttcaaatctcaccctgagacctggagttacattgtttcctcttggggcctcagttccatcctctgtaccccgtgggggttgtgcttgaaggctcaggggtcccctctagctggctcctcatcaggccttgaaggctgggctgacggcgaggccttgaagctgcctcctctctcttgcctatgtttgaggtgggggactggggagggttggctgaggatagaaagtcctggcctggtaggggcatgcctcagggtccccggtcacctgaaacacagtgatgattacagggtgagcctctgggaccagacactgtaatctgctgccctccttcctgccaagggcctactgcagcatttccttctgcttttcacaactgttttctaagaaccccaggaaggcagaggcctcatctctgaggggtgcggcagaagactaaagaagaggggagggagaaaatggagatggtgagagaggaagggagagaggatgaaaggatgagggaaaggagatgcgtgaggtgtggtagacatcagaaggcttttccctggttgacagtttgaggaagaggaggggaaagaagagtgggtggggtcattctctgcctctaagctcccagcttaggtgctcctcctcagaaagactgccctgacctcattacctaaagtagcagcctcctccccacctcagtcactttctatcaattgctgcatttaatgaggaagggctgagtcagctcatgtcactttttggctcaaatccccgcagtggctcctggtcttcctcagactaaagaccaaagtccttacgatggccttcaaggtcctacatgattcctttccaagaacagcaagtgtgttcttcaaacacatctggcatactcctgacccagggcctttgcacagctttccccctctgcctggaatgttctttctccagatatctgcaggactcactcccttgccttcttcaagtctttgctcaaacatcgccttctcaatgaggcctgccctgggcatcctatttaaaatggcaatattcttcctacactctccagccctcttaccctatactcttttatctttttttctaaacacttaccactctttaatgttttcacattataaaatgcatgtatttattaagtgcattgtgtactttctgtctcccctcaccttgaatttaagttttacaagagttggtgtctttgttttattcactgatgtgtcctaagtccctggaataggacctgacacacaatagatactcaacttgtggagcaaatggcacctgtcactgtgggtgatgatctctctctctccctctgtgtacacgctccccacgcacccatcgacctccctgaggatgcctcactcagaatagcagttccatgagagctgggaactgcctatcttgttcatacttgtgctctcagcacgtgtctggcacagaataggtactcagtaaatatgtgttggctggatggaagggacctgaaacagaggccagggagagtgggaagacaggccagtcactggcaacaggcccgtaatgagaggattctcgaggaagagaatggaaaggtgtccgctggtcattatgaggcccctaagatcctcctatctgaacagaagagatgctccttcagatctgttacacatgtacacacgcacacaatccaggaccatcacacaccagtatatagaaggagagagcactggaaactgctgccaggttgatgatggcatcaggcttgaccactaggggcttcctggaggaggtggcctagggctagaccagcaccggagcaaaaaagttcaggacatctccagtcagaggtaaagaaggatgaaggaaagaaagaaggggatgtggcagaggtcagggaaggcccaggagagaggcagggctgactgaggctaggactgagactggggctcgtcaaggtcagaagccttgggtttggggtccagtaggactacacaggatacagagttggaggaaaagcctggattttcccaaccaaaatccctagaggaaggaattttctgtgtcttcctctggggtttgcattgacaggcacagggcagatggtcagtgttgtcctctgattgagggcgcccagcgggagtgccgtggcaggatctaatgcccaagttcccctcagaacgtggcgccgggaatgtgattcagtgtataattccagctggtacttttttcccaataaaaagaaacgccttcattctcaaagaagatgattataaaagaaaaaaaaaatctcttgacttacagaaagaaccatgcccaaatctagtgaccatggttcgcacaacatgaaaatcagatgagagggagcacgagtgaaagaagctcaaacacagggcgtgaggtgcccctgccagcctcggtccctgaccacacggccccgcctttggctggagggagagccctggctgtcagccgcacggtgtggaaagcccagaaggaaagcagttttgaaattttacttgtgattgatacacttttggccacgttggctattttcagagcctagctcccccatcctctgtcacagacacctttgagttctttaaatggctgtatcttttgttgtcatatggacacatggtctttatagtacattcagacagaacaggttttgtgagcaaaggatatcgagcttttttccctgatatacaaattgcaagagttcgttctc

SEQ ID NO: 46588 - DNA, 5354 bp, Homo sapiens
tttgcatggatacctccccctcacctttcaggattctgttcatatgtcacctcctccaagaggctttccttgaacacctctcccctcctcccttgcaatataaatggcatccccaagttgcttgcattccactcttttaattttcttcatggtatttatctctagctaaaatttatttgtttacagattgactttctctctctaggatttcaggggagcaggaaccttgcctgggtgattgtcgagactgttggccccatgactagtgcttagggttcaataaatatttgttaagcgaatgaataagtgaatgaatgaatgaatgaatgctctaaccctgcctttgctgaacttctagagattgtgcaacctctcttacacaatcaggagcttggtaaccttgtttgcactctcattccaaggatttcagacttgctttgccaatcttgttgcagctcatcaattcttggcagccccacccctcccagctgggcccaggacgcacagtaggtcctcagcgcacacccatgggactgagttggtgaatgtagcctggctcttgtcctgattatctgggtgacttcaggcaagtcagtatgcctttcgttgtttatagttctcatctgtaaagataaagaggtttgtacagatggtctctaagattctgtttgactttcaaagaccagaacagaattaaccagttcaaaagaagagctgtgggtgggtgggggttttaggtggattgagagaggatgggtgggggtaagggagagggtagtgaggagtttggagggggattaaatgggactttcttcccagggccttgaggactgggctttgggggactctcagggtgaggtttgatccctgaagttcaggcttggccccttgttatttcctgctttcctggggctgtggctgtggctgtgggagacttgacccaagaacggacagcctctctttttctgctctgccatagagcagagccccagcctggaacacacgagccctctgaaattacctgcacagtcttgggggtatgtgaatgaatgtcctttggggaaagaaagtccttatcttttatcagattctccaagggatttctgccttacaaagtttagaaacctgtatttagaaggccaggctgaactaagaagataagtcataggaggaggagaaggaagaggagagaggacccaaatccttttattttaaaatgtcttttctggaccttagtttcctcatcagtaaaattagaagtttgggtgatctctggtaacatccagcatttagaataataatgcctaattttactttgtacattatctcctttgctcctttcaaaagccatgtgactgtgtttctcatcagcatccctgtttttcaggtgacaacactgaggtctggtgactcacccagggtcatgcagcctgtgagtggcagagtgagccgggaacctggctgctggctgagaaatttcagggcttcttctttgagtgcccagcaggattgcagcaccacatggctctggggctctcccactggccagtctgggctgaagggaatgaagtgaagagagggagtttcccctaaaggttggttgttaatgatattgcagaagaggaagaggtggtaggaggaacaggtcatgcccaagtggaaatcctcagctccttccagctgatctagaaggcctcctggacaaggggacacttggggaggtggggaactgggcctcagcttggggaaagggaggcattcctaggcagcggaaagcatcctttctggtgggtaatccagtatttatggtgtttttgatgactggaatgcgggtgtgggttccctattggactttgggctctgctgcaggcctcaggctggggagacattttggaatgtgtcccttgccttctagggccacctttggcctcacctgctgtttaccctcttcttcctccccctcttccccccttggcagcctgagctagtgccaggaaattgttggtcaaaggtgaggtcaccaagaacctggaaaaacaacaggtctccattaaccttgtttacctgccaggtaactgttgctttacaaaggttctttcgccccttctttcattacctgcatttcctgctcccgtaaaagctcagatcagctgagcagattttggtggggggttccttcaagataaaccctcctgagaggctttccactcttctattttctggcatgtggtctgtatctattaggtcatatctcagactgtgtggtcacctgagtttagatgctggctgcccagcgagactgtcaacaacttgagggaagggctgtgttcatttacattctcagggcctggcttctaataatgtctgctgcttcaatggatggatgactgaatgaattaatgaatgagtgggatggatgtcctgggtttctatttcagaactcacctcccctaggaggtctcctggggttacttccagcctattctttgcatcttattcccatctttggtctgcctaatctgtcctgatttcttcatgctgtttttctcagagtttttcataaggaaccaaaaacaactgagccatgtggccctctgacaacctccccagggccctgcagacagcagactcctgatcaatggtcactaactgaccagcttatgggatctgggccaaaggagagccagggaggtcagattgtttcttgaggtcacccagctgtgaaagaacttgggcccatccttggccaaacctgcacatcatcactcagacctggggcttccttctgtgtgcagagctgatatttaaacaccattgatgtcaatgcatctattcactcagaaaatattgggaccgtgcttgctctggctctctgtgttgaagatgatacagttcctttacctcaaagaggtcacaaaccaatcagggagatgagatatttaccagagcagttcctcagcactggagccaaaggttgggacagtcagagaaggcttcccagaggcgctggcacttgaggcccttgaaagattcttaatcacttatttggtgtaagctgtttaagagagctttgctcatcttggttagtccaagatgtgcctgtgacctgtttgtggtcctggttcacaaggaggagggacagtagtggctatcccctgcatcagcaccccctgttccatcactgctaccgagggctgcaaagccacaggactagctggcagtgagagggcccgttgcctgcgtgtagacaccgggatcagagattggctgagacacaccagaggccccacagtgacccagggcggagcagggtctagaacctaatagtcctgattcccacccctgtgctctctccgtggatgccaccacccagttgcctttacgaggccagtgccttctgtgggtcagtaccttgggctctgggctgggtgctgggtgtagctggggtggtccttaccatggtcccccttttcacacgatgggcattgaaaggatagcccagactgagacccttgtcagaaggaggtggggtatgaacaaagcctaatgatccagggagagaggatgcctatcagagagggtaccactcccctggacctgcatgcatagcggagttaccattattcacatgcagggcaagcctatcagagaggagtcagagggaggaaggctgacagaagtggctctctgggattcccagctgaggctctcgcactcccgggtcttgttttccctaacagcctcagggcacaaagtccagtggtgtgattttgtcatctcttcccagggcagccttaaagggccagtgcctcctctcagggttaatgattacctgttgggtcaccaatagacccaggtgtccttgtgtgtgaagacggttgggcggatgggtgggaggtggtgaaagaggggtggcctgcctgaagaggaggctggggcttcctttaaatacatcctcatagaggctgcctcctggagctctcctggttagccttgggtcatgaggagggatctgtctttaatggctaacagcacagggaaccaacctgtaaaccccaaagggagggtaagatttatctagggtgcttccccccagctctgacaggacagattcccacagtaggaggtgggggactctcctagccgaatgggaggtgagggtatgtcttagacctcagagggtcaggccttggctagggcaggaccctgggacccttactatctccttcccctatacacattcatgtcccaccagacctggaaggtgccccagtgtgaccctgactcgacccgaccacagtcgcagtctttctcccatcttccatctctgtctcacctcccagccttggaaaacacttatattagtaataggcactaataatgataacaaaggctgccctttgttgggtcctgggcatagcacgtagattcacttgtaatctgtacaagtgccctgtgagaagggtgcatatcacacccccattttaccagaggagaagggaagctcagctcacatcactgctcaagatcacacagagcaagaggcagagcagacttgaccctggtctgtaccgtgtcaaagtccatgctttttgccaccatgggtgatgggctgtgtgcctgctgtttccccaccacagtggctcagccagtcctccagaaagctttcaaggcttaccacatccagcccatgtccccctctgcttcctcccctagtgagaatctattggccctgagctcagccaggctggattcatctgccaccaccctgggctctgtgtctgcaggctgcttctgcctctgtgcagcccggtggctccctaggggcagggcagggcctctgactggcagggaggaggcacagagatggacaagattatcctctcaggaaagcagctgcagaaagcgctgtttctccttctgggaaggctttatctcaagctagtgctcctttcctccttgtgattcacagacctctcatgatagtttgaacgtgtcttgtttcaagtgttcaaatctaaagacttccatcagattcctgaccgcggctttttcacagttattatctgtgtcataacattgcatacttgcggcttatcattttccaagctctgcatacgggtttggcagagcaggtttcactgatcccactagacaggtgaggaaactgaaccctagagcagggaagtgacacatctagaacacggccaggcttggtggctgaggccagctctgccgtcacacacttggctctccccggtgctgctttctttgctgcctctgctgtgtctgcatcaaggagactttctcctctgaggctggctggccttggagttatactttgcgcctagctg

SEQ ID NO: 46589 - DNA, 640 bp, Homo sapiens
aaaaattgccgagtgtggtggcacacatgatgctgcgcatgtggctccttcatctggggctctgaagtgactcatgcctacactgcctctacatctgtctccctgtgtttggtgaatgggcaaatttgacttacgtgtgatgacagatgatttaagctgggggtgggtgggtgggagagataaggaggccccagccccatgcagagaatggcacatgatgaccttggtttatttaaagtggagtgctgccatggccagctgtgccccaggggtgccaggcctacacaggcctaggcggtcagctgtgccctctgcccagggctcagcctttactaggtttctgatgtccttatgctctgacatcacctcaggtcctgtgacttacccccctcccactcagcagggaccttgttctgaagactttggccttttcttggatgctctcgggcagtgtggcaggtggtgtcaggtggcagtgggtgatggggaggcttggaggctggctgggggctgggggtggagaggtaccactttgtcctgcatggctggctctgggtgtaagtgcagtgagtcacacctttcaggtagtggtgaggagagagggcagtgcatggaccttgggtatgtgtgggtgtggggt

SEQ ID NO: 46590 - DNA, 1797 bp, Homo sapiens
atgccttttcctacatttatttgtgaattctatgtgaaaatttgtaatctttgagtattccaagccatttccaacccaggtgtgttctcatctacaccttgttgaatgcctgaatcttaagtcttgaggaaacaatgcctcctctaaaatccacctgaaggaaatgagcaacttctaatttgatcactaatcagcacagaggaggcttataatggtggccacagggctggggacttggccttccctgcgctaccctgtcactgacttggcagacagcgtgactggctggctcctcacatcgccgcctatccctgctcccaaacgtctgggcgctcagggaaaattaggagggaagggagacctggctcctgttctcagagaacaggacaggctctaggagctggagccggtgtggtgattatatcctgcgccaggcagaaggcaaagggcagcctccaaactacacttcccgtagcactctgggtcagtgctgtctcatagaactatactgtgagccatatctctattttaaaattttctagaagcctcatcaaaaagtaaaatgcacaggtgaacttgcaatcaatatatgaaaacttgttgagataatttacattatttttcatgcaaacacttcacaatgtggcatgtattccacaccagagcatgtcttgatttgggccagccatgtttcaaatgctcaacagccgcgtgtatggatggtggggtcttggtcagtcacctgtctcactggtcctcccttgcatgaaggagccagggctgccagtgggtgtgcagagacttgatgtcaccagtctagtctgttctactggtgcccgcccagctgtggaaggggctcctggggatccacaggggtgatttgctgagtgcacatttctgtctgggaagggagcccatgcctgtgtgtgcctgctgttttccagttatggtaaatattaacgaagcagtgggagccaggccctccaggaggcctgggctcccccacggggaggaatggagataatgctgtgtaccttagatagggctttaaacctggcctctgaggctgcagggtttgagctgccagggaaacatgggcatgacttttgttcccaggaccaggattccttgctgggagattctcagaacccgcagacctcaggagtgccacttgcctccacatttgcaatggcctcaccccacttcttacagtctcccactcacaacccaccctcttcacttaaagagctcttctctccaaatccacttgccaacaagccagctcagccaaacttaaggggatgggaaacagattgggttcagatgatttctttaaaaaagaaacccaaaccaataagcacgtactgagcgcttgcagacgctgggctgtcacatacacttcctccttctcgcagcaagcagggctgtggctgtcaccccagcccaggagagggacgtgagagccaaaggagtcagcatcacagcctggagacaaagctgggattttgactggatgccatctagttagctatcagaaagttctctccaagaggggagaacactagtgtttatttgtatttgcataaacaaacactgaaaaaatacgtaagaaactaatgtaagtgattacatgtggtggagggaatgggaaggtggggggggtgcgggtactgggagtgagaattctcaaggataattactttgatatttgaactgtgaggatatattacctaatttgaaaaacaagtgagatgaaattttaactgtttatttattttttcctggtagatgaagatg

SEQ ID NO: 46591 - DNA, 1082 bp, Homo sapiens
tttcagaaaataccatccccatactaacctgtaggacaggtgggggatggggagatggagttccatcacctctggctctttccagggttgggatgggatgttatggagcccctggaagcttcagctgagggttgggggcagctcctggccaggtttccagtgtcttggtcctccggggaaaatgaagttttcttttgtggtctgtgtgtctttaagacttgaaggctgtggggacctgactggggaaaattccaaccagtgggttcctttgaaatggaagtgacatctagtggtctgaaaaagaactgccaagttgaccccccccagccccaggctgcccctggggtcccttccctggccccaggtcactttcctgctgggccacaaccctgcttgagggcagtctaagtcctgacagtgggcttttggtggcagggtgactctcttggccctgcccaggctggaacccaggccaggtacctgcactcaggtccagacacagagaggccaggcccagggcagccagaagaggcccaaatatgccagggctgcaacatcgcgtccccaggtgaggtggaatccttgggtctcgtgtctgttgattctgaggagccctgtcctgagtcttccacagaagtcagagtgctgtgcaggcctcagtgctgaatcatcctgtggccaggctgctgttatgcaatgatcccgccgtgggtccactggtgtcagcggctggccttcagcctccccttcagggaggcaaggggctttgggcggtgcatgtgcccagacttgggatgtgtgaaatgacggcctgctcaaacacctggccttggaaccaaaagggagggtgggaggaggggacagtgcccagtcgcttgttctctaaggttcctgacttgaggagccccagtctgagggggagacatagccctgccctcagggaaccccagagatccctgatgagggcgggagcaggaaggaaaaacacacgagtggaacagacctgatgaaccctgcaaagcgccagaaaagccagagcagatgattttaggacagcagggccccaggggctgtgctgggaa

SEQ ID NO: 46592 - DNA, 943 bp, Homo sapiens
cctgcccagggccttagccaccattccctttgctgcctgggctgctgtctgtgacatcctaccttgcgtgaggtctgatgacagagcctggggagctatccccactataaacagtcaggccctgagtttctcctgccaacctggtgccttggccctgtgtgccctgcagccggccagtcctctgtctgcagagcagggatggagatgagaggggcctgcccagcttcctacagacctcacagttgtgcaaggccgcctgagtccaaacaaaccgcaaacctaccgcttccctggcaattgcaagcattctggccagcaggtggccaggctgtcactgctagggacagccagggcccaggtcctagaaaaggcctgcctgaccaggagggaaactagactcatgtctgggcctgacaggatggaaagagctccaggcagagagtcaggaatcctgagttctagtcctacttcccctaccaactcactgtgggacttagggcaggtcccttcccttctttgggccttagtcacctcagctgagtctgaggagtttggttatggttgtccagggtgccttctgtcttggtgttctgggagtatgagttgctgtcacctggaggccctggagaggttgtgcagcctttccctagccttgggacaaggggcacgccaacccctcttcattcattcagtatcagctccaacttcagagagcaaaccacaggcaagagaacaactatgtttggttaaacatgactgtgtaaaagtgaggaagatctttttggctctgacttggaagcttccagttgctacttcatttattcatttaatgaaattgaagactaaattcagttcattcatttgtttaacaaatcttatggggcagctactgcaagccaggcactgtgctaggacctgggatttgatggtgaaccaggtaagc

SEQ ID NO: 46593 - DNA, 8464 bp, Homo sapiens
cacattatgtgcacgaagaaacatgcccacatctgcatgtgtgtgcacacaatcacgtatgcctgcctggcctggtttatatggggagtgatggaagaaggccattggcctctccaggttctgtatgtgtctggtgacttggagtgagtgtgtttctttactgtttccttggagttgcatcataaagtgccttccttgaacagggccggtacaggaccaggtcagcctgtcctcattacatcagcagggtgagccaagggaggttgcctaaaaattcaagtaagtagtccccagcccatggaggcttgagagacccccaaacccctccctttctctggagtcccacctagggttaaccactggctacactcccagggaggccccaaaagctgccagattatgccctttaagagatgagaaaatggcttgaccaaaaaagttaatgtttgtaaacaccagtttaaggagagaagggatttcaaagcctccgcagcctgctgctccacacctctgagcatctgggaatctcagcccggggctgtgcacacagtaggagctacatcggcagcactctagggaatggggtctgacaagtggtggggggtacagggagccagccccagaattcagaggtaatgcagaccctcttcacgtttgaggaccctgcctgcatcacttccagcccagaggttcttagcttcgtcatctgctgggggtgagggaccaccagtttagggagccccctgcagaggccccctggattgtcccttcttttccctccttggccttcctcccagcttggtctccccaccacccccaacactccccagacacattcctctccttcagactttcgtttcaagggcttggtgatttctttgcaggatttgatttgccgctcaggcatttccttgagtggcccctcggtgtttgccctcatccagatggcatccagatgcaaacatcccccctcccccagctccggctcctcagctaggggaattgaatcttgacccccacctcacacccacctccctgcatcatcagctttgtttctgggatctgaggtcagggcatggactaacacctctgcctgtggctctctccaaagcccgacttctggccatcctatgatctgcctccctcctccgcctttgttcaattcagcaggtaattgcttcacagccaaagcaaatgtcaggatgataatgagggagatatgatgcagttctggcctaggcagggagggggaagagcagggtgtgtgcttgtgttgagggagcaggtgctgagggccctgatctccagctgaggtcctaagagatgaccaaatccaggtgagggaactgaggagagcagatgataaccatgctaatagttacagaacaaggtccatgtgcaataacaacgtaaagaccagttcatttagtcctgtgagctgggcctccttattcccattttacagatgaggaaactgaggcccagaatggagagaaaaaaacgaccagagcaagcacctgtataataaattctctgttccaggcacgacataaagatcagctaacttaacaaggcgttctttggaacaccttgagagctggacactcttgtccccattttatagataagttaactgaggttcagagaggcttagtaactcatgcaagactctgtggcttcttaaatggcagaacttggctccaaaccaaaggcttccaaggcccatggcgcttcttgtgtgccccgatttgctcagcatcagggccagaccttcaggagctgtccccagagccctatcctgacatggtgaccatcgccctgatgggaaatgtctcaaggaacctggggaacagtcctgggtgagaatccctgtgcctgggggaacctcactgtttctcagaggtcaggctccaggcctcttaactctctgtccagtgctggactcttgacccagggcaggactcgctcttgcgaggcccttgctgacctctgctcaaaccctctgcttccccttcaaagttaatatttacatactctctgccatgcctctgtgatgctgccatagatatcaaagtgcttcctgaccccagagacaccccagggcccccaaaacccctcctaggctccatgctccatgcagggcccatcgaccctcaggcggccagaatgatgggcagcatgctgtggccagatggactgtactctcttcaccgcgcaccgtcaagcttccttgacagaaaatggggcatttggcccaggctcaaagctgcagtgtaggcatttcctagaaccactgggcattggaccccagaagtgtgtgatgagtcggggccaagggtcaggctgtcccagctctgtgcctcaggcagctgtgggggtggcctccagcaggccctgcctggtagtacctggtgggcctgaggtgtgtgcgtagagccatccaggcccacgggaggaacatccacctgtctggactcacagcccagagaacaacagagctgggcatgtagggcaagttaggggcagggctggaacttctcaccagcccgcctctccccagtacctcctccaggtgtcctcccagcgtgctaagaggtggatgccagcattggccagaccccctcctctccccgctcccttccctctgtcttccgtccttctggctctaagtgagctcagctttgcagtagaagggaaacctgaggaactaaggatttctgagctgggctcctcccccagagggtcagaggggctgttttcagctgggagctggggtgacttggaaccccagagagcttcagggaagaccccaggctgagcaggagagaggagcatccctgcagctggcagtctggaagggctggctggcctaggtccttggggctggggtcctcaggtgggtgcctgtttgctttctgaagaattcctgcaggaagcatgtgggtaagtgtctgagaatttcagtgatggtcagagggagaggacactgctaccagccacatgttggtggccaggtggcctgggaagggacaccgtggctggcacaccaggccctgcaggttaatgtttgacctggagccacgtgtttttccactgggtatttttatcctctgtacctggcagtgggcagctggagggagggaggtacccagctagtgtctcactgggcaagacaaggctgcagagaggccagaggggccagctgagggatgcagaacaggggattgaaagaacaggagggagtccctggagcaggccgactccccacacctcagctacactcccagccctactctgatgccaccccatccctggctctcctctctctgttaggactagcagtggtgaggagatgaagaagatagggaggaaaaccaagagatcttctcaggggtccacagcttctcaggaaagttaaaaatgtcccctcctctccccatattatctcattggtaatgaatcactctcagatcctgtgcatcacgagttagagatttcctccttctgcagacactgcagtcttactctgattgtgggagtaagtcacagctaactgaggtaccctctacccctacctgcacccccagggccaatctgatgagggaacacagccctgctcccagaaaatccccagtctaagagggtaggggctgtgtctcaactcacaacaagagctttgcccctttgcatccaagaggcctggaattgaattgaaacacccactgggtccataagctccggaatcccaagccctccccatctctctgttttcctcctcggcaagtagggagtcttgcctgagctgactttgtgaggctctttacagcccagtgggcagagtccttctcactcatcatggggggacaggggagggaggtcctcgaaggccacttaacagggccagctgatgccatggtgccagtcgagcaaagccagcttccttcctgcacccccacaaggtccagatggtctttgaagttacacttgagtccagtagtaagtgggtctctgagcaaacctgcctacgagctgacaccaccagatcaccagtggcttcccagccccaacactcaccagagctggatctgaagcaggctcggcggctgcccacagcccatggtatttcttagggctccctgagagtcctgcagcgggaggagcaaggctgtctaggggaaatcagttccctctgagcaaggggcttcctgggattggcaaacgagaggccccaggacaaagggggatgggcatctgccagaagagcctagatctccagggaggcctcccagttctctggcagtgcccccaggattgccctaaagtggggtgcaggagcagggcaggcgagcgggagactgtcagcctgggcacatggaggagggcccacttcttggtctggagcaggaccacagatcatctcctgatgtggagatcagtctttcccactaggggacttagctccccactctcagcctgccttcctgcgggtcttccctttcctgtgcaccctaaacccccagccacctctctattccccagtacatgccaggcactgggctagggccatttgcctcccccactcctccaaaccttggtggtgaatctcttcaccctcattttacagatgaggaagctgaatagaagtatcattaaataattaacccaaggtcacccagccagtcagcggcctggctgggattaaacctaaatcggtctgactccaagtccagctgagagatcatatcagccatgtatcctgtgtcttttaaatcccacacttccccctctcccagaaccctgaccatcagccagaccagaaagtctaatataactggctcctacaacccaccggttcatatgtcccaccatcaggatgccctcctggcatccgagctcacacctcctgctgtcttttaccctgatatcagggaaagagtggagcaaagatggttcccccaccctgccccacgtcctgtttctgtgtcccatgggactgtggcatttctctgtggctctgcagggtgggttgctcctggctgcgaagccagagtctcaaacacttgggaaggagggggctctgaggttttgctgggagagacaggtgttctcttgggccgcctcacagaggagacttgggccttgccttcagaccctaccatttcctactgagtccaggacaggtgaggagagagacagaaagaaggtggggactttggagaccttcagagggtccttagcttctgatgctgttttgttctttgggacaagttgaggtcatgcctcttggacaccaagaagtcctggggtttggaaatccccacatggccctcacacccttgttgccctcagacctttagttgtggaagaaactgagtggaaaggacacaagcttgcatccattccctgaaatcaaggagttcagttcctcatctgggtgaagaggaaaggggaattccaaagactcggctccagtgccctggtgttgaacccagatcttccatttcttagaagcctgctgttttctggtagagccttctgacctctggcttctggctgagtttggcaggtggatcaattaaaccccagtgtttggagagggggttgaagggacacagtttggctcctacagctccctgactcaggagattggaacagagaaagcctcttgaccctgagcccatcaaagctcctctctcaggtttgccttttcctgcccctcacagccctcctcttctcgagaaggccaaccgtcccaccaccgctgtgggaagaggggcagcgtgggctgggctatcaactggggcgtctcctatctgtatcctcaaagctttctgagtctcctgcactccctgtccaatggacatgggttttctccctgggctgggcccaggagagattcagaataggagccaacagaggccctgaactcaagatcctgccgtcagaatgcagacacagtcatgcccatggattccaggccagcattagtgccaaagagagtaatcataatagctaagtttccttgaacacttccaaaatgggcactttatatccattaacatgtttaatcctcgaaaccaccctgggaaattggtgctatcatatctgcattttacagataaggaagctgtggctcagagcagccagtaacaggcccaaggtcttacagcaaggaagtagcaggagcaggatctatcccagagcctgtactcttaccttcttcacctgtgccattcaatacagtggccgctaaaagcatgtgactatttaactttgaattcattaaagttcaatgcagttacagttcagttcctcactgcactagccacctttcaagtgctcagcagccacatgtggctagagactgtcacattggacaatacagatattaaatgtctctatcattgcagaatgttctattagtcaacactggtctacagcctactgcctctcaagaatagagatggggcaatggaaaatcatccttcagttagtagactaaaataataattaacaataatgataccaatggctacaatttaccaagagcttcctctgcgccaggcacagtgccaagcccataatccttacccaatcctaggttcaggaaggtaacccagggtcacagtagctaggaattgaatccaggtttgtgtggcctcagagtccagtccactggccctcgccctcctgccccaccccctgcccggtccccagcagtttatagtccctgggggaaggaggggaaggcaagtgcgctgtatttcacaagaccagggattaaataaatcagcacgtaattaacatcatcacatttccccaagcccgctgaccagaacattgtgctaatgaggtcaaggtcttgatgttgagccctgtgaacatcacatcacttcacttcatgggagaaaggctggctccctgccctgagggcagccccccacactgtgattgggaaatagggagagtgtggatgttgcagcacagcctgtggcctgctctgaggcttagcgtagtagagggtcgggcgtccggccaagaagaatcctattaaacgctatggggatgtgtcttctggacaactgggaatctagaaaggatggggttagcagaaagcaaagcctgagtgtgaagaaaagatgcagcagaagatagaacagaacttctgagacttgcttcctcttagttgggtaaagccttttgggcaacatggggacatacaggaatttttgagggcttggcttgggtggggagatctgcctttagtatcctgtaaggattgcactatttggcggaaagttagcccagttgcatgtcaatcccacatggcctctggggagataaggcctggggagaggctagagcaggctgtttggcagtagcaggtctcctccagacaggcctgaggagtacatgagacaatgtaggtacagagcctgagtggggccaggcacgtggtaggtcttggtaaacattagtttattaaactatctccctcctttaagcagctttttttctgggccagtataccaccaggttcgggggttctgatgatgtcagcataatgccaaaggcatgagccagtggctggctgtgtgagtcaggataggccgtgctgtgctgcagtgacgaagtatcctggaaatctgtgggctaacaccacggaggttttttcttgctcatgctatttggctaaagcagactggcaggggctctgttccatatagctgcttagggaccctggatgttggatgtaccaaatttcaacacggagctttctggttgctgctgcagaggcaaaaaagagcaggagggctatgcaggagggctatgcaaagatcttaaatgctttgaccctgaagtgccagatagcattttcactcacagcctattgaccatgactggtctagggtcctacctcatggtgaggggcctgaggagtgtggggcgcatgtgggtatttggtgagcactaaatgtctttgccactctaccacttcccctctcaaaattccatttccttctcctgtaaaaagactattagaatggttaaaatccaaaaaattgacagtatcaattgctgatgaggatgcagagcaacagaactcttgggaatgaactctcattcattgcaaaacaatacagccactttggaagacagtttgatagtttctcagaaaactaagtatagtcttcccataggatctaacaattgtgctcctacgtatttactcaattgattttaaaactcatgtccttactaaaaccagcatgtgtatatttataacaacaatttattcagagttgccaaagatgggctgggcatggtggctcatgtctgtaatcccagcactttgggaggccaaggtaggaggatcacttgagtccaggagtttgagaccagcctgggcaacatggcgagactcagtctctacaaaagataaaaaaaaaaaaaaaaatcaacc

SEQ ID NO: 46594 - DNA, 601 bp, Homo sapiens
ccacacagaggaatccagatgccttgcacacgtgactcctctgagctgggcagaggaccctggccaggcccagacaacataaatacatcctgagagtttacattgtgtgggccgtgagtacacagcagtcggccggctgctgcccctgtttacccctgtttattccctgggggttcatggacagggcgccaccataggaggagggtggagggaatccttgggtggctgcagctgtgtggatgtcaacgtactaagaaccccaggaaagcttgtaggcctcacaggccactccctcctaccacgtcccagctgccctccctgttccaatgaagatgccgtgatgcacgtgggagtctgagtacagagtggcctccctgagtctgtggttggggggccccctggccgtccttccccttggccctcagccctgccccaggaacccagctcaagctttcgtggattttctgaggtcaggccaagctgggcctggcttgggttaatcattattcatgctgtctctggaacttttccaggatgttttcattttctgagcacttctgatctctcagcatcttccccactggctctgaaaagcaaattc

SEQ ID NO: 46595 - DNA, 634 bp, Homo sapiens
ggaggagtggggtggagcaagactgagtgagagcaaatgcagttctaatcctggccccaccacccatgtgctgtgtgaccttctctgggcagtggccaaggtagatgccagctgccaggtgacagcaggcctgccgggcagagccagtggagcctggcaggagccacacacaccaaggggatgaagtcaggggtgagaaataatcttggagtcagaggaaggcttgctctgggtgacattcctggaaagttctgctctgattggcttgagattggggcttctgcataggcctttccagtcaagaacaagtttattaataaaccctgtgtctgccccctgccctcaccctggggaaaaggcagggcttcctggggctcctggggtggtgagttccattgaggggggacagggattgagccctttaatggggtgcaaatgccctgcagctcccagatgacatgcttctgccatagactcaggggcttaggagaaatgccaacaggagtgggtggcatgcatgtgagcacatgggtgtgcaagcatgcatgaatgactgtacgcatagcgaggtgtgtacacatgagttcctgaacaaggttatcaggttatcacggtaataatagactcctggggg

SEQ ID NO: 46596 - DNA, 1036 bp, Homo sapiens
attaaattgaatatcagataaacaacgaataatattttagcataagtctgtcccatacaatatttgggacagacttacactatttaaagtatccagtttaactggaagtcttgtgtttttatttgccagatctggtaaccctaggtgcctccagtttgagggaggagagaggacaccccctccaccccagacataggaaagcaggtaaacacctcagcgtgctccggagggcaggggtggggcaggaggagagtcctggggctccggctcgcggcagtttaaaattccttccaggccagagccctaatccctcggtgcacaatggccgccttctcccccgccgcccgcgcccacgccctcccccgcggggccgtggcagtgccaccaagggcctctttaagcccctttgaagccgcggagccccgcgccgcaggaggccccgccgctatgccagctatgccagctatgtccctgctgccgccggccgccaccgctcccccattaatgctggctaatctggctaataaataaactcccctcccagccccagccccgcgccgactcctccccgcccccgcagaatcgatgtcagggctcgactagagcaagcgcccgcactccaccccactccctcgagatgtagctgacgttttttcttatggctgccctaggtctgtagcccgtcggggattctcggggagacgtgggatttgggaggtctccgcctagccactgcgtttgccttcctcttttccagtccacctgcgcaccaggggcaggacacgtggctgggtgcagacgctggcccggatgtcgcggaggactcgcgggccggtagagcgcgcggcggcggcggcggcggcggcggcgggaggagacgcaggtcacgcccccttcccaccacctcccgccgccgacggggcgcgcgcgccgaggagcccgggacaggtgactcctagaggactgcgtctgcgcctcccccggcgggagtcccttcttcgcggcctctgccgccccctgcgtcccctcctgggct

SEQ ID NO: 46597 - DNA, 2110 bp, Homo sapiens
gggcccaatgaacatttctgggagggagcagaggggaggggaggggaggggaggggaggggaggggagggaaggaagacatctcatggacctttggcttttctttgagggctgcactctggtcaagaggctccctggtgaccagggccaactggccctttccatcagagccaggcactggagagcacagtgtgggtgcttgctccatatttgagagcagaatagagctggaggactctgggcatcgagaagccaggccccagcgacaaggctacctcagtttccagacccacaatgagagcaaccagaggagggaggggagaggaggcaggctgccacagggccaggaagaggcagctaaggcagtgtgggacccacctggggtgaatggatggctgagcctccagggtggcctcaagggttgcaggggagaccagacagggctaagggttgcagtcctggtgggatctgagcctggggaaaagggagaagctggggaggaatccttccaccagcccttcaaggcgagcaaagccccctgcactcccccagccccagcgagagcagctggttagtggatcaggatcattgcctcaggaaggcaggggagtttctgtgaatgagtcttttccatgctcaaaccaaaacctaagtccctagcccagcaggcaaagctgccacttcctctccagaacagcaaagacctaaggcactgggaagagacctgccacttggggcacctcccttcaggcctccctgggggtggctgctgtggcacaagtggaggagagacaagtcaggatgggagactttctcctgagctggcctctgtgttctgctgtgatatccctgccccaggagacaaagtgccacagagggtaaatagtaggggtggaatttaaaccctgagaaagagagcaaaaagtcacagacttcctgggtctatgcagggataagagctaagtgccagggaatgagtaagtgctgaagcatgaagccaggggttagtgggtcagtgacccaccccatccacctattccttagctggccatcattagggaaatgatgtatttatttaaccaacacgtacatagtgcaaggtaaaacacaaatacctaacaaatattaattcagtgattacccagaacaaacctaggaagagagcactattgtcatccccagttgcagatagggaaactgaggcccaaggaggttacctgacttgccccacatcacacagctggaaagtggctgaaccgggattcaaacccagacatgatgctgccccagttgggtcttgctgctgccatgatttcaaggcctggaaggggtcagagaaagtcaaaagtcaggaggccagcatcagagtagggcaaggacctcccccagcaacagccagagcctgagagagagcagctgatgtaattgcaccccttgttgcgggggtggggagttggcccaggcccagggagtggccaatggcagggcccctgcctccctcagcttgccagggagaaaaggaacccctccagggtatttctattatctggaggagaaagtgaggtgggaagaaaagttggctggaaagcagactgaacttgcaacttggtttaataaccaaatcccagttctccctgtgagccagggctccctcccactgtcccctccagaaaaatccaggccaggcctgggtctgggaacaaagaagcctgtccccacaaccccccctcccccagctcccagctccctactagagccccagaagtagggtccatttctcctggaacctgccatggcccctccaggcctccagtcccactcttcccgagctcaaagagaagaggaggatcccagagatgggtgactgcattttccaccctgaatatgaggctgtgtgggttggaaaaataaacggcactggttggggaagggggagtgaactgtttgaatgagggctgtcctgagaaatgccggtcatgtggtccttggtccaaatgaaaggtcagagcacccactgcgcagtcagaatggctggggagcgggaggaaaggggaggagcagagtgggcagtcctcatacacactcacacacaaacattcacatacatcttc

SEQ ID NO: 46598 - DNA, 1963 bp, Homo sapiens
aatgatttgaatgaaagcaccacattcctattcatgcccttgcccctagcacacaacctgtaggtgctcagtgctcagatttggcaggatggcaaagtaaaaagaagcccatcttgccacagctaggaattcaaggtcaatcccagagcaatcccaaggcagttcatcaaggaagacttcctggtggaggaggacatggactggggactttcagcctcacatctgttcttccagttcatcatctgtttctggcaggaactcctgaggacagaggttacgtctgggtctcagggccatccccagcacacccccattcaagctgcgcatgacctgccccactgtcgacagccagctgtgactcacaactcctgagcctttcctcttggccagagatcgtggagtagatattacagtaacattactaaccacaagtagaggcggtgaccgtacttacgctcagagcacctccccccacccctgagaccagagcaatgacctcacactcatgttcggcagcaagcacggacagtcctgcccggaggcagggggatggcccacatggccctggtcttccagagaagcccagcgtctggcctcttcccctcagcgctggtcacattctccccaccttcccctccaagcagcccacctggggtaggtgctgagtcccctgctgctgcctcccccgggtgaaagcagagtaaacagtccccctctcccccgcctccctggggagggctggaggaaagaaagggaagtgacaaaagctgccctatccctgtccttcctcactgctgggtctaggacacttattctggggaaagtggcgtctgaggatgtggctgcagtggccagttgctggcgccagcagaaatccccaagcccgtcagtagactctgttcagacgcgttcgctgaccatggcactgagtaagtgctgaggagacacctgaggacccaggtcacgcccctgcctgccctctcctcccagacaggcccctcctagggctcagaccattccagttcctcttgtcagaccctgagaaggcccagggcatccacccctacagggaaggctcaacaggaaagaaagaaacacacaggaactgggctcagagcccagctgcgtgctcttgggcaagttacttaacctctttaggcctcaatttctcaactataaaatgggactaagactagctgcctgttgagctgttgtgagataagtgagtgcactggcctggatctgcagacggtggacaacagccaacggcagccggatgtggcattgtgctgctgcctttagcagctccaggcagtaactactgagtatcagggaagaactgagacctcagagaagggagagaaccaggattgcttgaggcagggcgttgggaaggccccacttaccctctggcagttgcaatctaaaaggaacaaagaggctttgtggcagatcctgtctcctaatatccattcctcgtttatttcccaacttttagccagacccccatggaataaagactagactacctagcttcccttgcagctaggtatggctagatgactgagttctggccaatggaatataagtgtgacttctaggaagcttccttgaagggaaggggcatgtccttcttcaggctttcttcttccttcctgctggctggggctccagcagccatcttgggcaatgaggtgaccctggaaatggaaaccacacctagcaggtcagaaagatagaaggagtctctgaccacatcccagaaatattttacatgagcaaaaaattcactatttatcttgtgtaaaccaaaatttaactgatacaagcttctcctctggtgaaataatctcgactcatgtgtggctgggcagagtaggatggatgaggtgtctagaagagaagagttaccaggggtgtgatgtccccatccaggagcacttcctcctacttgccctgtgag

SEQ ID NO: 46599 - DNA, 962 bp, Homo sapiens
tgccagtggcccaggtggcaggccagccacttgccaatccccttcctgatcagggattcaggaagtgaagagagtgcccctggaagtcaggagacacctccaagatgaaggccctgcctgccatagcctgacacagcctccctgtactccctgggttgtcccaggacgcagactctgtgcttaccataccacacctttgtcagtggtgtgggcagggcccagcagagtcctggacaccccagggagtaggagctgtgcaggtaacataggagggggtgaaagggaaatgaactcccttgggagttccccatcccagaggaaataaaagtcaaagcactcctttgttttttcttcccaagcccttataaggggctttatggggcttgcctaggtttgaggtgcagcagaggcaggcgggtgagggcctccaggctgagagatcctggggcaaaagtgaaactatatggtcatgaacacgggcatgttctgaactctgtgaaaccctagcccaggacctggctgactgtacaatccgtcacccggcacaccgtaacagaagaccctactacgcgcagaggacagtactattggggtggcaactgaaaagggtcctggctggaggcggggtttgctggaggggtaacagagcgtgcgcggagtggagagggtacggaggctcaccgcccagcatccccaaccccggcgctcagaagagcagcgcgctccggagctcggcgcgcgcgatcaaagccggcgccgcacgcgcacgcgcgcccgcagccgctcccccgcccgcgccgctccggctcccgcgcgcgcgcacttgaggcctcccttgtgcgtctcctccattcgctacgtgcagaatggtccgtcggcagcagctgcagcgctgggtgggagggggaggaggaggggagggggaggcggcgcccaggtctcggggaggggccgcggcggcc

SEQ ID NO: 46600 - DNA, 1079 bp, Homo sapiens
tttcaggttgggataagccctagaagaaaataaacagaaagtaagatgaagcaaaaccaggcgggggatttagagaaggtggttgcagagggcctctctgaggaggtgacattggaaatgaggtggagaatggaatgagaaggaaacattccaggtagagaagggcaggtgcaaaggcagggacgcaagaaaggactgagaatgttcaaggaggggcagggacgttgatgtgggtgagatgtggagagcaacaggagacaggaggcaggcaaggctttgcaggcctggtgaggaatccgggttaaatatgagcattatccccatttagtagatgagaaaaccaaagctcagaggttaagtaacttgcccagggtcgcatagctggtgagtagccaagctgagattccatcatatagtctggtaacaaagtccatgttttctttcctctactcactgaacaggaactggctggctgtgacaaaatgtgataactgttaagtgattaatgacaagtggtttatgacagaagcctggggtggggggacacagtttgccggggaagtcttcatggaggaactaactgggtccctaagaatgaggaggattttgccaggtggaaaagtggggaggacgagcgctcaaaacaaggagaataacttgagcaaggccagggatgtggaacatgaggcctggtgggagctgagaggcaatggagttgctgagagtagaactggcgggagatgggcgtggaaggcagggtgggccagaccagaagggaccctgaatgcctaccaaggatgtctacattgaatttctgggcaacgaggagccaaggcaggttcttcaacaggctgagctgtactgtgctttagaaagatgactgtgatgcaggggcctggagaggctggtgtgtggggaggggcagctaaaataaatggccagaggctgtagagagaggtggggcaggacagggcccgtcaagccccagaggtaaccaagactgagaaggagtttcactcttgttgcccaggctggagtgcaatggtgcgatcttggctcactgcaacctctgcctcccg

SEQ ID NO: 46601 - DNA, 2936 bp, Homo sapiens
actcaggcaaagaaaggcaagagggcaaatagaagggcacaggagacaacgcttttcaaatttttctcactgcgacctacagaaacacactgtagaacacctcctagtacactcacacgtgtgtgtacacctgaagtgtcaagaaacaataccctaagtgcaacaccctctgatattttctatttcaagtggccgtgatctactaaactgatttccaactcaccaataggattcagtttgaaaaacactgcaataaatcaaaccttacagttgcattccacaagctactaatgaactcttgaaaatccagcatacagcagagacgctgaccaactacaagatccaaaccccccaggtgggcagtgtccttctgttcagcagtggcagttccccaccaccaccagccctgagagttaattatctcccaaactcccagagtttcccaagtagcctgaggtgtctgtcatatgcccttttaacctctttataaattcagtcccgtccgtctcttacggtggcaaagttcatttatcgtcggctgtggaaagcaatacttcctttttgtcccctccaggaaccagaaattaaatgaccaggttggtgcccgttgtgcctttatgatctatttgtgtgggtgatatatagaaagagtctcagtctctcccttcatctttccagtcttaatcactggtagatgcagtctctggtgaaataagaaaccagggaaccccctggcctgggggagggcgcactcatcagcgttgacagagtgaaagcaaaaactcaatcctcacaccacagaggcgtctggctaactcatctccagacctaagttgggaaaggggaggggagcgcggaaagcggagaagccggaggagacgctccggagtgaccagcgacggctgaacgcagcccgccctccccaagtcgacgccgcaacccggggaaagcaggtgagcgccggccacggacttgggggtcgcagaagcagcccacggagagcggaagggaggaggatccgggtaaggggcctcccctccccgtcgggacccccctccccgtcgggacccccccctccccgtcgggacccctcccactgacgctctgcctcccactctggcctctcctcactcaccccggggagtgggcctcccctactgcagagaaaggaagaggagaaggagggaatgaggacttaacgcccacccctgccccccaccataccgctctcgccgcccgggaaaatcccgccgcgggccccaccagccaagcgccgccttcgccccacgcggcctcttcctagcgcctgcgcgccaggcccagcccggcggacgcgatctgagagtgcgcgcgcaccttgcgtgcgccggcgtgcggggcgggacctgcggggctccgccccctccccctccctccccccgctccccctcccccatacactgccgcggccgccgcaggagcccggagctcgagccgcccagcgactccccctccccctcccccagccccgccccgccccaacccggggctccgagccggagccgagtctgcgcctgggggtgagtacgcgacccctacccagccctcgctcttttcttcgaagatcccaccaccacccaaagaaaaaacctggactcagctgcgcgtcccctcccttcaacctcctgcgggacccagaggtgcccgggcccgcgggacccaggggtggcgcgcgctgcccccaaccccgcaccatcccgagccaaatgtgagtcctccaacccctgccggaggtccagatacgcgccgccggctctccccagccccggggagatcccaaagggtgggacccccgcccccggcccccgagtgccactcttctcccacctgcccggtgcaggtgcgcgtcccctgcgcgaccctcgggggtgccagctgcgccccgcctgtccgccgccgtttggggaactagccgcccccgcccccgagttttggaccccggggtcgccaagtccgatgccttctgtgccttttattttttctgctgctcccgggggcgagtacacccgaagccggtccggggtaagggctcgggctcgggcaagggcagggttcgcaggtgctggcacgaggccggccgctgcccccggctctggggactgactggtcggcgggctggagaggcggccggccccgggagcgtgtcctctccttgcgccccacacagtgcagttcattcatgagccgcccgggcctgcgttggagggtgcggtggggaaaagattcagacgcgaaaccgagagtggggcaaaggccctgttgtggggagggggcgccgctttgtccctcctggctgtcttgaccgcctaaggcggacagtcccaaagcttggcaccttgttccccagaaaaggaaaggacgcttgggaagtggggaggagaggtcagaggggctggctgcccttggggcgctgtgctgccccctgcctgggtcccctgggcagaggtctggccgctcggggcaagcctgagcactccaccgccctggggggctggggcttgcctacccattaccagtctgcagcagccggggagcaatgaggctgtgcccaacacctgctgaagaggggcccatcctgcctcccaggccagggtgaggtggggagtgggagtgtcagccaggcttcaagtgggggtgtgctggcagcgtgattgtcctccagggcaccagagggtccaggccttggcatgccccaggtggcacatgctggggcctgctgttggctcactcagtgcagtcttggcctgtgggtggatggggacatggcaaggcagaaggcaggcagtgggtaactaagaacccccttggacatcattcaagttctctccaagtatagcagagtcttagagacctgcgttcaaattctagctctactattcttcagctgtgtgaccttg

SEQ ID NO: 46602 - DNA, 1245 bp, Homo sapiens
tcttgccttggttcagtctccccatctgtgctatggtgagaaccttcctgcctcagctgccttgccaagagaaagggcttcatgaaagcaaaaatgacctacaaattgaggtcaggagcaggaaggtgtaaactgaagggagggggaactcctgcccaccccatgtccttgccaggtgaggcagaaccaggacatgcaagcctaaagtctgtgttgtcttcccaggcactgactcactggccctgccatgcccacgccactgctcccgctgctgcttcgattgctgctgtcctgcctgctgctgcctgctgcccgcctggcccgccaatacctcctgcccctgctgcgccgattggcccgccgcctgggctcccaggacatgcgagaggctttgctgggctgtctgctgttcattctcagccagcgacactcgccagacgctggggaggcctcaagagtggaccgcctggagaggagggagaggttaggcccccaaaagtgaggccacaagtcctggcagcagctgtatccacaaaatgctttcttttggagtaggataatcctggcaccagcactgaccgaagcctgcccagtggacagaagatatagtgagggttgtgcatgagagggatctgccacagacatgcctctccactcccaacagaaatgtctttctggaagaatgccttgcatctagcacaaaactgattattgcccctctgtcctccagcagttcctcccaaagaccactcctaatcacctctggcctcaggcgggaggggaactaacacccacccacccctgccctccctgcaaatgggaacatcaaggttcccagtgcttaactgagggacaagtgacaatttagcagagaggcaagatttgaatccagactgtcttccagactcaggacctaccttaaaataatatctgagttgcttatggaggcagacctgcctgcaaagcccagcactcagcaagtgctcaataaatatttgatttgaattctttccatggctttgaaagtctaatcacccagactgctgctctgcaaaacagtttaacctggcctggcagttggtgggggtgggggagaggagagatggacaattgtacaagggtttattttgctacctattccatcgtggtttcagtcctcacagcctggaagttgtttccccctgctaagtttcggtcagtatgtcacactgtgacccagaaatggcttgagtccatctaggagga

SEQ ID NO: 46603 - DNA, 1424 bp, Homo sapiens
cgcttgaatccgggaggcggaggttgcagtgagccgagatcgcgccattgctctccagcctggacaacaagagcgaaactccgtcttaaaaaaaaaaaaaaaaagagttagacacatttgcatcccagcctccggataatttgcttattgttcccaggcaataatcctctctctctgggtgactcttgggctctatctaggttcagacgaggacagtgaggagtacaggatccaattgggattccagtcccctccccacacccgtcagaaggcttggttgggaaagaagtgagccccaagctatccgccccacccccagccctgcggggctttctgcctgccacacgccgtccctgctcactaccccatcggtttccttcgggagtcttcaaagccagtgcacgtgctcccaggtctcagggaggcgacccagggggaggggcagagagaagggggtccgagcccttgggcccctaaccccgtccctttccggagcctcgggtgcccaaaggcgccggccgccagtcccaggcccgaagggcccctcccactgagtcggctctggtctccccgcccctgagccgcgaggactggacgcagctggctgcggagctctgggcgggcgctggggtcgcctgttgcagcctctcttccgcccggcggcccacaccggtcaggcccggcgcgggctgcgctctccagctgtggctatggccccagccccgagatgaggagggagagaactaggggcccgcaggcctgggaatttccgtcccccaccaagtccggatgctcactccaaagtctcagcaggtgcgcggggcggggccggggggcctggcggggcggggtggggtgggggcgaggtctgcgccgttctcacgctgccgggcgggacagggggccagtagggggacccgctgggctacagtgtctcaggggagtcagaatctttggtttctggatgcggggccacttttctgggccttcgaaggccattattagatgactgcctccccaaactccccagccacttacagatgtcccaggaacatagggtagggggaagaggtctggaaaattagcctagaagaccagcccagacctaactgaacaaagaatttagtcttctcgaaccccgagccagtacccacactgtgaacacacctgtctttacttaaaaaatcttgatgttttattcatcatggagtctttaaaaaaaaacaaaaaccgagtctcgctctgttgttcaggctggagggcagtggtgcgatcacagcctactgcagcctcgacctcatggactcaagccatcctcccacctcagcctcccaaaatgccaggaccacaggcatgcgtcaacatgctcagctaatttttttttttttttttttttaagagacagagtctccctgtgttgacca

SEQ ID NO: 46604 - DNA, 3497 bp, Homo sapiens
aaatttatcttgattcatgagttttttggctcccccttacattttacacccctggcaagtgcctcactggcctctccctagtcccagccctgtcacaaggccatggagatacagtcacaaacacaactgagaacacagacagtcatgagacatgtgctggttaccaacccccaggccaagcaaacacacttccagcaaacacacatgacttgttggtgacagctgagaggacacatgcctggggagagagaggactgtgtgtgaggtggtgaggcatgcatggggcctgccaagttggggagggagtctgggccaagccacggtcccatatagggtggtgaataaggtgtagagtagaggtgcagcaggaccaacccttcccaccccaccccttcgacagggacctgagggagctcagggagggagagaagccagaagaccaggcagagactgaagagagctggcaaggcctggctagaaaaactccaggcaaggcctgtgtaagttggggctcccaggctgtccagcagggggccctggcacccagcaacctctgcttgggaggtggctacagaggggtgtgggtgttggctaggggcccagcaggatggatgccagacggacttctctccaacaataacagccctggctgttgccatccaccgagctggcagggccccagtttgggtggggagaggaaccagcctttcccagtctggcctgagaccctcaccacttccctccagttttcttccacctccagccccctctgtacacaactgcagccactggccaccagccttgccatgcctggcagatcttctgaccactagccctgccacccccacagacccagagaccaggaaaggagggtggggagcgaggaagggggccaaggcagagggcagaggagggctaggagaggaagagagagagactggacaaacatgagggcaggaattagggggttgtggacagacatgaagccactctcaagtcatggggctgtgcctggaaaaataccacctaaacccatcttcctgccctctggttagggctggcggggatgtgggggatgggggtggggtgggggagggttgggaaggaatatgtgtgtcatctctgtggggcatggaaacagaaggctggggacacccattctggagtagcttggggagagccactgaccctaattagaaaagccacctctctccttagggccctgtctgtttctctggggacagggtaggactaccttatccctatgatgtgaggtactgccagttgttaatcagtgtctgtggcttctctaggggacaagcccttcgggtcagtgggcatggggtgggcagcgtgggttggattttctcctcaggacctttccagccttaggatcatcctctagcactgagtactgctggaagggcagggagtgccccccaccccaccccatttattgcccgaccaaagagagggcctccctccccctcccttggagggacttgctggaccacccctcagcacgcccacaccttcctccttagctagtgaaagacatactcagcaaggcttccgcctgtcaggatggctgggacaataggattcactgaggatataaggctgttcctagctttttctcttcccattcccacctgtgcctcagttttccaaagtgctggatttagaaagggtgaattatgagggagctggagggctttgccccacccccctccgcgcgcacacgcaagcacaggcagaggcacataccccctccaagtcaaagttgtgagtggggtggtgtttgcgcgtctgtggctgggactggatgtgtcagggatgggaaaacccatcatgctggtcacagaaaatgcgcggtggggacagaagcagttttgaaggaaaagaagaggagggggactgaaagaaagaagggggcgctgaaagggagggcgctgggaggaaaaaggtgcagtgtggaggaagcgcggcgtgggcagggcttgggaagggataacggaatatctgaggtggagtgggccgtggagcgtcggggccggtctgagcagcgggtgtgtaaatggaacagtcccgagatgaattttatgggagtctgcgcaggtccttaatgtgtggctgtaccctccagccccatgtaccccacacgatggacagacagccttggtgtggcagggcccaaagaggtcctatctaccgcaataacacgaccaggcggccctgggggcgcaggggctcggggtgggagcggcggagcgcgcggagtcgccgcggggtggcaggggtgggccgggggcggggccgcgggcgtcggggaggtggcagtgggcgcagggcggggcgagctcagcggagggcgggtttgaatgtgccccggcgggagagggaagctgcagcgagagcgcgcggatctcagcgcgggagcagtgcttctgcggcaggtgctgcccggggccggggactggggactggggactgccggggcggaagacgccgctgcccgcctgccacggagggcagggagggcgggcctgacggctccgcagcccggagaagggacgccgggtggggccccagtgcggagcgtgcggagccgcgcagcacgtggcgcgcacgggccagggagcctgaggaccctgcggggaccgggacccaagctgggcggggcggcctggctcccgggcctaaaacaggctgcggtcacgttgacctccgcaaggggcaggcgagtggacgggtgatccccatcgatctggtcggtatcagggaggggccgtgccgctgactgcgctggcggaggggtatggggatggggatggggatggaggctcgcgagcggaggtgcaggctcgcgagcggaggtgcggggctgtctctttaaccccggtcttttactggctaaactcgtatccctggcgtctccttcctgcgcacgtcttcatttactgatttactgtgagggtatatgagagggtgaagacaaacagtcctcggctttgcttaccaggagagagcagtcgtaggtcaaggctggctccaaccctgccctcacacctctaggggtctctctgcagccctgtggtagtccctttgcctactcctctcggtggcctccagaccctccaactttcctcctgcttgtgtaagctccccatgccaggatgtgtgtgatggggcggggctgagctgcctgacactcaagtcaggctgggaatgatcttggtctccacctcatttttccctttagttgaatcagagttccccccacctcccagtctacagggctaactgagaagcagcttttatacctctctccattccaaaaggagcttgaacatttaatatggattctagctcctccactcaccagctctgtgacttcaggcaagtgactcaacccctctgaacctcagctggccccatctattcagtgctagtactagcttatgggtggttgtgaagaaaagacaagagatctgcag

SEQ ID NO: 46605 - DNA, 1531 bp, Homo sapiens
gtgtgctcaccacgccatccctgtatgaggcctgccagcggtccaggctcctgcactctggccaggcctgtcttctcactgccttgggctttatccctgccatctctgaagagagctggtgttggctctggggagggtgtgcaaacccaactggagatctacatgggccgggctggggttactcagctttcaggcaaggcctatctgggagaagctggcgtgacccggaagggccttgaggtatagggcttggggcattgccctggccaaaggtggacagtccttatttacaccctgaggcccagatggcctccagtggccccatacctcctggcctgccctgggtggtatgaactacaaagttctatttggccaggaagaaaatggctctaaggccctctcttcacagcggccctgaggcaccctgcccacctgccctgtaggtccagaatagtatgggagtttcttaacttcagaatcctctctggggagtaacacagtccctgaccagacagcataattacttccagcctgcctggtgggagtggaagacacttgctgcttgctttctcactcatccacccaccccctgcccttcggcaggatttccaaaaccatctccggatgtgtgggtcacactggttcccagcctgcagagtcccccgagccttccagggctgataaccatggtcctgtcagccatgccattcagtcctatgaccctgaccccatccccaccccaaattccaacgagcaatgtacccttttctccccccacacccataagaggacacatgcaaacggacacaaacacagacgccctgtgccctgggacctagagagactgacaacggacaggggctttcctggggctcattgtggagtggggcaggatggtgcgtcatttggcccatctttcctcctccattgcagatacaaagctgtctggcttatcttcttcatgctgggtctgggaacgctgctcccgtggaattttttcatgacggccactcaggtgaggctggagggactgggctccatggggcagtgcccactgtgcttgcaggatctgactctgtgctggtaggcacagggaaagagatttcaacactcctctctgcaacccctgcagtatttcacaaaccgcctggacatgtcccagaatgtgtccttggtcactgctgaactgagcaaggacgcccaggcgtcagccgcccctgcagcacccttgcctgagcggaactctctcagtgccatcttcaacaatgtcatgaccctatgtgccatgctgcccctgctgttattcacctacctcaactccttcctgcatcagaggtgagtgcccaccccctccccagcccccagcctgaccctcactgtgtcctgcacccccttggctgagccccagctttgcccacttgtctctgccacccttggcctctcccggcaggatcccccagtccgtacggatcctgggcagcctggtggccatcctgctggtgtttctgatcactgccatcctggtgaaggt

SEQ ID NO: 46606 - DNA, 2716 bp, Homo sapiens
tgtatggtttgacctgatatactccattctcccctgcgcctcctcctctgtgttctctccatgtccccctcccaactccccatgcccagttcttacccatcatgcaccctgtacagttgccacgttactgccttttttaaaaatatatttgacagaaaccaggtgccttcagaggctctctgatttaaataaacctttcttgtttttttctccatggctccctgtgtcctccagccgtggcttcatgccctggagtgggtagagggctggcagcctgagtctgggagatgagcatgacccagctgggccctggccaggactggacctgggtccaagggggaggaggggggagtagtcctcttggcctcagaggggctgcaatgccccctgctggggccacaggggagggacaggcctggaaccagaacaccaagactgttagccaagactaagaacgggtttttctttgctgcttcattctttctttcataggacagaggatggagatagctccccatctttcctttgtcttcactgccagcccctccactctgtccccagccccagcaatgaactctgcaaaactggccagctcctggccatactcccataccaccaggcaggaagaggccgaggcctgagggttctcccctacctggcacccagccttaacaccaaagctcagcctgccagacttcctggggaacaagggccctgtgtgtctgcacagtgaaaccaacccttcccttctcaacacaaactctggcctagggaggggtgggttgttatggaactatgagtgtctcagtggagaaggccctaccactgggacccccatctcaagaatgacctgactggaagtgagaccagagctctggccacagtgcagcacccctgcaatctgcattccttaccctcccacaagtctcagactcctcccagaaagcagaagacattcctgaattctcagcgcaggctgctcactcagccctggccagcagatggctacagagttggcacctttgtcagcgcttcctttctcactggagtttaatttaattgagaacttcaggcctcattaagggctgttagcgcatttttaaggctctttgatgagctctgaagccctaatggggtagctaagtataccagggcactgggaactgaagttcatgtgctattaatcatttgtcagaccagagtatttatctgcggtgctggaaaacaaggtattccttttggatcaggctcaaaagctgaggggttccctgagtatccttcccccagtctgcagtgctgtttggcagtgagtcaagctgaacatacaaacctgagctctttctcgtcctcagtcctccgttgtacccaaccccaaagaaccctattggtttccttcctcagcaccagcagtgcctcaggattctgtatttcttcctgaggttgctttaccacctcctgcctggcccactggggcttccaggtctcttccagtccatcccacacatggccacaagaataatctgaaagtgaatctagcaggcgctgcttgttctctggagcatgcgcctgtgtcctgagcgttttctgatcctccaccaccaacagccagtttgtgcaatttctttgcacctcagagctttcataattttgtgacttttctatcatgttcttatcttactccagctaccacgctgtcatgttttttaggttaaggtgtactttttactcctgttttggcttttcaagctatgtcatacctgcctcccagaggtacttggaaaatattggcttgacagcacatgcttatcccaaggcggaattcatctctacagtcttcacatgccccactccagccgtgtggtagcacgccttgcttgtgaccctgggatagagatggggatgttaagtaggttcctctcaaccccagcactaatttgagaggaaaaactattaaggataccgttcctttctcccttcctgtacttaaattgatgttgaaggaaattactagaatattttctccccaaaattttaaaacacaaatgctaaaaaatgtcagtctcttcattctcctgacctcagtgttttcacaggtaaacctggaaggggtgaggaggttaggaaaagcagctcctaaggtctcctgcccacccagctgcagggatggctcccgaccccaagtgggcgctcgcaggcccctgccctttggggagcaggggcctcctctggatcctccactttcctgctagcaccttgctgcctgtaaggtagagaggtctgagcatgaaaatcctccaggtatccctggctgccctcacttgctgctggtcatcaccttccgtgtcacatttctgctcaaaacagtcaatattcagctgctgtccctggagtggctgccattgcaacacaggaatgtccctcttgtttaatgttttatgatgaaatgttggggctttaaagagttgaaaagctaagagccgtagtaaattagccatcctggaaaatagaaatgaagcctcaggtataatctttgagtcagaatgtatctgtatatctattctttgagatgaatatggaaagaccatggtggaggcaatataaagccagggctcagagagcgtgtgataggagaacccaaaagtttttttttttttttttttttggcggttgggggtgggacggagtttcgctcttgttgcccagactggagtgcaat

SEQ ID NO: 46607 - DNA, 3298 bp, Homo sapiens
cgatctcagctcaccacaacctctgcctcctgggttcaagcaattctcctgcctcagcctcccaagtagctgggattacaggcatgcgtcaccatgcccggctaattttgtatttttagtagagatggggttttaccatgttggtcaggcttgtctcaaactgccgacctcaggtgatcctcctgccttggcctccgaaagtgctgggattacaggcgtgagacatcatgcctggccaaagtttttttttttttggccccaccaagatctactgcagcctccacctcctgagtagctgggattacagacgtgcaccaccacacctgactattttttgtatttttaatacagacggggtttcaccacgttggccaggctggtctcgaactcctgacctcatgatccgcccgcctctgcctcccaaagtgctgagattacaggcatgaccgcgcctggccgccaattaaagtttaactagagttaaactatgacagtgattcaaaatggttgtaaacagaaaaatgcagccaccttaaggaaatagcctgtttgtccagcaagccctgcctggaagccaagtcttcacacacaggaagagtggcagtccccaggtcagccagcagatctgactcagaggtcaggttggcagtgtccccccaaacccttggggaccaactgtttcctggggcaggttggcactgagggtggaaatgggcagcgcccaactccctctggccccaacctcatcaatggccttatgtccgggctggacccctccagcccatctcggtatgacctggcttcctgtgtagatgctctcggggagaggacgtgcccactcggagccctctgcagccttggcagtcctggtgctcgctggaagtgagcaagttggcattctggcaacagactgcagggtgaccgctaaatgtgagtcagcagggccccacgaaggcctccgtcctctctcctgggcttgccctgtaccagctgtgatcccggattagtcactcctcccctaggcccgcctcctcgtccttaccaggggatgacatatgtgttgacttaaggaaattaagtgcgggagagcatggatgcaggaggtgaggtccccagagctacgtggcgctatcagttaccaggatgagcctcaggatggccctccccgcaccccacgttcccccacctagcctattccaggctccttcccacctgcgttcattcccctcccccgcctctccagtccccggaagcttcgagaccaaagcctcacttcccctactccagatatttccagcgtgaaccaccacgcgggtccctaagcctcgcggacagccgagaaccgtggggctgggggcggcgagaggtgcgacggggaccaggcccctgccccatcccgccgcgaggagcggagggggtgatgtcacccggcccgcgcgccccctggcgggcgtcaggccccactgctctgcgcttctgcgtcctggcgggtgggtgaccagactgcgtgtcagacagacccacgccactgccccgtgtccgggtgaccttgagccaggcttgttccgtcgcggcgccactcatctgtaaggcagggatagtcacacttgccctgacaaccgcgtgggtcgtgaaacttgttattcactgagatagtgaataacaacgctacttggtccagccacccctgtactcagtgtcttacatggccttatctgatttcccaataaccctgtaaagtgatgactattgctatgctcattttactccacaaaattgaatctgaaaggttaaaggatggaaaaacattctgtaagctgcaaagcactaggtaaatataattatatttctctctcttctctctctccctccgctccctatgagagttcccagtcagtgaagggaacggaaaaatacaaggcatcatgtggtgtggcaccataatgcaaatgtgttccaccttcctcccctattttggacacaactcttgtcttctcttttcacatcctcagggatcccaagcctcctgggacattgacctctcatataatcttgcccaggtgaaaccagcaaagtccttcctgatgtctaacctcggcccctcctgggtgtgatctcctctccacccagcagcactatcacagtcctaccgttccatcatctgcgtggggtggaagtgaggccagtgaatggcccagaaatccagcccattgaaacctgcatgctgaaaaggaatgacttcatcctgggacaggccaggtggcaggcaaaacagtcaagtagatcagggttgtttgtagtgccacctgccccctgcactttccactggctataatctgctctgggatgaactgagttggggttaagttttaccttcttagtcaaaaggggcctggaacactgaacaatgcccaagagaaaaagggatgcctggtgggcatgatgacagaaggaggatagacgttttggactaggctgacaatggtcgcgaggtagaacttagtcataccccttaggccactgataaatccttaaaaaggtgagacatagtcatatgtgtattaatagagcaggttactgaatgtctgatttacaattcaggagtgtctcagaccacaatttctggcccttttctcactgcactctagtgatttttgtccttgcacatgacttcagccatcagcatcatgcgtagatctaagactgcaacccaggcctctcctacatacccctctgcctactagatatctttccttggtgccctacaacatgcttaaagctgacctccaacctagagtggtcctccatccctgctttccccttaagcccctacgttctagcattcttcctcagataaggcttatactcctcttccccacccctgactggtctctctgccttcagcctctctcttctccaagctatgtcctgtgcagccttcaagtaggttatatttttcttgaaaaaagggctgcactccagcctgggcgacagagtgagacactgtctcaaaaaaagagagaaaaaagtctcaaatacaaaagcatgcaagtagttttttgtgtgtttgttttgaacaacacaattaacaggtttgatttaatagatttaacctggctgggcacagtggctcacgcctgtaatcccagcactttgggaggccgaggcggacagatcacctgaggtcgggagtttgagaccagcctgaccaacatggagaaaccccgtctctactaaaaatacaaaattagttgggtgtggtggcacatgcctgtaatcccagctacttgggaggctg

SEQ ID NO: 46608 - DNA, 3439 bp, Homo sapiens
cacgctcccactggtttgcggttttggtcaggaatagagcacccaacgccccttcttatagacttctcccagccataggctttttgcagaccataatgaaagggagaaaggatatccaatcgggatggtgatggcaggcatggcgaagtggacagggacaaagaagaggaaagcaagggacaccctttgttctttggtattcaacacatgaacaaaacttgttaacgaatcgtagactgggtaacaacagggctggtgagggaggacgatgtgggtggctgtggggaaactcttcccaagcatcccaggggtgggccaggaaggggagcagatggacatctacagggcacagagcagggagtggctattctctcctggaggggttgtgggtccagcaggctttcggatgaggccttggaaaggcaaggacagcttgccaactggagggcaggcaaaacggctgagccaggccagacacggcagctcactggccaggggcatggcctaggggctctggtgccaaggctgaaggggaacaacttggccagccgctctgtggccggcatcgtcacgcggcctccaagagctccggctgccctgcactggttcccagagactccctccttcccaggtccaaatggctgcaggagcgaagtgggcggaaaaaaagcgaaccagcttgagaaagggcttgacgtgcctgcgtagggagggcgcatgtccccgtgctccgtgtacgtggcggccgcaggggctagaggggggtcccccccgcaggtactccactctcagtctgcaaaagtgtacgcccgcagagccgccccaggtgcctgggtgttgtgtgattgacgcggggaaggaggggtcagccgatccctccccaaccctccatcccatccctgaggattgggctggtacccgcgtctctcggacaggtcagagcgggtcgccgggtggggtcgctgcaaaaaccctgccccggccgcagccggagaggcggagcctcgcggggagggggcgggaccgccgagacaggcctggaaactgctggaaatgccgcagtgccgccgccgcgccttccgccgcatgtcggcaaagagtccccgccagccccggccggcgccctccccctacgctgagctgcccctcagcgcgaaccctccgcccttcctctactcctgcgagagtcgggatctggggctacccaaggttgggtcccgaatgccagtccctctgtcgggacgcgagatgtgtagggcagatgctaggaagaagattgggtctgggagcggtggtccgcgtggttagctgcctccgctctttttcggtgtcccccccagtcccgcccttgggtgtggggacgcctgccccacaagtgtttagggaggtcagtgggttcctcgcccgtagagacaccgtttatgccaaatgagcactcctcatccccgctcttgatggagtcatgtcctagacgtgaaactatggggctgtgatcacaagcaaatgtgtgggcggatccgttgcttgggttcttccccgccccctctttttttcggaccatgacgtcaaggtgggctggtggcggcaggtgcggggttgacaatcatactcctttaaggcggagggatctacaggagggcggctgtactgtgcttcgccttatatagggcgacttggggcacgcagtagctctctcgagtcactccggcgcagtgttgggactgtctgggtatcggaaagcaagcctacgttgctcactattacgtataatccttttcttttcaaggtaaggctgagatctccgctaggcttctttccctttagtgctgtattcgtgttgtttttgtttttttctgtcctttagggagccttagtctagatgtcggggtggcttgtggataacgctctggatttttatagggtgagggtagtggtgggtgaggttttttgagtcctcctcggttttctctagtgtgtttggggggtggggctttctctcggcgcctgctggccgtagcgaggtgggctgtggggttggggcagtgggcggctggcagctgcacgtggtggccgcgcggcccgggacgctgccatttttgcccctccacttccggacgcggctacggggcgtcggagggggaccgcagggtggcgggggtgcccgctcgggtgactcagcacggccttgtgggactggctttgtcacctctcttatcggacgcgttgttaaagccttcttgggtgctttgtttctgtgagggagggttgacggtgtgggaagagagctttcggtctccagcacccgatactccctccttccagatctttcttgcagtcccggtggaggaggggcggggaggggagcaggttctggaagattcatgggctccttcctccgcccttcctcgagagctgagattgttctggaagcttctggattctggcgccccgccccagtgcccggatgctggggcgagggagggtgcactgcggcgccccctcctcgcgtggtcctggccgacgcatgtccggcagtgacgagtgtcggcctggtggctacggccaccatctttcttgggtttggtcctgttctgtaattttgtgctgtgaaagggtcgtggtggagcttttggcttaagaattctttgtccggatttaattgctcctccggtgggtatcgtatggatcccaggttattcctccctgccctatggggcaggagtgtcccgcccttggactggtcttaggaactgacacctcagggggagcagtttaaagttagtgccatttttatcttaaactagtcactttgatctcccccaaataaagaactgtaggtagtgattttcacatttaaatttgtgtaaggattacttgggatctctagatacctgggttggaccaacattatgatttttctgccatactaccagatgatgctgaggctgctggtcaccattctttaagtaggtgggttctgtgacatttggttgaagaatatttagcttattttctttttccttctgaattttcaggcctcccacttagtgtgtagtctgagatctttaagagaatgcatttttagtcttgggaagggatagtactccggttaaaccagtctgaactcactgtctaaggtcctaacaaatgatatgacctttaggatttttaaacatggggccttagtgttcttttgtaattaatgagatttttattttagatgcctgaggaagtgcaccatggagaggaggaggtggagacttttgcctttcaggcagaaattgcccaactcatgtccctcatcatcaataccttctattccaacaaggagattttccttcgggagttgatctctaatgcttctgatgtaggtgctctggtttccacatttggcatggtttttttttttgatactctagaaggaggggaaaggagtggt

SEQ ID NO: 46609 - DNA, 2379 bp, Homo sapiens
gaaggaagtataataacggcacagtagaaatcacagagaatagggcaagaggagtcctctcttctgcactagacatcttgaaataacagcatgaactttcagtaccagtgctggagaggagaaaaggaagaaacaaaagggcatttcccccaaacacctcaaagatggaggtgcagtgtgcccctgggaggaggacacgaaacacaccagccagcaaagctctgggactggtaaaatggaaaccttcacagaatccctgcccaccggcatccaacccaggaagagaggctgagcccacctacccacctggagccctgtggcacagaagagcagcttcagggcctgccacatcggggtggtctctgccgcctctgttcggggcgccaggggaacctcatcagaggccttgggctcattgccaaacacacaagctttcaccaggggaaagcagaggcccctacctgaagaaagcacacaaagtcaagccccaaatcttctccatagcacttcatcttccccagagcagccagcctgccctgctgtccggcctaccgacctcccgccctctccaagtcatatcccgtttggactgctggccaaataccctctttcccgacctagctcacttccccgccctttcttcacacaccggtctccaggtagttcttccgcctgaagtactgcaccaggaggtagccaggtaccataaagctggcatagccagcagcattcaccacaaatcggaagaaccatagctgggtccatgactccggaggggcttcgggagtctccccacctgcccctagggaggggaacgcagccagcaccaccactgcccaccatctgtaaggaaagcggacataaggattagggcgcagctcctcatcccctccgccctccagaggggaccacactggagtagtgcccggagtctcctccccgccccctccgctgcagctccggcccggacaaagagcctctctctctctctctctctcggggagggggtgcgccggcgctggccaggcagagcttcctccctccccgggggcggatccgcccctctggccacacaggtctcctctgttccctccaacgctagccggctgctcaggtcagaggaagcgccccttcccccacactcccctccacgatccgggacgtcagggtccccagcccctccgcccgaagctccccaaggagcacaaaaccaagccgcagctcccatccccgctggctccgggcagcgatatgctggccgacggccgagcagccgggaccccacccggcccccgtgctgaggcgcggcagtcacgtggcccgggggctcggtcacgtgagctcgctgctgccctagcccccacctggcgtccatggtccaggccgcgtggggtggagggggaaccggggaatgcgagtccccgggccgcgcgccccctgcgctcccgccgccgcctccaggagcggccagcgagccagcggccagcggaagtgccgcgctcttcccgcctccctccccgcggccccctccgcccctgccgcgaccacgcagcgccccgggccgccgccggaccacagcgcccccgcgcggcccggaggcagacgcggcttgggttccggggacctgggctgcccctgggcgcggggagccccagccctgaagaggcgcccgcccggcgtgtcccctgtgcttcgtcatcgcccttcataagcgtcccagaggtcatggtgaccattgccatcttgtggacaggacattgaggctctgcatcccaagccgctcctctgtgttagtttccccgttttctgacaggatgaaggtgtctccttgctttgttggctgggtagtaattctgtcccacttcccatgatcttcgaggctctacatggcctcgcccgcgttcctcgcccactcactcgcccgctgtgaagccccactggcttgctctcagttcctctaattcacaggctttccccctaatgctctgcccccatccctttactcatccttacatcccagttgagatgatactcctcaggcgagggttcccggaccacccaaagtatgaccctctaccgactccatccttttccttcccactattcttttcccttcatagcacccactgcaacttggaaaggcatctttatttggatgtttatgcttttaacggctgtctctctcactggatgagacgctccaagtggtcagagactgtgctggtttattgccccatgctcttcatgccagcataggggtgacctagcagggccctcgaaggtgaggaacggggggaaaaacgtggagtcagctccctcgtgcccagcctccctgggttacccttatccccaggctcctccagatggcaacccccaggg

SEQ ID NO: 46610 - DNA, 3165 bp, Homo sapiens
tgagggttggtgtgggaagccaggatcctagggttggagctccaagttcccactgctggccttcaggagggccttggctgggtgggcatgtgggcagggtgctgacaggacaacagccttcctgtccagcctgcccacacccactcctctttgccctcagggctctgccgagccagctgcagctcaaagccaaattgaaagctgccgaagtagtccagagggggtttccagggctaagcaccccaccaccccagcacacaggaaagaaggagacagttgcagggtcaccccgtacccccaagcaactcagtgttacacattccaagggagagacacagaaactcttggaagaggagcaaggagacagtgcagcatcctgtcctgctgcccttccctgggagtcaagaggcacctctcagatagcacagaccaggtcgggcctaacagaggccctccattcctgtgtgcacctccaagaggaggtctttgtagtgcagaaaatgtatttgttgagggggccaagaaccttaatctaggggtaatgggggcagttgggaggggaagttccagtcttggggtttccccacgtcaggtggggaaaacgaaagccagtgatggagggtctaggccgggacagctgccttggggcattagtgaggggggtagattggctaaaaggcccgtctgggctggggagggggctgcttgggcaggagggtggcaggctttagcagcaggcagcaggagaggcccaggagagtgacggagggagggaggaactgctctggaaatcccctaggccagggcctgctctctgggtcacattcttgcagccacctccctctctcccccagtatcccctcctcccacttcctcttcccacttccatacctcccacagcccagacacctccaacagagggaggaaagtgccccctgctctctggggactcgctggggagcccggacatttctcccctccacacacacacccaatctggacacaacacctgcttctaactagagatggaaaaggctggggctgagaggctaacaaaagacggcaatgtcaaaagtcccctctccttggatcaaaggtcatcagaggtatcttgcgtgcagcccccaaaaccttggggttctgggcctgagggctggtgatccaggcagagtacagaaaggactgggtcactcctctcccacccactgggtccaccagctgtctttatcaatggccacccaggattaggaccctgcatctccaaaaagcaggttaggacagccacctcctgcctcccctactcctatttatatgagcacccttgaccagggattccagccctccccaactctatttctcatccccagttcccaacctttccctcctctgtcaatgttttcttcttcctggggggctaaatcctcaactggccaacccatcccacacaactgccttttacttcaactgccctctggcccactcccaccaaactccatctgggtctggaggaggaagggttaagtgagggagtgagacacgacagttagtgggactgggggctctggaggtagaggatgtcagggacgctgactctagccctcacttcccctttcttagcagaggaggaagtaagctggggcagccagccgcctgtctgtctgctggggcaagagtgccccagcctggctcaccccatcctcctgaggaccagtcccaaacctacaccctggtggcaccccccatgcctagcttcctggccccgactggcaacctgtaactggcacctgttgttccttgagacagagcattctgaggtcaggaactgggaatcccagatattgagcaaataaggatgtccccttccccagcaagaagaaacaaaaaaactggacttggtcaggggaattttctcttcctaagggtggattattggtagatttccaagatgctggctgggttaagggtcctgccagctctgcccaccccgaaatgggaggacagagatgattccatggcctagctggacctcaaaagtgggctgagagttaagtctggagtttggaagagcgaatggggacttgaaggatcttcacgggggagtgggggtgcccgacctgttgcggctcttgggcaggcccagagttagcatcccgattcagcctagcccccatactcacgtgtctccgtcctcggagatgtaagtgagtgcttccagctgctgagggctcagcgcccccacgtgggggagtggcaggcgtggggccgggtcctcagcctcggggccccccagcaaggacagggtgtaggtgagcgaggaggagccataggtggaatcagcccgctccccatccgcgtcttccttctcctgtggttccttgacgggtcccggaggatgggtgcagggctgggggctgccgtccgagggcccggaggctggagccgaggtggactcgggtagggagcgcagagagcgcagagactcaatgccagagtcgtactggctctcctccgcctcgtccggccccttccgcgcctccgacatgcccgcggctctggccggccggggcccggtctgagcaggatccggctccaggctccgccgcgccgcctttccgggttgcgggtccgcttggcagagcgggcgcccggcccgcggcggcctccttcccgggctgtggggctccgaggggccggcgcgcagcgaggacaaggttcggagcgctggccaggtccacccagcggttactgtgggcagccgaaccgcccaagcgggtcctcctcctcgccccgcccctccggaccaacagggtcgcctcacgcggatggccccgccccctccccgcccccggcgggcgcttccggaaagaggccccgcccctccggaatcccccttcccgggctctgcgtaggcttggagtctgtggttcccgggccttgactcactccttcgttgattcattcactcattcattcattcattcattcactctttcccccttcctccttcactccattcattagttccacgcatgtactgtttccttctttcacttctatttcttaattcatttgttttatttttattttttatttttttgagacgaagtcttgctctgttgcccaggctggagtgcagtggttgatctctgctcactgcaacctccg

SEQ ID NO: 46611 - DNA, 1218 bp, Homo sapiens
aacaaaactgagactcatttagtagggagcccagacggcctctaaggttaacttatgccgcccctattttacagatgaggacaatgaagtctagaaaagatgagtggttgataaaaaccaaaaccttagagaatagtactcagcaaacaataggtgatcaataaacatttaatgaaagcgttatctttatttaaataacgaataaatgaaatcagacttctccctcgggattccactccagccatttctggacctaatactcaatcccaatccagaagttcccagctcaagccctccccaagccctccctatactctgagcgccgtacccccatcactttacccaaccaagcaccgccctctttccccaaaagctacgaactccgcctctcgcttcttttgcccaatcctgcagcgtctttctcaccagaaaactcacgaactccgctccctatcagtatggttcggccctcacctggttcatgcccgcattgacaaaaagcaaactggggtcgccgcggggccgcacggaagcggagggcaccagccggtggccatggcggtcccgaaagaagttcagaaaggcggccctcacggccgaggccttggctgcagggggctccgatgagagcggccgatggctgaggccccgccatgcgggcgaccttcgaatggcccgccgcagcctccgggctgcagctgccactgacgctgccatcgtagctccgggcagtgactttacgtggtcaaagagtgacgagggaaggaagccaggcgtttcctacagcggcccctggcggtaggaggactcagggggcggcctctgccgccggggtggaagcgatcgattgggtcgctggcagagtctagcacagcgcccggcacatagtaggctcttaattcattcggcattaagcaaatattcattgagagcctactatgtgctaggcattgttttgggcttttagggtacaaaattgacaaaatgccctgcccactgaaatccgtattctagcagtaattgctgttgtgcttattagttttgcaaagttacagatggggttgcaataaacaggtgtggattcaacttcgtgtgtgtgtgtgtgtgtgtgtgtgtgtgttttgtgtgtgtttttccaggctgagggaagaaggcagagagtgacaggggagtatcagcattcattcaagaggtattcaacaaatatttattgaagac

SEQ ID NO: 46612 - DNA, 461 bp, Homo sapiens
gaggtcaaggtggtgagactctgggatgacttgggaatgggtggggtaaaaatatacgagaaggagaaatggcaactggatggatgatggtgtagttgccagggccatctggacctcatgtagcatctttgtacaactagagaatgatgccctcttggtggacacagccctgtggatgcacagcttagtgagctgtgtgcaagctggatttaaatccccatgtccttgttgtgcagtgaacttcttacacaaccatatgcagcagccttgtgctatttgctgaaatgaggcatgctggggaagtacagattttttggcaggaggtcaatgttgggcaatttgacattgaggaacttgtgacactggtggaactatctagggtgtagtcgggcatataaatctggggtctggatatacgcatgtgaaaaataaagtcccctgtgagaaatgtatattctaag

SEQ ID NO: 46613 - DNA, 2115 bp, Homo sapiens
tatctcatgtaccccataaatatgtgtgtactatgtacccacaaaaattaaatataacaaattaaaaaaaaaccgccccattacaggagaggtccaaatgaaaacattttgtttgagtttaactggccacaggtccaatggtttcttatacaccacacagtgggtaaacagctcaagggcgggctgcccgccagcataaacctttgagtggcaaacactaccagggtggccatggaaaatgccctcttgctgaccataattgcacagaatgtgtgtaaataaaagctaaaaggaaaaagaaaattctgtagctcttccagaagaggcaaacggagaaatgaagaaatataaagagataggcactatataaatactaagtactataaatagggcatttcccaacccactaaatattttgatattttccagggatggagccagagatgttctggaaggatgaaggagactgcatgagtaattggggtggggtagcagagagtttgccaatccctacctcactgggttttagttatgtttcagttaatctgcctcctcatttacgaggcgggtattgttagctccacttttcagatgaggatactgagattcagtaaggttattacccaaacttatgagaaagccaagatttcacaatatttcaacccaactcgactttgtctaataccagtgcgtaccaatggcattattaatccagactgggcgatgaattaaaaactctgacgtgacgtttctgcaggtttctggaagaagcctggatcacctggggacggggtgaagttggcgttgccctccttgcagtaatagctgctattgttttgcagcagttattatggatcagatactgtgctgggtctatgatctcatttagcccttacgacaatcctgtgaggttggcattactatgatctctattttacaggttaggaaactgagccttaaataaactactggattttcctgagtattctgtgaataaattcctattactgaaatacttgaaagggctagattaataaattaacaaagccttcttcggagcaactgtgctgaaattccgtacgcgtgacgttcccaccctctgccactcggtgacgtcacgatcaatcccaccactaagttcccagccaagcgctaccgccgctatctcgcgagagccgtagtttcttccattctgttttggacatgcgcggggcgtaaggcgctttggccagagtggtttgatggttttgtgttagtcttcctgcagctgagcttccacaagacactttttccctttcagccacccaatatctcgcgagacttgctattctgcgccccctcccaccttgcgcttgcgcagatcttcaaagcagaaggtcgcgcttggaggaagtggcggctttgagtccggtggcccaatcgctgttactacttctctgaagctcctctcggctgcttgccgagacaccctgccgccaagatgcctcgaattatgatcaaggggggcgtatggaggaataccgaggtaagtctccttttcccgccgtccgctgcccgccgctccctctagcagcttgtgcgcacgcgcgcggaggtcgggggggcgacgaggagaccctgtggggtctgcgtggagggcagcccgggggctgacccttggggccctttccgtgtgtctggccccgtgttgtgcgagcgccagtaggacagggaccgtgatgtcaccacctggctactcggctccaagctcacttgttaggccctgagtgaacatttgttgacttgaatacgccccctcccaccccgcccccccgccccccccggccccgggaagaactcagagttccaactcagccagagttggtcccccggggcaccatccactcttagtccaggcaccacgactctgtctcatactcagaaataaagaagttgccgtggccacaactttgtgtctccattgacttccttgcagaggggaagcagtttgagtgccaggttcagagagcccgtttatgcccgcatctctctggttatctgttatcagggcataacctgtctgccatctcgacagatcccaaggtctgtctctttctgtcactgcctttgcctaga

SEQ ID NO: 46614 - DNA, 568 bp, Homo sapiens
gtgcaggtgcttatgtcccattgaagttgggatatgccaccctcccagccagtgggtgtgttcttgttcaccttttcggaagcccccatgtatttggctgcccacaagttctccagactctgtccttttgggtttttatggaggcttcattaaataggcaagattgattacatcattggccattgcttatcaactcgaccttcagcccttctcccctcccctgaggttgggggttgtggctgaaagtcccaagccctctaatcctgccgtggtctttctggtgactgccagctatcagtcaactcattaacatgcagaaagacacttttcacttggaagagtcccaggattttaggagttgcattgttggaaacggatgaagaccaaatacattatttcacaatgtgtgcttgtctccattcatagttcaataattagtctaggcatccttaggaccaataaaactgcatgatttattaacccgttgggtgaataataattggaattgtccagttcctatttcgctagtattctttaccttctttatttctctgaaactatcttgtat

SEQ ID NO: 46615 - DNA, 473 bp, Homo sapiens
tggcctcctctgatgtagtctagggtatatcagtcaagatttaattaaggaaacagaaccactaggaaaatcatggaataaggaatttgttagaggaattagtcccatatacagttatgggaaaagcagggcattaaaggtctgaaaaggagtgttaaagattggagaaaggtcaccagccctggtgtggagtgagtcatagcttacagggaaatctggaggccaggcatggaagtctggagggttgttgactctttgtcactactgtttctgtgagtttgaagcagaagtctggtcaccagggctgcctgtaaaggaggagaattggatatatggagcagtggggtgcaaggacacactgaaacttgccagctcctctgcaagtctgtcactacctctgaccaatgatggccttcagagtgtagtggttgctacttcacctctgtcacctctgcttctccttctgcctctac

SEQ ID NO: 46616 - DNA, 461 bp, Homo sapiens
taattactacctttgtgtttataaaactttgttttataaaacttgatgtaactatggtcaagataggacaatatttaaagaaataaaagcaccaaggtacaaggtcagcacaaaaagttgtgctgattaagggaatagtgtcatccccaagggcggtatctggcggtgtgccccagactctgcccttgacccaggactgcttaacattccaagcattcacttgcaggaaagcctaaaaagcacacttattacattccgggatgatttgaagctggtcaggagagctcatgatttgaaaaatattgcaggatgcaaaaagtattttgaccaaacagaatgatgagctgaatgtaacagtatgaaatgagataacgatgaatagaagaatctgacagatttggggcctagataccaatggcctctgtataagactagaaggggaattgtgttcagttatgaac

SEQ ID NO: 46617 - DNA, 2341 bp, Homo sapiens
cccaggagtttaagaccagtctgggcaacagtgagacccggtctctataaaatatgttttaaaaaattagccaggcttggtggtgcatgcctgtggtcctaactacttgggaggctgagacaagaggatcgcttgagtctgggaggtcgaggctgtcgtgagctatgatcatgccactgcgctacagcctgggcaacagtgagagactctgtctcaaaaaacaaaaacaaaaaacaagaaagaaaaagaaaaaagaatcactagatttggtgaacacgtcaatggattagtacaaagtgaacatgtctgttgaccactgcccagaacaagaaagagaatgtcaccagtgccccagaaacgcccctgtgtccctcctagatactagtcccactgtcctcaaaggtaaccgtcatcctggcttctaactaatccgtgggcagtttgtctaaagttgtgctgtgaggaaagggaccggtggcttctgtactcctctgttctgtcacatgagccccaaaggtggacagtgttcggtggcagtgacaggagagatggggctgacttcccagctctgctgcatcccggccctgactttgctaggtgtgggcctgaccatctgtgtgtctggggagaaggccatgcgtttctcagcactcagagaaagacctgccaggggagcctgtctctttttgtctgccccaggcaggggcttggtcttcgaggcgtgtgcctatacacatagacacacacagacacccctatgatctatctccagcttggaggctgttgcaactacaaaccttccaaataaatccctgatctctcccagaaagctgttgtgaactcagtggaaggaaagcttttaaagtgaccctccatttaagccccgagtcaaagccttatgtgttttctttccttttcttaactggaaggttatgtgtttcttagctactggtcagactggatgagactgccaaaaagctttcagggaatttcctcaccatgtaacaaatttatgagtcatatgaaaaactgggaaatgcttcaaccagctgcctctcattgactcagagcctttctcacaacaccttggtgctggggccttggatggagccagcagctgggtttatgataactacaaatggcctgccattgtctgggaggaagctgtcttcatctccccttttatttccattctcctgtcctccccagcagaaagctataaacgttctctgaaacagttcagccactgaaagggcaactgcagaggtcttgattgtcctaaaaaggccccgcggatgggtgggtgggctggtaggtagctgaaggcaggtttgggacctcattctccatcactgttaggtaacctttgggcttcttagactcaacctgcctaaaactgagctctgatctccccttcttccaccccttgctgtcttccccatcttacaaaatgctaacttcatcagtgccagattgtattttcctaaagtggccacagtaatatccctcatctcacatgtccttctgcagtgtgaccttgccactttcccatcaagaagtagaggtaatttttccatcctcttgaaacaggccaggccctgtgactgctttgaataatacagtagggtagaagtgatgtggtgccagtttggggcacagcccttaaccagcctggcagcttctacttccacctggaagccagccatccctatgtaagaggtgggactatccaaggaccaccgtgctgtgagaagcccaagccacatagaggagccctagaggatgagacagtagagaaggggatggggctggggagggagaaagagaaagagagactaagattctaggaagcgcccaggtgctgcatgtgtgtgtgtggggggcgccattttggaagtagaatcttcaccccagcctccccagctaatgtcacatggagcagagacaaattacccagccaagctttttcctagttcctggcccacaaaatcatgagcaaaataaatgcttgttttaagccactaagttttggggtagtttgtaaacagcaagaggtaaccagaacaccatcttcccagttgccagaccaaagacttcctgaagtcatctttgactttcctctttctctaatactcacatccaatctgtaggcaaacgctgtgcatttatcttcaaactatatccagaatatatccactcctcatcacttcctgtgatattgtgatttctaataatatacatatttgtcctccccaccccccatggctggcagcccctgcatagcctcaggatgggagctggtcactagaatgaccaaggcaggattagacggttgggactt

SEQ ID NO: 46618 - DNA, 2742 bp, Homo sapiens
gtagctgagattacaagcatgtgccaccatgcccagctaatttctgtatttttagtagagacagggttcatccgtgttggtcaggctggtctcgaactcccaacctcaggtgatccgcccgcctcagcctcccaaagtgctggggttacaggcatgagccaccacatctggccttctcaccctcttaaccacacccttcagtttgcttctacacagatatggcagcctgcaggatcctgacaaaaaccaagttagcctgtgcctctcctctgctcagaaccctccagaggcctccgttgcactcaggccctgctccctctagccttgtccctctctgacgtcacttcctactgtcctcccccttgctcattttattctgggggcacctgcctcatggttgcttctctgtgcagcctcaggccctgcatttacagcacatttttgcagaaacacccttctctacgtggccgcatggctctcactgtcacccctgcacagtcctgatgcaggtgacacccgagtgaagcccctcctcttgttcccacctgccttgctatatacactcctatcacccttcccttcttctccaaacgatttttcttcatagcatttgccaaccagtggcagcttggcaacctgacccactggttggtaaatactatgaagaaaaatagcatttgatggcttctcggccttttggctaagatcgagtgaaaaatagcgtttggagaagcagggaagggtgataggggtgtattcaaagtaattcaaagtaatggcaaaaaccgcaattacttttgcaccaactgaatatttagtactgtcttctcgctagaatgttgtctccagggggcagagactttgatctgttttgtttacagaaataaccctagagcctagaacaatgccagcacccagtaggggctcaaatcacacttgcccagtgcgtgagcctaacttttctgagcctcagtttcttactgcaaaatgagagaaattacagttgctttcaaggggttgtgaggactaaataataaaagttatatgaagcacatggtgttgggcctggtacagaattgccccgaggagctgggcccggagagggtacaacttccagtgcctctttaaataatgcctatccttttgagacaaagaacatatttttgacattacctttaggaattcttgagtcataatggtgattaactcagagtctacgatatatggactttgggtcgtttttctctaaggcgtgtctttgaacttgaatttgttccattaaagtggcaactgctcactcacacagccagggctggtcctgtgggttcttcctggtggtgtatgggatggacaatgtcacaacagtcagagaccttaggacttatcttctaataaccccacagtgtcctctactggtaggagaactgtccagctaagggaaatgacatgtctaaagctacacaaccgggttggtggccgagtgggggcttaccacatgcctctggactctgagtctctggctctttctactctcccgattcctgagggttaaataacaccaagcagaggagagtcaggcccagggagaaatctcatccctcccttgtcccctccgatcctttcttgttttgtgtcatttgtttgtttgcacgttctagtagttaccaagtgactttatatgtcacacacagtgaagacacgggctctgtcatgggctgtggcagacattaccaggactcaaacacatggctcatggaagactcacttcccacttgggagggatttaggagagaagcataatcttgtaggggctaaagcactgagatttgggggtggctttttcccacagaataagcccacgctgaccaacacacagctcgtgtttcagaaggaggaatgaagacgttgacattgatgcagcatagatgagatgatagaataatgaaaaaaaaaaaaaaaaaaaaaacccacagcagagagagtgaccctctccacctagcttgtggagagagccacaggcagcaatgctaggtcaagtgtgtttctcactttggggcagtgctggggccaggtcgcagccccagcttagtcaccaatcttctgtgtgaccctgagcaagtcactttccctccctgagcctcgcgtatgaaacgagagggttagagaggatagcctctgaggttcttcccagctctaaaattgtttcaggaaaggaagggtgagttcatcttgtgagctcttggtctgaacttccttcctcctgccgggcactggaccttctcctgtgagtccacccagcctcattggtgaggattgattgagcaggacacgaagggaaagaaacagttgctgttccagcttttggcttccaaaacagtcgttgagaatgcggggttttgtggagagaagaaaagacacttgaaaccatcaagggaaggtgcagcatagaattgttgccatgacaacagcctgggcagctcccctttcccttcctgctcctccttgatttccccacagccaccacccaggggggcagtagggcagggatgatgggaaggagcccgctggacgagtttgaccaaatgactcagcctctgagggcctcagcctcctccttggcaaaatgaggctatggtaccttgctccctgctggccgtgggtgtcaagtggtagcatgggtgtgaagcacctggcacgggcatgctccaaagcgggtggttgaggcaatgcgtccatgcccag

SEQ ID NO: 46619 - DNA, 1179 bp, Homo sapiens
ggtgtttattctaactgtgtgtgcatgtaggtcagtcatatgaaagtttgtcattttggtagttaatatcagccctactttgtatttgctttaagaggaagtgaaatacattcgtgcatttattttgtcttttgtacttggctgggattctgtaattaatacttgctgtttaaatgtagactggctgtacgtggctccctcgaatctgacactagcatttcctcttgggcttgtcacaggtgatctgacctgggcctgtccccggactgatggcggcagcattgttagtgggaaagcaggtggagcaggaggctctgtgggattgggatgtggacagtgggagatgccaggggcaccccagtcttaccctgagaacagtaagcccttctcagcagggctcctggccttccctggccaggccagtcctcaaaagataccagccagtccctgaaggaaccccctacccctcaagtgctgctttccaggagggctgagagcagagggccctgtcttggcttctgcgctgctgtagaaggtccccatatttccttctttagattcttatatatgcttcctgtgactttaggctttggctttggagcaatgaggcctcagtgtgaaaactaacagggtaaaaagatggggcctggcagaaggtggcacatccggagcctgagaatgagccaatcccccggggatcttgtgcagtgcagtgcacttctgtagtgcagttttgaaattgcctttctgactcaaaggaaagccctttggcctccatgtgagagcaatgctgatgattctttgcccttctttggctctgatatgggcgggggatggggagtatgtggatgtgaagcagtagggagaacaggccagcagaataaacagacagtgtcagcccaggcctggggttgtcactggaggaagggttgtaccctggggagaggatcatgggggtgcccagtgacaaggagagaggttggctcaggaggaaggagactgagaacaaagaaagcgaacatccacacagagagagaaagggaacgtgtgggggcagggcgagaacacagagaccagcctcccccttccccaccctcctctccgcccccagacactgacgttctcaggctgccctttcacatatgggcctaattcaggtagagtgaaatcttgcattgc

SEQ ID NO: 46620 - DNA, 1401 bp, Homo sapiens
cagttcctcatctttgcctgaacagccatgctactttcatacatctattttatttttcattttattcctgctcctctgtgtgcttgtattgtcttttcaaaatcactattcattcccttcccctctgttttataaagtcaaatattaaacaccctaaaagttttccttcacttcctcaggcagattgtgccatcctttcgccgtatctaagggactgtccctcttttagttacaacatcagtcacatggcactgcttatttattcacctcctttgctatatttggataactggtttcttatctccatacaccatacctccctcccaatatatttctaacacaatgtttggcacatgcttattgaataaatgcaggtatcaaagctataaggatctcaggacacatgtggatgttaataatggtcacatgtagttcagttgtacagatacggattcttgtccatactcaaaaatcaagtgctgtcctttgtatgcgaagtgtgctttcattctatcaggaaggcatgtactttggattgtttttctagcagtggtgggtgacagattgactcatagcagtacacagtcttgccctgcctccttaattttttattttaaccatttgcaagctggttgtgtgaacgatagacattgtttgccatcaaaaattaaggcaaagttaggtcaccaacatgaagatcaacccctaatactttcttctttagacagtggcttcagagaaaagcacagtgtagaaaccaagctagctctcttttcttttttctctttctcttttgaacaccaaaaccctgcttggatgagaaatatttgtcaactataactcatttacttattaggatcttacctaattagtcttgaatacaggtatgggtttttgggttagatcaggaatatagagtgaaatcagagccagaaatgtagtctctaacgtctctactggaaactgtaaaatctacacaagtgtttgaattggattgacagaaatctgtaggccaggctgtgaacttctgcagccagaaagtcaactcaaatactccctccctgctatttccaccagagaggcacagcagcccaactgtcaccttgaatgcgcctgggcaaactcagagcctgacactgggctctgtcctcatgacctctgccaactaatcagtcaaaatatttcctgatctagagagcatactccacctattgggcatatgcccagagctgcgagtgcactctaatcaggtgggagaacctatccaggtgccagggcaaaaattaacatctgactgacatatggactatgaattttctcttctcgcatcctagagtcatgcagaggcagtatgtggggatgggagatttgatctgtgcatacatagcctaggggatttgg

SEQ ID NO: 46621 - DNA, 727 bp, Homo sapiens
ttcatttgtttcaaaaaatcttttaatgtgtcttaatttcttcattaatcccatgatcattccagaggatattgtttaatttccatgtatttttatgctttctgaagctcctcttgttactggttacagatttattccactgtggtctgagaagatacttgattttaaaaatctcttaagacttgtttagtggcctaacatgtgatatctatcttggcaaatgttccatgtgctcataagaagaatgcatattctgcagttgttgggtagaatgttctgtaaatgattgttgaagtccttttggtctaaagtccaatttaagtccaatatgtctttgttgacttctgtctcaaccatttgactaatgctgtcaacagggtgttgaagttgtccattattactgtattgctgtctatctctttaggtctagtaataagtctagtaatatttgtttaggtctagtaatatttgtttcatgaatctgagccttccggtgttgggtgcatatatacttagaattgttttagcctcttgctgaactgattcctttattattatgtagtgactttctttgtcttttttcctgtttttgatacaaagtctgtgttatctaagtatcactactgctgttcacttttgctttatatctgcatgaaatgtctttttcctccctttcactttcagtccatatatgtctttataggtaaagtgagtttcttgtaagcaa

SEQ ID NO: 46622 - DNA, 1737 bp, Homo sapiens
gaaaagaaaattaaacataatacactgtttatactatagttattttatacagaaagggaaaatattattttttaatctactatagtttattattgagttaaaaacaaaacatgggccgggcacagtggctcacctgaggtcaggagttcaagaccaccctggccaacatagtgaaaccccgtgtctattaaaaatacaaaaattagctgggtgtggtggtgcacgcctgtagtcccagctactcaggaggttgaggcaaggagaatcacttgaacccaggaggaggaggaggaggaggaggctgcagtgagccgagatcgcaccactgcactccagactgggcaacagagtgagattccatctcaaaaaaaaaaaaaaaagaacaaaagcaaaacaaaacaaacaaaaacaaacaaacaaaaaaacatgaagtaactgaaaatctgattttcaaagagaaggcatattaggagactttaagattatgagtttcagtgtgaaagtagtatgtctgttcctttaagtgaattaaatttaaaatataatttaaaaaaatagttcaattgcactaaatgttactttataaactggaggttgatacttataaagacttgaatgccatttttaaacctaaaaattacaatacaaaacctttcatttgctgaaattgccatgatctgaagtgccatttacttaatgcttcacagatgtatgatgccaagttgttagtcaaattggaaagtatatttagtcagaaaaaaaaaatcttccaaaacatgttttcctatattttactgacatttacatgggatactatgcaatgtgtcatttatttgcactttataatctataaatgaagctctccctttctttttccaaatcaaatatgctgttattgggaccacataatagctttccatttaaagacaccattgtttctataatccctcagaccatggtcatgtgctactttgtcatatttttgactggacttttcatcacactttcttctttgacctttaccccgagagccttagtcacaactgaaactttgctgtaaggatgttttgctacacaatctagctcactattacgagtcattatacactttcaataagctgatgtgcagtgatgtgaaagtactaattttaccacgaggttactagtgttactagagcatgtactaataaatttggctaacactgaatacatgccacggtaggaggttagacaaaaatggaagagaccagtgatatgttcctttgtggtaatgagtatacataaaggaaaataattaatattagggtcctttaaatgtcatgactactattagagtccattacggatcaaatgcaatcagaaatactagtgtaaatatgactaggaaactagaaattaaaatggaaatactaagacaatggaatttttatgattaaaagtactgtaaataattaccatagcactctgtatattaccagcaccacttaagacctcttaatgttattaactgcaaagcagtagaatgtaggaaaatcatttataggctccccacaatgtagacgttgtttgtatagcacttacaactacacatatattaaatccaccaatttctaagaaacagatcctgtcatactttagtacatctataacacaaatctcttatgcatataattaagcaaagttaaatagttacttacagaaacttaattgtcgactttcacagaattctgcatattg

SEQ ID NO: 46623 - DNA, 2145 bp, Homo sapiens
aaggaacaaattttggccatatgatccaaataattcaacatctgagtattatattttctcctgtccttccactatcatcttaaatactgagaaagggagtaaatatctaactttcatgaactgtatgttctccaaatacaggaaccgtgctgctcttctagagtgctgaggcaatgctttgcttggatttgcctgggcctcactagctgaatcaagggacagatgaatggatggactaggacaaaagaaatgcgtttaagtacgtgttgaccggcctaagaccagaaactgtaagaattaggatcaaactgtaatccaattttacaaatcccagggagacaaggcagttttaaagacaaaaatccattaaaaaaatcaagacagtggtcaaatattaaataagtgtggctcttattttctgtggtgccctaattctaccttctcctctgcctctattcagatcacccattctgatccatactaaagtatacactggcagtccttttctattcctttaagaaatctttggaaaaagattcaaggggacaatatcataagcctagtaaaacatcatgatcagaataatgcttactctttactgagatggttttatttttaaaatgaacataattttttttatttttaaaatgaaactaataaaactgcttattctttgagatggttttataaaataaaatttataaaatatttatatttatttacatatttaaaatatttataaagtaaaaccatctcaataaagagtaagcagttttattagtttcattttacaaatgaagacactgatttagagaacttaaaggaaaactttaaaagcatacagttaataaagaggcaaaactagaagtaaaacttgggtcctaaatacctacctctaaggtatacaaagtttctcagaaaacagttactattctagatcatattacttgtaatgaaggttgtactccctttaggctctagtttcttttgaactaaatattacaatgcaaacttaattttaaaagacttactttggctattccgtatagtcattaaactataacaaaaaagacatcatatcattgtcaaaggcactgaaaacacaaatctctgaaataaaagtcactgaataatcacagatgatttatcatggcttttattcatactgaacattctcaaattacacaatgctctcctatctcagacggccacatgaatgtaaggtcatctttggattagtcatactcttgtatctgcaagtccagtatgtcttctgcttaatctgtcaattccacccactccctggtttctttaggtgtcatcaacagcattcttgaacattcataaaatatgcaacatacttagaggattttaggaaattaaatcttactagtattacaatatagctaagtattataacataggcacaaatgtggagaaactacttgtgaaagaattattcctaaagttttccaaatactcaacagtattttaaaatttaattgaaatagctttttaaaaaggtaaaacagaatagttggtgactagttgcttttctcactaccgggaagttacagcattttcttgttattgtaaaacatacagagaaggcagacttttatgctagatgaactcactttctgcgtcctacttaaatgaaaacagaaatgctaatatccctacagatacagtgcctagtataatttgtttgttcaatatcgtgaatacaacaaactctcggtacatatttgttaatctgaattttcagtgaaaagtttttatttcaattaatgtgaagttgattgtgcctttgaaaaatactttcagtacggacaatcatcatttgccctgtctataccactttgaggtgtaaggctggattacttatgcagcatgcagttgcatttaaattccatgtgctctcactgaagcatttttaaaggttatggaagctatgtgctggcatatctcttggcagcttctcaaggcacatggcatttaactttcttcagcaacacaaaaacacagagcataactttcaaaccaagatgagagtatctgctctcacttctacttcaacatttttttcatttcttttttgagacagggtcttgctctgtcacccaggctggtgtgcagtgacac

SEQ ID NO: 46624 - DNA, 2605 bp, Homo sapiens
tatggaacatctccatcaaggcagaaactgctagtgaaaagtgcagccctagacttaggcatacttcgctccaacgtcccgaatatcctgagataagaaactttccatagcacaatgaagagcattccattcttgcaaagtactctcacgaactgtttctcataggcaaattcagcctctttgaaacattcaccagaaattccccaagttttgtccttcaagtaaatctttgcagggcgaatttaattcctcttccagagtctgcccttcacatatactaagaccccaggtcctctccttccaaatacatacatacatatatacacatacatatacttatatacacacatatgtatatacatatatatacacacacatttctttctaccgaaataacttaacatttctattagcctcttggagaaatgctaatttatccacgtgtacagtaatactacgtccaggatcgtctgagtgtcaaatattacatatcactgtcttcataacttcactctcacgtgtgagaccaagtgtcctgattctctgagaaaataaggtcacagtcattctgaactcctaaaacgtggagagcaaaagcagagctaatatgtactgagcagcacctggcgctgttctaagcgtttaacgtgtattttctcatataatcctcacaattctgaaataggctataagatcgccattttacagaccaaaacaaggcaaagacaagctaaataatttccccaggggtcacagacgtgagctcaccccacagagaacacagcggatcttttcctctttctggatgctacactcccactaactacctaactcttctctcgccgtgccataaagcaacaatttccctctttaatgattcctccggcagcccccacactacctagacgacccgcgcaccccgcttctcagcacagcccagcccccctcaccccacgcccacccgccaaaagggaggagtcgagaggcaactccacgctcggcagcggaaccagggcgctgcgcccggccagcgcctcccacagccgccctcccttcaacactccggcgtagaccacgaagacccaggcagccgccctcgagccggggccagggcgtggccggcgcgggggcccagcgacgctgggatctccgctctgcgtccctcccggctctctgacgtctcccccgcccgaatccccgcaccgccccccgcaagccctacaacctctgctttaagaacccttggaggcactgctgcgcttcccgcgaggagaatgtgggggtggagatggtgcggtttctgctgctgcggcccgggacacgcttggaaaggggcggggtgggggactgagagtgtggagtgtagaaagggaaaaggtgactcggctgtgtgacggggcgatggggggggtacaagatggcgtgagcccgactctcggtggggcgggggttgcggagactgaggagtaagcgatacggacgccccccgcactggcagtgcgggcgcatgcgcgcttggccaggtggcgcgcgctctcccagcccgagcgagctacttccgccacgctcgccgggggcggggcgttgtgcgcggccttcagggcccggcttgggcagcgctgagccacgcggcggcgtttagagctggggacgctgggagcggagtggggacgagctgagatcggtcagggtgtacagggtgcaggcttgaattctttaggaattgggcccgagagggctaggatttttgaaggattgggtgaccggcactggaagttgattttcaactccgaggaagagattcaccgttctaagcttctttccaggaattggagtgaacgggatcttaatgggattgcgcgtttacaatggtgaagggaaacggaggggtctgaacgctccccgcagggccgcagtacaggcgtgtggatgtggaaccctttctgggacggcgaaaccagctcttacgccgcttccgcgcgccatcactccctaccctgacctcgcacagaatctgtttcattaatctgctattaatgttttttccccaactcatgttactagacgcaggcgtttaactaccatgttttgttattgaaaactttttctacttgaaggcttttttttttttttggacgattctgtgtttagattttggcctgttcctcattttaaaatcttgcacccccagtattgtactgtacattctgtcctgccacatttaattgatatagatgtagttctttaaataatacagtagtcgtaagacaatgctttcagtctttcactctttatattatatgaagtcttatttatatttaacattcttattgcctgcttagagaagaaaactggttatccatgctcaccttcacacctgtgttgtcaaatactataaaatactgtattttatagggattcaagtattaaccctcaccaagtctttttaagcatcactgcttcagttattttcttgcctatagatactgtgagttctgaaatcccttccttctatttgcttaaattgtttaaaatagcaacttatttggttatttcctctgtggattgtagttgagtctgctagtgttgtgtttgattctcttta

SEQ ID NO: 46625 - DNA, 1556 bp, Homo sapiens
agtagctgggattacaagtgtgtgccaccacacctggctaattttttgtatttttagtggagacgggatttcaccatgttggccaggctggtctcaaactcctgacctggtgattcacccgcctcagcttcccaaaatgttgggattataggtgtgagccaccgcgcccggcccaggaagatgcttatttagagattggtcacatgtgaaataaggtgagggtacatgtaaaatatgttggatagagggacagcagatgtattttttaagattatttgattcttctggacacagttcttgcattcacattcttgcagtctgtgaggatgatttgaaaaaaccttgatagcctttgtgccatgccccagatgctgcaggcctgggttttagtccttagcacaaagcattagtagagaagcccttaacttcctgactttcagacttcccctgggttcttcactgtctccgaagtgcccaaggaatagaatttatgggtaaatgccatgttttgatatttacaagttggcaaatacaagcagcaatttgattgtcatagatattaatcacttggctaccagtatataaaacatcgttgaaaatctttaacttaagagaataataacagtaagaaaaccccactgttctctgtttccctttcttcaagaaggatgaggggggcggggggatgggtcagaagcgctggtggaggttatgtctggtggttggtggaatgtgctcttgagaagaccagttttaaatatctttcagtcctttttttttgttgactggctgtcaggagctgggaagatagccaagaaggaaatgacacatcgagaggcattttgtgttgtgcaacattctgtggaactgatgcaaggatatatggcctgtttacacattccttcgctcgcagactgcatggcagtaatttaattcagcagcacatggcatgctgcagcaaggagctatggcattaacatcctttcatggcaaattatcacagccgttaaaacatgctcgtgtccctcctttgcactcttccctggcttcccagctctgaatatgcgttttcattgtattggacttgtgttaacaaggtgctgtagctttcacagcaagagcacagtttccacatgcatatgttccagttgatatatttacttctaactaaatatagcatggcaagttttcaagtgatatgtgttctaaaaacacatacatgcttgatccaaatgtgtcagtagtttgtatcttagtgtaagtcagagatcattcattctgaaaatagtgttagggacttgacagggacttgagagaaagaggttcccctccccccctttttttgtctctcttttttttttttttaaataataatgacctttcgttctcaagaaagataattcctgatagatcactgaaatattctgttcacctctattttgtttgtgccatggcaatttcttcaaggaagactagaccagtgaataggacatacttaaaaatagcagggaaaaaaaagatttgttgtattgcttttcccattcatacctgtccat

SEQ ID NO: 46626 - DNA, 836 bp, Homo sapiens
aaagacaagcacaagtaaatcattgaactacagaaaaatgttctgtggtttcatagttaagcaaaactctaaatcgccaggcttcatagcaaagacatagtcagctaaaagccgcacatgtggatagagggttcaattatgagacacctagtacaggagagcaaaattgcaccagagattcttaaccaaccagccttaccaaacaacacaacaggggaaccccaatctgccttacccaaggccccactggcagctttccacagaatttgcatttagaggagcagaatgacatcactgtcctttgggagtaggtcctctgaaaaggcagcaggttccagcaggtagctgagctgagaggacatatggcccacggggacctacagacagcctttgacatttgtatttcttacaatggagggccaaggagggcaaggggctgtggagtttggtgtctactagtgtgtatgaatttgagctagagtccttctgtggcatgcactttgaccactcctggcagtcacatggcagatttccaagtgcaaatccttaatccaaacaaggatcatctaatgacaccaccaggccaatccctgctctcctccccgaaaagtcagggtcccttcattggaatcctccacccacccaagcagaatttagcagagatttgccttcaaaccctaacggcccccttgttctctggtccttctcaaacccacctttgtaggccacccagcattgcaggacagcgtgtggggcagctggacctgtgcttcctgcctgggagtctcccttggaattcatcctgactccttctaataaaaatggatgggaaagca

SEQ ID NO: 46627 - DNA, 947 bp, Homo sapiens
aaagaactttctaatgattaaatgctgcccaagcctgcaagggagatctaaattatcagaattgtttaagaaatggctggattactttgcttactcacaaaccttgactgagttcctcttgtgtgcagtgtactgtgccagcccaaggaatatgccgctcttgaggatctcgtagaaaaaaaattctgcactgtttgaggaataggattttataacttcttagatttcttctaattctaagatgttgttcaaggttgccagggtgcccttaacttaggaagaagatctgttaagaccacatgtgagggggcaaccttgggtagtgtagtgtttccatggtcactcagtgcaaagactaccactgatagaaatgatcaatatcttaggcttagggaattttgcatgaccaacagcctatcttgctgtgtttatccgaagggttccctattattcacaggatgaagtccaagctgcttagcctacccaattgatttacccagttattgcaacatcctagcgtaagttgccaaatggtgattctccatgctagcctgcccgaaatgctcaatctcctctgatatgggtgcctatactcagtcttccaactttctggaagtctctcttttcctctccacagtgcccttcatgactaccattcaaagcctttctctgtgaagcccttcctaaagtgcccagttcattctctatcttcttgcctactgtattaaatacatcccatctgtattgtctaatggcatctcttgggtagatcattaactttgggcacctgtataatttacctcaccaactggattgcgatcttcttttgggtagaggccacacatgctactttattctgtcttcttttgccatagggcaaagcatatcttcgattcatatgaagttggctgcaagtgaacaagacctttccccatctggtcttgtta

SEQ ID NO: 46628 - DNA, 2553 bp, Homo sapiens
gcaggcagcttggaattgtagaaagacagaaatatgcgggggtcatctaggcctgtttacgaaagagacattttggctggggtgaaaggtcttttagggccatctttctgcctttgttgagtcaaagctgtctggctagccaccttcagattcttaggatggttccccaggtgtctgaggaagagcatttcaaataggtatgggaggagagaggggacatgctggctcctgaagatgtcagctccactgttacttaatagaccagtctctggtttatacatcaacccactatgtgtttggctatcaaataccaggccacaagaaactgacctttcctctctggataagtgcagactaactctaattgctggacctgccaagctgaggaccagcatgtggactgcggtaacttcgtcaagctactggttccctgggagccagccagcctgtccctgatgacagtcctctctctcaccaagcttcctaactgtaacagatctcaaaacattttgcaaataagccagtgccatcattgcactttggaatatactacttagccagcacaaacagcttttttctttttttcctttttaccaaatttggtagtctggcttatcgctggctcctgtcctctggcagttgcaacagacgctggtggtttgttgtggagcattggctcttcgggggtgatgatttgtcacttgggcttatgtggcaaaagtggtggattccaagaaacacatgtttaagaaatttaggaaggaacaaggaagtggatatgatcatcagctaattagcttgttaggccaaaaatgccttttggtgctcaccacagcactgtcgccagctgtaaagtagcagtgacctcccttgaggtcattgtgtgaatgacagtgataaatgtctggttttggaaggttaggaatttttctctctttgcttgttcttcttccccccgccccccgcccccaatccaaccctctttggttgtttggaatcctattgaaaatcacaaaccagaaagaaaacagcttccaggatcagtggtgaatatttcaagaatcaggttactgcggcctgtggctcttgagctcaacttgaagacaatccaggttgctttggtgacctcccagtgcattttccctaaaatacccactttctcttggtttaccagcgagcaggaggtggaaacgggcagaagggtcaggctaagtaatgtggcaggatatatatatcccccaccccctacagtgattgggtctagatgaggctcccactgagtcagatgctttggaacaaaaacaagtcttaggagcggctgagtacctgattttgggggaagctgaccaattttgtaggcgggctctcagtgtaccttgaactactgattcagggggtgtgtgaagttaagacactgggtcagcgtaagatcatttatagatgtgcaagatgggcctggagagacccttttccactaccctggtctctactttatggaagtcagccccttctgtgaagtagagaccagggtagtggaaaaggctgaagtaagagtcaaaagccacgctttctctttcttgcttcacttcacgctgaactgcagaactttagacaaatcagtttgcctttctgggccttacttgtctggtaataagataactggatcgatcttttcatgacgcgttttccttctgtgtttagccagactcacctcaaatatccttgtcacaagtgctttcatcattaccctcggtgaatcatataaaacaaattttgcactatgatcaaatgtgatcaaacgttccatttttcaatgtggtatactatatagcaacaatattacgaatttctattaaattgaggaaccgatacactccaaagggaaaaagctagaattgtaaaatgtttcaaagataattttaaatagtgtcacaagtaatgtctaaatatgtattgtgcaaagaggggctactttatcaactttggagattaatttagaatcatttgtatttagcaccttctttaatgctaaagatattgttaatgcacttaaaacaatgtcttctgaagaacattaaacattccttaaaagtcatttacactactatttgcttagatttgcctatgcaccctcaagatacataaattctaaattaatgagatctgagttcatgagatgttatcacatttgctttggaatgtgttcaaccatttggtaactcctgaatcaccctaaactagggaaataaatctgatgcaatctacgagactacatatgaagcagggagttctctacttaacaaatgctagaatatacagagttaaatttaaaccaaaatgagatttcctgagatcttgaatactaatatgtactgcattagccttgagatgggtaaggtccttcataacaaaattgaacacatgccaaatctggtatcttaaagcagtaatgtagactccagccttctgattaaattctttggatattaaaatttggtttgacctaaattcaaagtgactagatatttttttttctcctgtaaatttcagaga

SEQ ID NO: 46629 - DNA, 1272 bp, Homo sapiens
ccagaggagagtgttcctaaactaggtcagtcatgcatttactatgaagggagagagggaaaagtgactcatgtttggttaactattggtacaatgatagatacatgcatgtctgttctctataagactattgaatttctgtgaaaagcaacaccctccaaccaaacacctttttcaagtagttcaagagtcaaagatgagaagggctggaacccaaggaatatagatggttgaagctaagggatcaggtccgggacagattcctggaagttttctattgaagtttattggaagcctttgtgttctctcaacatccggaaacattttcacagctctttaaggtactgtcatcctattctttagacctgattaaggctctcaatgcttggttcaggaaagttgaaatctggaattcttccacctcagaaatgtaccaaaacacaggaaaccaaagagcaatacaaatctatagcctcaaataaacagaactcctttccacattggtataatttgaagaagaggtctcctcacttaagcctcccttggagaatccccatcctaatacaggaaatatgttttccacttaatgaggccactgtcaaaagctttgctttcctctcttgacatttttcttatttgttatccaagatgctatggaaattaatggcagctcttgatcgtgaatccattccccctatatttaaggaataagcctgcaattcctataatcctcataccaaacaaggatatcttgatattgagctctgctactcctacaaaggttggtgtttgggatcctgacatagctgagattcctcaattattactcatctgcccttctgttctggttgtctgaatgttgagttttgaatatagcctcttaataggataagctgggctggaaagactttagagacatcccaaaatctgtcatcctagctctctgttggcttcaataatcactcatgaatcccaaactcaaatataacaaattgaaagcttatgacactaaaatgaaatctgagtcctgaggtttattaattagggtcatgtacatctgagaacttatgaaaaaagtttttgcaaaattactagtttatgatatgtcaacaaagtatgtttttagagctcgaaaattccacacaactaagcattttaaaaactggaatgcccaagccccactctcagatattctgatttaattagtctgggggtagggctcagacatcagaattcttttccctcaatgttctcgaggtgattctaatgttc

SEQ ID NO: 46630 - DNA, 644 bp, Homo sapiens
ccctaagactctgtgtcaagtttccacaaagtttgccagaggaattagcttcctctttttaataggcagttccaagaggtcagaagataaacaagtttgaaaacaattacattttttttaaatcacttgatccaacataccgcatcttgcattttcagaaaagattggcttctataattttaccacctggtacaacatattgaaatgtactttatttaacacaataaccaccgagttattattatttttcttgcttcctttccttccttccttttgcaatgtgggaactgcctgcccaggggaatatgactcaccctggattgactcagagtatatatgacttcatgaaacaccacagagtgagggcagagagtcactggcccattctccatgatgctggttgccaagaaaccattggccttctaggtaacaagatggtctacctgtcttttggggttgttcatggaagtttacttagtgtctgtgtatctatggctccctgtttgatcaaacaagacacgtgaataagaaagcagtaagccagagaggaacttatttaatcattattcaaagtcaaaataattttatctttaaacaactatacctactttttaaatttagtaaattattacaaattataaata

SEQ ID NO: 46631 - DNA, 803 bp, Homo sapiens
gggcctgatacacatatgcattcagtataatcattccgtgacagaccgcaaacaggcaaagtcctgcccctggagctgggtgacaggctggtagggcagatggacaaccaataaataaagcacaatgccagtgatataaagaaaacaggagaataaggaaacagaaattcagaggtgctatattagatggtgaggaggatgtttgagcagaacggagtgaggaattgagccgtgcccagttaacacttgctaaatgaataaaaggatgaaagtatgtaggtggaagagtgatgtgcacaacctcatattgctcaggcctatactgaacagtgctgctagatgatctctgaagttgcttataatttagaaagtggccttccctcccacccagtaaatgtactttaatcgttgaggtcggtattaatgatttctgggaactcatcacgtcccatgatgtgttggaaaacaccaggcaatgctttatcacagtctgtgcttcttagcaaactatttcctctcagctttcctggaagctggggttttatactatggctatttttagttgttgtcgcagtggctgctgggaccaattgcctaaggagtttgacgagaactttaccctggggagaggcattcctctctgcagtgttgccctgaagagccctgtaattgagatttgaccatttacaacctctgagaactagataccatatcatgaaatgcaagatcaggtagctttgctgtgtgctcagcagtcagcaagaaactgtccaaagttattttgaccagtggatcattcattt

SEQ ID NO: 46632 - DNA, 935 bp, Homo sapiens
agatgtggctggtgtgactgaggagctgcatttctaattttatttcactgtaattcatttaaatttaaacagccacatgcgctaatggctaccattttgaatagtgcagttctagaagaaccaagccagtttatagagagctgctattgtaaatataaaagattactcaccatattctttcctttcttgccaccaaagaagaatataacaaaaatacttcagtagagtgtaaaaaaaaatgcacttgtggttcaacttttaacaaaaggcattcatgccaggtatttcttaccaccttgcatgtttactttgtggttgttatcactgaaacctcagaacattagttgtttcttaaacaatgtactgtcttatttatttaagctgttgccatgttactgttgtccatggtgccctgtgcatggaggctgacagcctctgacaggccctgcccttctgctgacccccaggctcgtgaagggaggcagaagggcactgcttataaagcataaaagtgggacatgccttcgagcccagttttctaacctttgtcctcacaagattgcacaaatcacttggttccatgcctgaaacacatgcttcatgcacagggagagtctgtcatacttttgagggagtgttacccatctaggagcagagctgctgatcagcgcattttcctaggtacgcatcacaattcatgcacaaatagattctcaacacttggggctgagtattggaaggtagctggagaatgggacttcattttggcaacaataaattccattttttctagagttttctaaagaaattcatagaatcatcagaggcttgaatggtaagaggttaaaagatgaagtgacattgcacttaggctgtgtcagtgaatgactggctgaggcatctgtttccctgttttctcattgctgaaaaatggt

SEQ ID NO: 46633 - DNA, 1465 bp, Homo sapiens
acttctgtttggtaactgctctttatgttggaaagtttagttacattattctattaaataaccttccaattaaaagcaggagcacaatcccacatacgcgtctgtcaaagtaagcacccatttctcagctgtaactcattactggttccctgccgcaggcactgtgctgcttttaaccttacttgtaaactattacctaacttccccggtaaaggtgctcgcttatccagtaagacggacagacgtctatggtagatccacgtttcatttatcccaactcactggaactggctgaagcttctccagacttgtgccggaccttggtgcagccaaagttgctttctccgcggccacctaagctgccaggtgcacattaactaagtggcagaaggccatcggcttggcaattgcctgaggcctttccgggactcgctggtttttaggttccatgaagggcatccagatctaggatgatacgaaaagtgcgtggtgggagagtggaatcaacctctactcttaggtccgatacaacccctccaagcacctgtctaaccaatcggaaagaaagttacattcaacgctggttctagcatccaatccaaggacgtgtttcagactctgctgcccggtcccagccagccctgagctggcgccttagacgctcgcctggcagctgcgcacactcggagcgccccgagcggcgcagatagggacgttggggctgtgccccgcggcgcggcgcctgccactgcgcaggcgcctcaggaagagctcggcatcgcccctcttcctccaggtcccccttccccgcaacttcccacgagtgccaggtgccgcgagcgccgagttccgcgcattggaaagaagcgaccgcggcggctggtgagtacgcgcctcgcgcgctcggcgttctggggggcaatgtcaccccctctccagtcccctaggggctttgaaaatagagatggtgagaccagaccctatgacccactctcccccactacacgcacatcccctggggcgcggcggggacgtccacgaagggactcaaagagccagggaggtggcgggccgaggcggaggccaggaagggaagaggaaagaaaaattagcaggtgctggggaaggcaacctgtggtgttaagtgtgaagggagggaagtcagccgaacggtagtggaggaacctaaggtgggtctggggtaaaattgaggggagctggggcggggtcgccaggcttttggttttaaaggagaaccacccatggcatcgacatccgtctgtctgaatattagattagagtttatgttaattatagataatgatatttaagaactaatttcctggaaaacaagccaaccaaacaataaaaggtacatttaagtgcctttttaaagggctggattaaaagcacgtaaggacttaaaaacaatgcttccttttcttgtcacaaccaccctatgaga

SEQ ID NO: 46634 - DNA, 695 bp, Homo sapiens
aggagatatttggcaaactaattggcttgtgatactgatggactagagagttactctttttggaaaactgaatagattatacttttggtcaatctagagggttctgaacctaacatgcacattgaatcaaatcacttgaataggaacagtggcctattgtgcaaaataggactcccagagtactgtagccaaatgaggacacaagaagctttttaagtttgatatgactcatcaatcaaattagttctggctctagttgaggagtgtctatggatctataaaataggaggcaggtgagtaagaattataaaactgtgagaattaggtctcctagagggtgaaggtagtttgccaattatgtgggtacatcaaacctgctgggccctgcaatgtaagaaacaaagagcctctttgctgctggggaggaaaggctacttccaggcaagtcactctgtggacatgagatgccagtctctgaaaatgattaactgctctgggtctctcctgcatcacccaggagagagagggttttgaaagcacggctaaggaacacagccacatcagctcagtggcaatgaacgtcaacagtcctaggaatagaacacaaaattatatgctccagataaatgaattgggaaggtttttaaaatatattttctctgtaactcattttagcccgggcaatttcatgtaat

SEQ ID NO: 46635 - DNA, 1700 bp, Homo sapiens
aacagaccctctggggttgaccatggccaagcccatctttagttttagggagtagatatagaggaggaacgccagcaagggcttgaaagttctatcataggggcagcaagtcaagggatttataagtcttggtatggaaaaagaaagaaatcttattgaaaacagaagagtcgacttcaaatgtttaaatatctgaagcactgccatgtagaagatgaattagccttactgaagctgttaaatatttcttggatgtctgctgcttgcaaaatgctcatttactcattttacaaatattgattgtccacatattctgtaccagatactgtcctagatactgcagtaaggtcactgccctctggaacctaacacttaatggaggatggggaagaccatccataacaaggaagcacagaaaataatgtctggtgggggaaggatggaactgtacctggtgtttatcctcacatatttgcattaaaacctagtgggatatacttattatttgttgtgccatgagttaaagatagataataattcaattaaaggaagaactttctcccaacagaatatgggctctgtcaaaaagtagtgaattctgtcactggaaatgtttaaaaacaaatcctccttggccatcttttaggacagttgtagaaaattgatgaattggagctagaactagatcaatggttaaagagctttggaattcatagaccaatataaatttttaaagtggtaggtgccaacataagcttgccaaatttttataggtctagtatattaaaggaaaactgaaacttttcaaaaatataaaggccatttttaagggatctataataaaggaatgacatcagaataaaatgttccttgggttaagtgaatttggttatataaaatttcctaatattggccttacttttaaaatttcgcaacagaccatcaaaaacttcattactggccagaaacagtccataggctagaatttcaagacagaaccacttgacctttaagggctccctaatatgttttaaatgtttatgtattattaaagtttaggatacttttgtgtgtagttttggggttggtgtctatgcatttaaagctgaggctaaaactaactatgggcaaattatgtaacttccatgaaccttggtttttgttcctgtgatgtggggatgataatattattgatccatggtgttgcaagagttcactgagataatacaattgaagcacttgatgcagtgagtagtttgtagtaagtgttcaataaaaatgatagccacccccaccctttgtcagatcttctgtcccaggggaaacggtgggatgaggggcatttctaatggataatgatgtcagtacataccattttctaaatactctattttccaacagcagaatagattatttggcttgtaatacttgtaccctgccccctattaccagagaaataaacaagagtcacaactagttaccaaaaggatggttttctctctgctcctgtttcatttgttttcctaggctcctacttctgttgcctgccttctctggcactcacccacctctttgtagaagggccaaccacctattactttttctcttaactcttggaactcttccattttctcctccacctgaagcttgcttgtcagtgtaccaagggtgttgcttctcctgacctcctccgggccctg

SEQ ID NO: 46636 - DNA, 1205 bp, Homo sapiens
ggattaatgcagattgtttgatgtatattaaaacagttggtaaaagttaaaaaaaaaaacaaataatgtttccattgtgtcaacaaatagatacttgtagatagctgcagattgtctatactattacatgtttaaaataactctctcagagtgccagaaatgttatcaatgtctcatgcttaaaaaatggtaaattctaataaacaaaagactgatataaccaggcagtttgaagcataaacaaaatcttctgtctcaattataaagtacaaagtatcaggtttgcaatatgggtttttctgttgtaacagaatttcgtaactaaagattgggttctagccatctcaaggctcaactcaggtagtcgtattcactacccagctgacacggttggtggcagaatttagtttttcacaggctactggattgaagacttttgatttttactggggttggccagggcctccctctattttttgccttgtaggcctctctataatgacagctttcatcatcaaagagtgcaaactaggaaggcaattgagtctgctatcaagatgaaagcctaatcacagaagtaacatcagatcacttgtgccatattgtgttcattagaggtgagtcactaggttttgttgacactcaaaaggaagtgattacacaagggaatcgttgcaagatcattgcaggttatcttagaaatctgactaccatatgtctatcgatgaggaaacttattaaataaatgtagccatatccatgcatcttcaaagaattaggagttctatatggtactaatatgtaaagagtaaatccctactgacataggaacagtgtgaataatatgacacattttgcttataaggcggaaaataaaaatctataattctatttgcttgtatacagttaaagaaactatgaaacaatatataagaaatgaattacagttgccaaggttgggagtgaggagtgagaactgggtggaagggaaaaagaggttgaagggactttccccgtagtttttatatttacaattttttgaaccgtataaatgcatgatctattcaaagattaaataaaaataatgggaagatgtttttgtggtcaccaaagttgtctcttctcagtcttctagaggagcatgagaagctgagagtgttagctaatgatggagttttagaagttttttcttgaaggttcaatac

SEQ ID NO: 46637 - DNA, 621 bp, Homo sapiens
agacaaaggagtatttctttaggagatataatgtttcatctatcagactagcaaaaattgcaaagaattatggtattcagtatggcccaggatttgagaagttaggcaattgcatacagtcaatggaaaataaaaattgcatattcatacttctttttccaaaagtaacacattcatataaacaatttaagtgtgcatgtcctttgactcagcaattctactcctaggaatttattctgagtaaacaatcagataattgcaaaatgtacaaccacacaatcaatacatgcacacaaacacgcaagaatgttcactgaagcactggctgaaagaaaaaagtttggcagcaacctataaacccaactattgagatttaagtaaactattgtatcctcctatgacaaaatatagccataaaaggaagattcaaagtatttcatggtacaggaaagtcattcacattatatgttaaaatcaaaagcacataaaagagtattatactattattccattgttgttcattaaatagttgtaaatacataggaaaatgaccaaaataatataaatacactaaatttttacagtacagctggtgtgatattctgggttatttttattttc

SEQ ID NO: 46638 - DNA, 1879 bp, Homo sapiens
ggattacactttatctttcccaattactgaaaacatttacttaacacatacacatttggaacttaacttcgatgaagtaaaaatacgaaaagttaatctctacttccaaaaatgtcgatgcacgctgcaattgtatttcatttctttcgcaaaattttgcacaggatattgttgttaattgttagtagaggaattcagaaatgactagatcctttagttgaggcaagcaggtatgttccccgtgttctagccctgcacttaagagtcaatgaaagaaagtttaaaaaagaaagcattgtctcctctggagaccccgtctgccacgaccacataccttgattcttgctttctctataaattctagaggggctttcccaaactcaaatccaactccaatccaaggaatccagcccttgatgcacgggggtctacgcaaattcttccgctgaaggagtaagaacagagcaaggcaacccaggattataatcactgttggggaaattagttccatgtttttgtccagcaccttccagaagcagaaaagtgtgaaacagtcctgccgtcccttgcttcttttctgtgggctacggaacctgtcgggactcccaacctttctgctgcaacttttgcagctctccttcgtaactgtagcttccttcctctgtcccagttttcaggtgatttttccattgtcgctccctcccacctccacttctctttgaatctcagccagcgcggaaaaaatgcaaggaggggcagggccgggctaggactgacgggcgagaaccagccgcgttgccatggaggccgggggcggagccgcagagggacccgcggccggccaatcagagacgtagcggagcccggcggactacattgcccagtaacctcctgggctccgctgtgtttttctattctggggtgtaaggggcagctggaccactccagctgggactgctaggaaggttgcgggtccacccggccgagccgaacgagggaaatggtcctcacccggccactcgccggttgaaaaggggccgccctggcagggaagcggccgccgcggcgcggtgcagcgcagcggcgagaaggagtgcgttatcgtcttgcgctactgctgaatgtccgtcccggaggaggaggagaggcttttgccgctgacccagagatggccccgagcgagcaaattcctactgtccggctgcgcggctaccgtggccgagctaggtacccggctgcccacgcctgggcctcccgggccagtggcacgcgccgcgctgggggagggtgcgcgggcggcttcgcgcccggcagtgcgcatcggagaggtcgccccttccatgcccgcctggcagaggtggcggtggaggccaggcccgcggtgggaggaggagggattgaggtctccacggccttttccttctaatctcttctaatgcttcccttaggcatgtgctgtggtgcttgaatgttgtactttaagaagcttcgcgagctgtcattcctctgtaggaatcattttccttttcatgaggatgacctttttaaaaacgtaatctgttttccatccttactgagatcatctctgtggtttatagtcttacacagccacactgtcattatcttgtgggtccaagttgtggacctaccttgtgggacttccgttattaacctgccactcacagagcatcgactacttgacctctttgagtgtaattcatctatactgtttaccttgcaggattctgagaagtcaataatatatgattgctaaacccaaggcaggacacccattagttgcgacatttttataattcctacaataccagggactgtggatatatatttgaaaagacccagttctgaccttcttacaggc

SEQ ID NO: 46639 - DNA, 984 bp, Homo sapiens
caccacccactgaaccagaggccagatagcactcttctttgcctcccagtccaatccagaaaagttttggagcatattcacccagagatgaaataataactcagacttcatgtacctatctctcagtagtaattgtgttataactgtgtgtgtgtgtagaaggaagaaggaaatggagtaataggtcaaaggactgaatctctgattgcactactcaggggactattagactttgtctatatttgcctgtaagcctcaatttcttaccttcctgtacatatactgggctttgatgaaaatgttgtaaggaagcagaaaacatttctatttccaagtcttatagaatacaatacttaatgcttttaaaatggttttaggccaaatgaggttccctttatcggagtgagggacatttgccagggtcaagtgcagacttgctcagctctggtttgagcacgggttgctcaacacatatttgctcatctcctatctgtgttttcatcaggtacaattccgtatatctaaattgcctgcaaccacgggagaactgttctcaaaagagacatcaaatccaataagattatcaacataggcagtattttttatcagggtaatttgtgagttttattgatttaactttggtcaataacaagctttctgtttaacttaagaagacactgtactggcaatgtaattctctcccaatgtccatctccatttcttgaatcagaattgtgtttttgaaatttctttccttatgctagggaaaaaactcaacttttgaggtctagcaggggttgacaaactatagtccatgggccatatctacttgcttttgtaaataaagctttatggaaacacaatcataaccatttgtttaagtattgtatatggctgttttcgtgctacaatggcagagttgagtagttacaacagagaacatattttctatctactctagaacaggtttgctgactgatccct

SEQ ID NO: 46640 - DNA, 983 bp, Homo sapiens
ccaacatggcgaaaccctgtctctactaaaaaatacaaaaattagcagggcgtgttggcaggtgcctgtaatcccagctactcaggaggctgaggaaggagaattgcttgaacctgagaggcagaggttgctgtgagccaagattgcgccattgcattccagcctgagtgacaacagcaaaactctgttgcctgcttaactgactcattgcagaggaatatttgaaagtgtaacacacaagcaaaattattaacgccacagccctggccagcatagctaaagtacataatagttcaacttgtgaaattctcctaccttcatatcttggcagggtaagccctgcttttttttattttcttttattttttaagccataaccagacgttggtaacccttttgacccaaggtcagctctcttttggtatttctatattgaggccaagaaaattctcctttggcactgatctgtccttatacaaggaaggaactggcaaataatcgggcagtttcatagtatacaaatggtcttattcttatcttgggtgtgtatattttggcagagcctccactaatggaattggtcatatctgtgcttagctgcagccactcagattttgtttgcacttactgctactgcacccattccaccaatagacagtgttattacaccttctttgtgtatgcttctctcagacattgatgttgttttgccctggaagattgcaaagcttccattttttgagccaactggacacagttgacagctcccttccagcacttgttatgactccagtgatgccccagcttctgccagaaatccaagtcaccctccaagtaggacccttttctggattctactcttagcactaccccctctgccatctcctagaagagggagagacagcatctcgggtgagggggggggcagtgcagatttgaggtatggttcgttgaggtgtcatccacacttctttcttgaccct

SEQ ID NO: 46641 - DNA, 889 bp, Homo sapiens
tttccccttcactccgtctgtgtttaaaataagagttatacagcaccaagaagcccacctctccaagctcaaaagatcctcgtgaggccataggaaaggtacagctgcaggcaccagaacacaccccctgcaatcacaggaggtgcaggaattctacagggtcgggacagcctcaatagagaatctgctatatcttacaagaatcctcctttttaccatgcagattctagagttccagaccctttacagtaagatgcatttctccaccagcctatagcatcagagaaaaataacacaagcaaggcttctggagaacactcatgagtctgctggattagaggctcacacccaacagactcagagtgcaaagggtccttcctgtggatgagaagctcttctagaacaaaattaagctgcttccgtccctgggcacttttgctctggtgtcatggccgtgctcaacttcctcatgaggacaaacatctgaagatgtgacctgagattaggacattctttttcacttacgtattgtttcagcaaaccccacattgactccagcacttccaaatgtcctttaggcaaagagagacatctagtggccaagattcacaacgttgtagcggccacctgtttacaaaatcactatgcggtacaatcacttaatttaccatgaaggtgactgagggacttaatggaggaggcaggagaaggagcagtccaaaccaggtaacctctgtgacctgagttgccttgtccagtttttcaggacatagattctgcttggagcagagttcattcattcatctatttattcatttgacaagcatttatactgtctactaggtacaagacactgtgttaagcctcaggacttcaaaatctataaata

SEQ ID NO: 46642 - DNA, 836 bp, Homo sapiens
cttagtatcaagtaatttaagattttctgttgtatctcgacccaagaagaatcaatcttcttgactcttctccccctgactacacacattcaaattttgtaaagtatgattccctctttcattgacagaaacacaaccaatatccacagtttttgcttagatgacctacaaacatgtaaagctgtgaaaatcctaggaaatgactccaatgcaaataaatgccagctccagaactctacctgcattcctgagccaggatggaactgtcctgagccagatgagaccaacttgcagaattccacatcctgagacttcctttcctttctgtttcacacacatattttctaatgttagtgtgtataacctgctgacctttgcccccactggaatttctgagcaagctacacatgctcagcagggttagggaagtaatttgagtttcaaccacagcgtttttaatttttttactttaatctttatccttcaaacatgatgccttagatacattctaccccccaaaatctcaaaatattagtggtagaatggtgaccccttctctccctttttctttttttttttctctcttccaatttgctgattttcctacattttcttcaatgaattatgaggtgagggagattttctttaattgcttgaggaaaaattatactcttcttcctcttaaaatatcaaggagcttgcgcaaagctcttaactggtttgttcttagctgagtatcaaaggcaaggtcagaagaatatgacacttttatgtatagtagcaattttttaagataggctttctttctaagcagcttaggtccttcaggttcatat

SEQ ID NO: 46643 - DNA, 1508 bp, Homo sapiens
ccaatatttcttctgtttctttctctctttcttcttctgctgttcctattctgcgtggtatacctttttagttgtctcacagttggtgggtattgtattctgggtttgtttgtttttttttcagtatttttctttgcttttcagttttggaagtttctattgaaaaaatcctcaagttcagagattctttctcagcctcattcagtctactagtaagcctatcaaaagcaatccgtatttctgttatggtgttttgatctctagtacttcttttaaattttttcttaggagtttcatctctctgcttgcattgcctaaccatttttgcatcctatctactttattcattagattcctgacattttaatcatagttattttaaattttcagtctgataatttcaacacccctggtgtatctaagtctggttctgatgcttgctgtcttttcaaactgtggttgtttgcctttccgtataccttgtaaatttttgatagtcagtcatgaggtacggggaaaaaagaacgggcgcaaatgggcccttagtaatgtggtggtaagcgtggaggaaggagaaacattctatagccttacaattaggtcatagtcttttaataaccctgtgcctctagactatgaactttacaaatgcttgtcggtgttccccactctcaggtgggacagggtggctagaaaaggctagaggtaggtagttcccttcccccgggtcagtcaggctctggtaaaattccagcaggttaggctctggttaaatagtttccctgaggacaggccttgttaagaacaaaatgctctggcatctttccaaacggctgtttttcccctccccctgccagaagcatgagggaatttttctccaatactcactgtgagaatctggttacattactagaggtaaaactgagaaaagtgtacaccccaccccaatcatggctggatccccctgagggttttaactcatcaggttgtccacattgagcctccagctttggtccatcacagttttgtctttctaccccagcactgattcccacggaagtctctgctcctgggtttctgctctagtaagttgtgattctctgtatttgcctgtctgtccctccaactgggggacagcagtttgccctgtgacctcacttctgttattgatttttcagtctgttcagcattttacttgttaagacagagtggtgacttccaagctccttatgtgctggaccagaaactggaagtctgccctagcatttttgaaacccccttcatcactttgaattttatccagcctgcttcacactggtcacaaactcctgggtcactgctttttcaccattttaatccaatatacactcaaggtgcatttagaaagaaggaaagtaaaagccagtatgcatagcattctgtgaggcctctgtgttttaattctccctttaattataaccttaagttatagctctccagctcatttcatttagcagaagcttgatgac

SEQ ID NO: 46644 - DNA, 1777 bp, Homo sapiens
acaataaaacgggaagtcagaggaagagaaaagaaaagggaaagagaagaggaagtgacatttgtgttcagatctatagaaaagctgctacaaccaagatcagttcctaaaaacctagagaaatgtgtgaagtttgaccccacttgcacattccttccccacttgtgtcggtggcacaccaacactccaccccagcccactccattttcacatcctctacttttctaaaattgggaagctttgaagccagattccttctcccatcccctcccttgccttttcttcagtgtactttcactcccagcccttttccctttacggtcagataatctattctcaggaaatgactcacaccaaggtataaattaccagtattgacacagcatgttacacttaagcagactgttcgctttacaagataagtggcctttatccaaagaaatgacgttggatctcagactgcagggtgcttgtaggagtgggaagcaagcgttgctaggaggaatagaaattttcatcttttctggatgtggggtctactctcccttcttcatgtgtctattttgggtcttccctccactaaagctaagctctctgatggcagttttgtccatctggttagaacagtgcctgggcaatagtagatactcaaaaagtattaatacttgttattttagtgaatgtttagtaaatggcttttagtgaatgttgtctgtttctagtgccctgcagcacagatctgataaactgagggagagaagggtaagtaagaaagcctgaaatttaaaaataaatataattttattttaaatgatgtacatgttattgttgaaaaaacttaaatacagagaagcaaaaataataaagtaaaaggtattcataattctctctccaggatcaatacctgttaagatagtgatgtaaacccatccagatttttacccatatctacgtataacaaaaaagcacactgtatttaacattctaaacttgttttttaaaatacaataaatcaagatcatcttgccatgtaataacatattttgtgtccttttaaatgactgcctaataataatctaggctgctagatataccagcagaccctattctaccaattctctactgctggaatcaggttgtttccaacttttcactagtacttgtaaaaacacagcaaagaatgtctttatcacaaaatctttgtgcttatttcctcttacaagtgaaaatattgtcatcattactcttaaaacattgacaatatttatcaaatacaccctctgtgccaggtactttacaaaacattatttaatcctcccccaaaccctactatttacagatgaggaaactgactttggagatgctgagtcatttgtctgaggttaccattagtcatgcctttaatgtttttgatacctattggcaaattgccttctggaaacagggtttggaatgctgtagggaatactagaaacctgttgtttcagataaatcctccatgaaggaaagattacacaatctcctttagtgagctattcccgttttatcggcctgtcaacattgttttctccattatgtttacccaaaacctttgtgataatataattacctatactaccgggcagtgaggtatctttttgattcacaatctcatcagactgtattccagagaagcagaacattctggggctcagagtcctaaaacatgggtttcaacctgattttatctttcctggagtgaggtcctgagacacatcagtttacttacctaagactt

SEQ ID NO: 46645 - DNA, 911 bp, Homo sapiens
taggagatggtgttgccggtcagcccatcagggtctgtgggctgtagggacttgttaaagaaccacaagacaccaccttttttcacagctgataaagcttcctcccttctattcactgctccccttcaactattaccctcacctgccagggccccagacaagttcaagttttccctaaagcatccaactcaagacaaatgacccactttactgtgccctgagagagcctggaattggggaattacagtgcaggtcacactgccattttgtaatttgctctagacatgtgtcaaatttcaacttgctgccaagacagagcccagatctgagggtatgctggcaaaactaaccacacaaactttactttggatccaaatcctcaagcagaattatgctgacctttgaatgttcaaacagtgttaagtttagagagtcggtagaggaaagcgttaggttaagcaggaaccaaaagccatcaatcactttggtcaaccacgatgaaaaaaagaggaaaaaattcgattatacccatgggaattgtcctcacttctctagtcactgcagagtcaggccagcatgtgaaatctcagtcccctctttatttatttgctaacaaaaggaagagtgagaagaaaaatatatttgcttttcactaagcaaacatcacaggtgggtgttggttgtttctctttcttttcttggagaacagttttttgggattttttttttttctttttgaacagatgctggttacgagaaacagcctggattctaaatgagtatttttctataacaaggctggtataacaatgcactatttgtgaattatactgctatgattacctgaagaatggaagtggggatttaggctgatgttaaaaagcaagctgaattatttagtggacttaatc

SEQ ID NO: 46646 - DNA, 502 bp, Homo sapiens
ggagaggatgtgtgtatatttgaataaaatactgttgagaattgaaacttccacatttagtagtatttcaaccaagtgtttaaccctaatgttttatttggtcttatttgatattcctctcaactgccccttttcaactcctttctttcccttcactgaacctaggcttagaagttagagaaaagtctgagaatctattgaatggcagagatcaacatacagtaaccagcagcacccaggatgttggttgttctatcagcctgattccctaagccaaggccctctgttgactcatagttggcatacagtttgaggaaggaaaaagcctttgtggtggcaactcactgagagtttatagttgcttgttattgcagaataaatctagagcatagggcccagctctcactaggagctcaataaatgttttattttgttctcttgaatcaggctcacagaattggaacattcataatccttggttcatgaaacagcatcaaagtaa

SEQ ID NO: 46647 - DNA, 1761 bp, Homo sapiens
gaagttcagtaataagtcctggatagctcacagaataaaatatagtattgaacactcagaaggatgggaagggaacagctttgggaatcttggtaactgggactaatccataggccctgctggtcactaccattggaatgacacaaagccacaaagatcattcattctaagcagatcacatggaatagggaaagaagagtttccccaagaaaagtgggactcttttcaaaagatagagggaggaatactcagtgcactagtgtgcgtgagtgtgcacgtatgtgtgttgtgaatgaagagaggaaaaatccattgactgaaactctttatgttgcaggccaaaaggaatcacaggagcagaatttgcatctaaatgaaggcaacaaggagaccatagaaaggtgttacttcccagactttaccagctactagctgtcatgaaacatctaaaaaactgttttgaaagttaggaagttttgtcatttggagagtgctagatgtcctggagaatgggagatgaggttacataaaactgaaatgtgcctagaatactgactacaatcagcttgaaatttccccaaggaagcccatgagctgtaagcgtctacagatctggtactgacatgcacaatttggccatgcccagcctggcaggcatcagggcagcctcagaacctactccctagtaccctctgatgactacctccagcaaaatgcacttgactcaccgtcttctgcactggggagctcaaattatctctgtgggggaggtggaggccttgccagactatccacattgcttaacttcttagtcagtgctggagaggttttatgttacaaagggtaatgaaacttagcctgagggcccagaatggtactacagtgtacattttgtcattgggtagcttctttagctttgtataatcagaattttcccctttcctttatgtaactgtttaaagcagaaatcagagtccctggctcctaagttaatggcaaggaggggaaatggaggcagtgaggaacactacctgtggcagtagtcattgtcgtcacttcctgcccctgtcaccaacatttctgcaagtggcacaaccatctgtccattcaagactggctatatcatttgtacaaaccagcgcaacatgaaaatgtggcacttcttattcaaaacttatcatgaatttcaagactgcaacagcagagcgtaaaaccaactgtggaccaccctgagttcaagacctaagtaaatgcttaggttgcattcccatgaagccagccctgtggccattactcccagcccactcttaaatttccagcatttaaactatttatggagcctaagagttattcttttctctcttcccgatctctcccagggctgtgtctattcacaagtttcatatggaggtatcaaagtaaagagaatgtagtagagagaagaaaatacttctgttagtcagggttctccagagaaacagaaccaacaggatgtacatgtataaagagttatactataagtcattggttcatatgggtatggagactgagaactcccacaatctacagtcaacaagttgtaaacccaggagagccaatggtattattttggctcaagtctaaaggcttgagaaccaagagagctagtggtacaaattccagtccaagtcctagtccaataactgtgtctagactgaaggcaagagaagatcaatgtcccagctcaaagacaggcaaggagagcaaagtcttccttactcc

SEQ ID NO: 46648 - DNA, 1982 bp, Homo sapiens
ctcaccatttattaaaaagagtcacgtatgaagagttgccagacacaaaacacaaggtgctcggttaaatttcaatttcacataagtgacaaatttgcttaagtatttcctatgcgatatttgggccatacttaaacaaatgtatttgtttgacaagaagttgaaatttgactgggtgtccttattttatctggtgtattttacctggtattttatctggtgactctatcatgtaattggttttatgacagagatttaaagtagaaacgcagaagtgagagccctggaaacaaaatcaaggtatgagaaatggcaaacaggtatgagaaacggcaaacagatgggatgccaagctaactcagaagaaaaggagattgtacctagttgtgtagttaggaagggctacaaggtagtatttgagcttgaccttaaatgtgaatagggtttgttcgtatgtgaaagggcagagatgacgttccaggccaagagaacaatgtgagcaagcgtgtggaggtggggaaagcaaagttataactcaataatgaattgagattgtttagaacctgagtttttctgagtccagagtccataactattacatctcatgagttagagaagaatgaggtcttcagaaggtaaacaccagcaatagcagttgattggaaacagattgtgcagggactagaataccaggctgaagcctataggcttagttaaaaataactcagtatgagggaacacataacatttcgagatcattttatgtccaagtcatagctaacagagagactccagcagcctttggaagtgagaatgaagagagcagccagaaccccaaagcaggtcagttagccagatgctgcccccaccacccctgggcccacatctgcgaggatgtcccacagtgtagcttggtgtagtggaaccaagaaggcctatggcattttattggccaaagatgcatttggcttcagctagatgtctgtatccaaggaacaatatccaccttatacttgtttttactaaaaaaaaaaaaaaaaagaaagaaagaaaaaagaaagaaaaaaagaaaaaaaaagtgcaaagtgcatctcccttgtaagtcagagaaaaaaaaggaaaaccctttaacaaacttactcatgattgtgctgacccttaaaaatgctttcctgatgagtaattgggtagagagaatagtcattctagccttatcttggttgcaaaaatgtgtcctttcacccagttgttttacctgcagagggtggagtgtgagcagactttggagtaagggcgggaggggttggggcaggtaaagtggacaaacatgtgttgtctgcttgttaccagtgactcatttgagagcacctggtttcttggggctacactttcatgtagtttctcatcctgaagagcaacttgccacataggcattcacccagttactcatccagctgaagctctggagacaggcaaagaattaaccaattaataaccatacccaagatctcaatattgaagagctttgtgaattatgtgcattgggggcaggagagtcctttaggaaaatcagctcctcacaggcaatatgttgactgaaacctttcccagccagaaaaagaacagcagtggccaccaacataaccaaaagcagctgttatttgcaaagatatgccgaatgttcaaaggtacgtattatccagtgtccgcttaggccaagaactacaagatcaacaaaattgatagaccgctagcaagactaataaagaagaaaagagagaagaatcaaatagatgcaataaaaaatcataaaggggatatcaccaccgatcccacagatatacaaactaccatcagagaatactacaaaaacctctacgcaaataaacgggaaaatctagaagaaatggatagattcctggacacatacaccctcccaagactaaaccaggaagaagttgaatctctgaatagaccaataa

SEQ ID NO: 46649 - DNA, 2031 bp, Homo sapiens
agggaatttgggggaagttgagggtaagtttttggtcaagatgattgacccgagatgtggatgcagcttagacgatgagggagactgcaccaccctgcagggtcacctgcctagccacaggtaaacgagggatcggaaagactgtagaaaattcatcttccttcacacacatctccttccccctccccccattccagtgccggcgcgctggctggctggaagccggcgctttggaggcgccggagagtgggtctaagggtgatatttcggcatacagaacctgagaccccacccgagccaagagggaagagagagggtaaagggattgaggagggggcggcttgcgccctgctcgggaatgcaccgcgcgacagcacccggaggtctccggtgtccggcgcgcaccggtaccactgtcttccactgcggtagcatcccgacatgacattgcagctgcaacaaagcgccggcctcggccggccgtgggagccccacaccgcggcgaggccccacaccacgcagaggggcagtggccgatgggtggggggctgtggctgcgggcgtggggagcgcgaggtaggccgagtagggggaaaagccctcaaatgcgcagaagctgggcggctacctctagcgtctcctccagcaaagccagactgcaaggaaaacaattcgtcttcattccccagccccggctgagccctgagattcccccaaataacctagtcgaggccctctggtgtgttgccttcccttggaaacccctcagtgcccgtaacccagtcggccgggccccgcgcctccctaagccccggcccggtgacccgcccggctcccggagagcggttccttctgctccggcgccgccgccacccccggtccacgcaagcgctcaccaggagaagggagcccgcgatcatcgtggctgtggctcggcgggcgatgcggctgcaggaggcgagggcggtgctgctgctcggagaggtccccatggctgaaccggggactcgcaggggcgcccggggcgcgcggggcagctggaatcggcggctgcttctgcccagcgccgcatccaccgccgcctcccgggccgggagcccatctacctccaacaccccatgtgcactgctgcggccgggcagaggagggaggcggcaagggaggctctaggggcgctcagcacctgcccagcggcgcggccgcccaggcggggagaagccgccgcgactgcagcccgcgtctccgggtgctctcctccgacagcggctgaggagaaccagggaggaggactgggcgcgagagagcaaaggaacgacttcccatagcgaagcttccagccactgccaaccaccctcctccgctgcccagactggtcggcgagggactgagtcggtggccaccgggcgcagggacacacgtggtggcgccgaaggggcgggggaccggccctttgtgatgtcacccgggaggaggccgggctctttgtgcggttggaaaggcgaaggcgttccaggtagagcggggagggagagggtgccccttggcgttcgctgaggaaattgcacgcgcctgttgacccagggaaagcgctgagaaagcatctcactcctgatctaactttacttattttttccgagataattccaactaaattatttcagctacatacgcctttccattgtttcggacacgatgattaaatcagagagcgatggtgaatagaccacagagcacttagatcaactgcgtgacgaaaaaggagacctgtgtgttgcttctcaaactttgctgccctgtggaatcacctggagagttcaaaacatatatattgattcttgggtcccacctctagagactctgatttaattggaacaggacaggatctggtctgggcattgaggtttgttgttgttgttgtttgtttgttttttaagttttcagggtgattttaatatggggcaaagattttaattttttatattttaattttaatatgggcttatgaatgcaattaaggaaatccaaactaaa

SEQ ID NO: 46650 - DNA, 1861 bp, Homo sapiens
tctgagaacaatctatttttaagtctgtgtgctacttgctgaacaactaactgggacatttcacttttttcacattggggaaaaaaagctggcttttatatttttaatatttaatctatgttttgatgcagttcactttgcttttatatactatactgctaggcacattattactattttgttctcctattatatattagaaatgctgccttcttgaaactcttaggaaatgttaatggctaaaataatgcaaattttttttaaaacattctagcagaggtctttaaaaatgcatcatattatttcctgctctcttatacaaatattctgtatctgtttaatccactcttatgaatgactgtaatacaatgatactctcaagggttggtggaggaggtattgaagtttattgatcacgaagaggataaatatgatgacattaatttgttctccaacataccaggcatagttctatatcgcgacctttacactggctctcctctctatttgcgaacctctatttgcgaggctcttacatcagctgtccacgtgactcactccctgatgtccttcaaacctttgcagcctgcctcctccccactaccacacacacacacacaaacacacgtatgcacatacacacacacgtccactcactaacactccaactcctcttattctgctctactcgacattttatttttatatcatatatcaagtaaattagcatactaatttacttacgcattattgtatattgtgtgtttaccttactttctgccataagcttcatgaggggaggacatctaggttggctgtgtccaccaatgtattcccagcacttagatcagagcctgaaaaataggaagagcttaaaaaatacttgttggattgaatgaatgaatgacagcttccctacaacatacaagagtaagcttttctggttaaatagcaggtataaacttttactttaggatcatagaattgggtctatatcatgtaagtaatgaagaactaaagaaggtcattaaacttgatgagggctatgaattgtaaggattaatctataatctatgggcagtatagggaataaatttgaaggggtcacagaggggccattagctttgatattacctgcaaatacccccagattaatcttccttaagcacagatataagaaagtggtattgatttaaaatgtgaaggaaaagatgagagtagagagtaggagagataagaaccttggaaaatgcctgcctttaaggggctggaggactaggagttagcagaacagtattgagaaagaactaaaatgtgggataaaaaacaagttcatggattctaagggtggaaagtgttttcaagaaagaaggggtggccaacacatggaattcaaactcttcaggaatgtggaggagtgttatttacaggttggtaggagacagtgacaaagctggaaagaaggtgatctaacatcctggactttaaggaaagaatgatgatagaataacaagatagatgtcagtgcagcaataatctggaaatagcactgaagaataacaaaaataagaacttattttctagattcagaggtttagggaaaaagaataaagaagcaatcactacttgagagcatcgtaagatagaagaaatcaggttttaaatgatacaaagaaatagaaggaagaggagcaatagagacagatcgggtcaaagtgtaaagaaatttcttgacaatagtatgacagtggcagagattacagtgcaaatgggtggtattccctcagtgaattatcttttagtcaaatcaacctaacttaaccttactgtatgacattagttaatatatgccagcagagaa

SEQ ID NO: 46651 - DNA, 2320 bp, Homo sapiens
tttgattgagggatagctctgatttgttactaaaattgctatcagtagttaaaataatgtacatgtatgtatatatgagtaatatgtataggtaataatgtacatgtatctatacataggtaacatacatatataacagtaatatgtgtttgtaatggtaacgtatataagtaataatgtatatgtaatagtaatatgtatatgtgtgcatatgtaatagtatgattatgcagcaaccatcatcaatgaccaatctatttaaactccacactataactttctgcacgtgtgatgtctcttaaggtcaatgaccctctaaatgtaaaaatagcatgtgtgaggccccacctatggttgttcagagctccaggaaacaggtggcatgtgagtgaaatcaagatatttaaggtaccagttgtcctccataaagtgaacatttttagttttctgacttgaagatgtggatattttcaaccttttaattctaggctgccttactctcgtctccatggtgcagcacacaccccgtgaataagccctgtttcatccaagaaaaacaacctttgaccatccacctcctcatatctcacctggggaaaaccagttggcctatctttgactgacttcaacacatcaaaatgtgcacaatggtcattttactgaaagtcctaaaatgttcattaaaaaaccaattcaaacttaataatactaccctaactgaggtagactcttaaaaccagtttctggtcaatgagatacctgtgtcaaatggttgtgtaatcaaattctttccatatcctgcaaacatagcttgatgagtttaattaacgatcattttgaattcttttatgcagacaggttttttttcctaaagcatttatgatgccaggatttttattttattttattttattttagacagggtcttgctctattgtgcaaacagtggcgtgatcacagctccttgaggcctcaaccttccaggctcgagtgatcctcctgcctcagcctcccaagtagctgggcctacaggcatgcaccaccatgcctggctaattttttctattttttttgcagagactgggttttgtcgtgttgcctaggctgatctcaaactcctgggctcaagctatccacccacttcggcctccaaaggtgctgggcttacagtcatgagccaccgcacctggcccaatgccaggattttaaacagaaattttcccttccaggcagctttgacaaatcatacatttttttttccttctaagatgagcttatgttggctgtgatctcaatcgcactgatacagtgctcctttttaaggacacagattaattggaggtggggaaaagtgttggtgtttaaaggaaaaacattttctttttatataattattgagtaatttggaaggcattgtagaaatcatccatgtctttgtaaaatccgggggctagattgaatttcctttctgtttcctccagctttagtgttctatgaatctatcatccactcaactttgaactcctgctgaacagtcaccaggtcttactcgtcttcatacttccaaaggcccttacaaggcctggcacgcagtagggcctcattacttgtttgttaatgaatgtataaatcatcccatatgctttgtatgcttcatttcaattctttctgagtatagcaagaatcatatgttgccattcatggctcacaattctgttcttcagcatcacaaaatcatactggtaaaattttcctatttcatgttttatgctgtagctatagggtacaaacgcatactatttatcatgctgatgattttgttgaggtggatccgtttagtcattcatttaataaatatttacagaacacctactgggtagttgtattgcaatgctgaactggacaaagttccctataacaaggaacttgtctaataaagaagacagacaagtaaacataaaatagtatgagtgttataaaggataagtacgacaagctgtgggaacagaagagtagctcacctggtctgaggaattcaggaaatgtttcccaaaggaagtagtagattcaaaccttaaggttaagagtgaggtgggtgaaactgggcagagggccagacagcgtaaagggcagtgagaatttcagatcccagagtggatgtttatttagaaggcaataaaggacctgtgggagaggccaagcgggggacgaaatttgtgttttagaaagacctttctaactgcagttagaaagtagaaaggggcaggaccagaggccaggagaagtctaagaagacgtttagagtggcagtgaagataaa

SEQ ID NO: 46652 - DNA, 1744 bp, Homo sapiens
gttcacaaattaacaacaacaagaaggagagagaatgcagatgacaaaattgccttgtgggagacccagacagatacaattagcaacagttgggagggaaggttgtaagtgaaaggggcttgaaagagagagagagagtttgtgtgtgtgtgttgtctgtgtgtgtgtgttgtctgtgtgtgtgttgtgtctatccatctgtgtaagaaagacattatctttagaggcttttgctaagctgttcatgatgagtatctgaaagaaggtcgggtgtataccaagttcttcacgctaatgagagaggaagaaagaaggaaaaggaagaagtcatgcatttgccagtttcccatattggccactagatggcaacaccaacccaagacagtcctcttctgagatgagagaaaagggttgtataggattaagtacacaattagtttgaataacttattcctatataccacagttttcagtcaagtattcttacctcaggaagggcatgtataagtttatacatgtttaaatgtatacgtgcatctaagaatacaagccaggcaggcagacagaatgcaaaatctccacaatggttgctgacattctttgcactcactaaatcttacatatacggaatttcttgacataaaaatggattaggtctcaaaagcgagaaatggtaaggcatttactatttaccgtcttcagaccataaaacctctttaaactgcaactttactgtcagcaccttagaatctaaacataacgtttcaaaacgtttccatggagaaggttttgatttcaacttagcatgccaacagaccattttcttgtcttcccattgtctacgtggtggaaatttcttcagctgtaagccagactggaaacttgtagcccaatgggtgtcaaggataaaaggtgtggtaagctccttattcccttgttattgaggtgggaccatcggcttccattttcagtggtgtttccataaagattttcatcttctccagcgcccgaggcatcagaagaatttatgtgaccccaagatcaccttgaaaccatattaccggtttatggtttcctaaaagctttttgtgtgattaggtttcgttttactgttaatcacaacaagaaacaggaagtgggtaaaaacaccaaagagaaagttgcaaagtttcaaacaattccaccataaatagtcgcacaatgagagttgtccctagatttcactggaatgtaaataaaagccttgatcattctcactgctcgacagccacagtttcactttgttcttcatggctctgccaaccctctgaaactctcagtcacggggactgtgctctcagctttcctccaagagatttctccactgccattgcctcctgttttttcttacctccttttatttaatatttacaggaaaagctgttgatatatgtggaatgtttgaggatacaaaatgaattaaatgatatttaatgacatttggaagaaaacccagattttccacccaagtttttcttcctcaaaaagaaaggccattgtgtgctctttcttactagagtgggggatgaagagtccattgcaaagtgaagacttggtccaaagctgaccatgctacaggctagagacacgggcagtcacaggaagggtatggcatgatgtctaatatatactgcacattccatatgttctatagtatgctattcaagatctgcataatcaagaaatattttccaatttaaattaa

SEQ ID NO: 46653 - DNA, 2254 bp, Homo sapiens
aaagccataaattagagtatgttcattctcagataaaagctaacttttaagtagtttgagatcaattaagaagcatagatatccatagacattccatttcatcctattacatacctaatttggtccccagtacagctatttctagctacccacaaaatcatttttaaatacctaaatgtcatttggttattatgccagaaagcaaaatatgattcagaaatgtaagttttttccttctatgttagaaggggaaaaaaagcacataggctaaaatcttgatttaagctctaattagcaataaatctcaaaccacttttaacctcaggtcattcctgggttttgtaagaaaccaataaaaacacattaaaagttttagaactttggagaaaaaagctttagaaaatgagtttgacttttaaaattctaaagaagaagaaaataaaaagagcttagaaatctctacctttcagcttcaaatgctggaagggggtttttaagcctaaagatgtcttatgaaaaattactgttacaatcagtcactaggaggaggataaccatttttttaaataagaaggccaggcatgaacatttcagaattccacatttctagtttaaccaaagaaagttgtctccacattggcttttcttttcactctgtttaaaaacaatgaggtttcctgcaaaggaaataaataaagggataggtacatagagcaattcacttttcaaatgcttttcctacatcatgtataattatgccttacatctgattaaagaagaggaatttcccctaatcatcaggctccttggctttggctatgactgcttcttgtccagaaataccttgggtatgaataaacctggcaaagcctcctttttcatggataatcattaaccagcaaatcaaatctcatttacaattagatcatgttgactctcccttcccagaactacagcaagaataaaaagaggaagaagacaattaaatacaaattaatttctgtttgattctcaagaactggataattctggctttctttcctcatttttctccaaaaatatcccaaatgattattcagttagctattacattatttttaaacaatatagtaataagttttccttagagatactatcccccaaatgaataacaaatggatgaaaggcaggaaaacgaaacagaaaggcagtaataagccaacacatattgattaaatatactatttattgtatgcttagcaatgttgccaaaaccttgtattttgttagctgaatttggcttgaagtttcccatggtagaactcaacttcaatatcttctgcttttcatcttggcaaatacttaatcaacttattaagaaaaaaaaagagcatccctgcctccggcattcagttttctcctttgcattctgtacgttgttgtctgtcctgtagaagagtgagcagctgggattcttgactcctctatctcttccccaccaccagctcaatggctagtgggctattaggaagcagtatggcttccaggtgttgtatcagatgctcaactaatcatagcatcagaattaaaatatttagttgcaaggaaaacagctgtgggtggctgaaggaccaaccttctaaactctgagtcatcccctggaatggactgctgtgtaaatatattcacacccacccaatttatctcgacctccagaaattatcttgaacaaagcaggcatttcactgcattggctctcagacttgccttcctggaaacaaccttttctggaagggaggctcaagacatatttactaagaactctgaaccaccaggaagccttaaagcaagacctgtgcttctatagttcacatattctatcctatgaaagatgtagataagtattaatttagaatcttcttcaacctgttcagctgtgttgcaaaatagtagatacgtttcccagtaaagaattgaaataccagcaactggcactgatagctaatgctccattatttctgtgcataaatccacgctgaacttcccttttttttcttgttttttgtttttttgaggcagtatttcactctgtcacccaggctcactgcaacctccattcccaggttcaaacagtccccccacctcagcctcccagagtagctgggactacaggtgtgtgccaccacacccagctaatttttgtattttttttggtagagacagtctttcaccatgttggccagactggtcttgaactcctcatttcaagtgatct

SEQ ID NO: 46654 - DNA, 1156 bp, Homo sapiens
aaaataaaagggactctgctgcctcaaataacagtaaattgaaccactcctctaatccactagtccagtgaactttctggctcttctttccctcacctccatcagacacatttcatgcgctcccccgacccccacccttgataaagaagcacttagaggctcacagaacagcgcagaatatctctgcgttcaaagaacttcaggagggatccagaaagtacttttgagtagatgcattgagcctctcagtaatgtgaaagcaggctgcagagatcaccatcccagcaacaggattattctgtttgatatctgttgccaacagccacatttcccagcatcttggatgcaaaagggggtttactgacaaagcaaagcttttacattgggccttacaggcacaggaaaatcaccagctacctcaatgcacagtcccacggtagcattcctccggtcactcttagaaaaggcccaagtcatctgggcgcctggactcacccgccccaagcaggtggcccttctcctggttcccctagttcttcctggtaaatggcagaaattgtatctgacgcaatgtgcgcaactttgtcctttgctggattcaggtttctggtcatgggtcagatcactcagtgcctgaagcaatttcttcctccacacccaatgaatgcttcagggaatcatgcagggataggtagatttctttaggtacatatttgtattaatgagagcagctgggagctgtcttcctggttctagtcaatgattaacttttgaaggcagcctctttgtgtgtgtgtggtgtgtgtgtgtgagagaaaggacttgttttaagtgttcccacacaaagttatacatctgtttttctaatcaatgaatgacctaactacaaagagttgaagctaccattgagccaatagtaaagaataaaatcctaccggctgggcgcagtggctcacgcctgtaatcccagcactttgggaggccgaggcaggtggatcatctgaggtcaggagttcgagaccagcctgaccaacatggtgaaacccccatctctactaaaaatacaaaattagccgggcatggtgatgcacacctatagtcccagctactggggaggctgaggcaggggaatcccttgaacccaggaggcggagtt

SEQ ID NO: 46655 - DNA, 679 bp, Homo sapiens
gaaacaatttttaatgaaaaattcagatttattcttgtatgccagaatttcaatctatgacaatccaggtctgaccatgagttctgatgaatattggttgtaatactctacctgttggaatttagccaaaatgtgtgtttgatatgcttttaatgcttagccaggcttgggaaccactcatttactgaatatttacatgtgccaaatcctgggtaatctggcaatagaaagacaaacatctgcacaaagttacccaagataatttattaactccattacctggcctagagcttgtttttgatattgactcaccctttcttgcaagggcaaggcctttttgtaattgtaaacatttaaaccagtttatttttcgaagatgagtaataaggatgaggaggatgtttagcacaattgcatattaaaatattaggaaacagtgaaatacaaacacaggaatagatagatcagagtccagaaattgatcaattatatgaattaaatgtgtgataaaggcagaatttcaaatccataggagtaatatggattactattctcaaacattatgaatagctagtcattgaagggaaaacaaaaacaaacctgaattccaatcttactccatgcacactcaaataaaatccatacatgttacaactgtaaatgtaaaaaataaaattac

SEQ ID NO: 46656 - DNA, 2825 bp, Homo sapiens
ctttttggctgctgtttgtgagtttgatcattcttgttataaaattaccacatgtaaccttttgagaagcattagaagaattaaaagatggcaaaagcaggcctataggaaatagtggtaatggatacgtccaaggttactactatgggccactgtgctctgcattgcaagatttgtttgaacatactcaagaaattgaagttcagacaggttaatttatccaaggtcccacaaaaagtaaatggctgtgctgagtttcaaggacccatgtctgcctggatccaaagggcaagtcagtttcagtgctggatgactgagaattacaaaatttcttgaaaaagcactaggcacaatagttggcgttcaacaaacgctcacacacacatctgccctggaattgggtctacttaaacagaagggggaaaaaaagcttgctgaaataattatacttcttcgtaactaccaagctcatgtttgactgactatagtaatcctatgccctccttcacattgacgctagaaaaaatgcctggcagtatttcaaatcatgatgcctatttttctctcgatcaagtaacaactcaaattatactttaaaaagaaaaaaagcaaattataaagttgcattcagctgacaagagactaaaggaatctgtgaaacagaatttatttgatgcctaggtttctccctcacccgacgaagaccaaatgctgctgatccgtaagtaacttcgcaaggtaaactgaggggcctggcagcatctgggcctcccttaaaggtcgaaatcaagtgcgctcgccctccttctgtccgccttttccctttaaggtcctcgaggctgcttcgctgcagaaagtaactccgcgtcgccgccgcggaaagtggggcaactttgcctatcagcagaaaccttttgatccatctgaggcgacaaaccagaccaaacgcccgcccaagctgttccgagcctccggggggagagcgagcccaagctcctctgcaccgcttcctcatccgctcgctgcacctggacgcggtcggcgcgcgacccccggccgtgacgtcaccgcacctggcagcagccgtggggaccgggagagagcccgaacgcgacggggcggggtggggcggggagaacgagggcgttctcgcgagatttgcctcctcccggtcccagctccccgcaccttctcggcctctgtctgggtccccaccttagtctacggtgtcgccttttctaactgcgagtgctaaggaagaggcgaggggcgggctccgaggctaggcgggcgctcggggttggagccgagggtctgggcaaaccggtgggtccctccccactgcgggagcggccagggtgggaaaaccgcggtcgggcgggcggggtagggccctcccgccgccgtggctcctggggaggccaggggtgaggagctgtcgccgcctttgcctctgcctcgagggccgcgctgaagagactggtaggagagcgccgcgggcggatggaggcgactcttcgccccgcctgagctcaggaggggctagcgcggagcgcgggtcccgcctccagccgcgggagcggccgcgcgagccaccactggaggaggaggaggaggagcggacgtcggcttctccccgcgggagcccccagcatgggtaagagactcgggcgcttcccgccgcccgtccggaccttccagacccggggaggctgtgccctttctcggccttctggggaggcgactgcggtcagcccctgagcggcagcaccccaccctctccattctccccaccgccccttcttgccctgccttccaccttgctcttctcacggagaaactggtgggagagctcgcgggtgctttccctcgctctcccttctccgcctcttttcctgttcaccagaaaggtgcgggatggggggcgggggcgcctggccacctctgctaaccccttgcccagctaaaatcagacctgaccttccttcccttcctcatccccttgcttccctccccctcctcgtgggatgggggagggcgatcgaaaaacttgataaagtagcactttcaacttctttattttctgcgaggctttgaatacgtttaaggagagagataaatttgttcaaaaactttttttttttcctgctgaaactcgcaaggggtgcctcaaggacaggaaagcttgagtatttgttttactcgggttctacctaggcaagtgtgttggcacctaagcattcagtgtgctcccgaggactgggtttggacttcagtgttggatcctttgaggagcagtttcctgtttggagttagacttccttgccggaggagagaaaaatacaaggccttatatgttatttactatgtgctttatagttttgtttgaagttagagaaggcagaatgtgtggcagtccgggttgaaaaggagttttgttaagtggtgtaacaatttcttttgataacaaagttcggtgtgggctaggcattaaactaactccctcaatcctttaaaaattaaaagcaacttaagaatagcttacaaaaaacaaaacaccctgtgtctctataaggcagaacgtgttctgtaagagtaaacccaagtttgatttttgtagagcaaatcaggaggaccctatcactttttgcagttgagagttggtactgcttcatatcaacaaacgatcaccgaaatgaataattcatgtaattaacaaatgatttagaagcaggacgaatacagactactgctgatgtggcaccctctgtccacactttgctttgtgggggatgttttgagcatattgtttatagacactcgcc

SEQ ID NO: 46657 - DNA, 769 bp, Homo sapiens
aagttgcctcagttggtggtgtctaactcttcaacttaaaagagagaaaatattaataggaatcaactctgcttatttaacaggtcaagctggtctctggtgtccatggggacacttcaggagaaaccgattaacattgagatgtgtggaaacaggatcaataattttcagtaactgaggaagattaccagaagccaaggcggcctttaacagagactgtgcagctctgagcccaggactgttaagcacttggcaggcaatggagaaagtctaattgtggctgacgatgagtcattttacactattgtcacacctcctttctccacattccattttaggaacagtataactttcccagccagaaattgtctaatttaaaccctgactcttacctgtgtgaatcaaaatgactcagaaagtgcaaataaaataaccctgaggagtcagtggttgtttcatttttctcatagcttctcttctcagaattgaggcctgtatcttccatgtgtatagaagaaacagaagggctagaggattgaatctgcatggcagaaaaagaagaagtctcacaggactagaagttagagcatttttcctgacatgaggatatagggtagatttatggccaaagtcttaactatatgaaaaatagagtagtaaattttttaaaaggagagagaactgctgttttttaaatacaattaaaacatggataaacaaaaaagagggtgcatataagtgtgtttgcctgtatatatataaacatgca

SEQ ID NO: 46658 - DNA, 880 bp, Homo sapiens
ctgctactaatagctcctatttatagagttctagattacaaaaccatgatcagatgtaattttaataactacttccttttttgtacttgaagaatttgatgcccacaaagaaggtgaaataatgtattcaaggtcatactattatctaggtccagaacatgctggaacacagggatccccgaagtttttatctaacacgacatcactatgcccgccagattcttctcaattacatatccattcagcagatttgacctgtagcattacaggtgaagtaaggttgagaaattgattcaagtgagtaatatgtagccctgcacaaagggagttccaagtaccatggggtgaaaaacacccagatgtgagtcacacaaagcagaattcaaagtccagatttctttccttaactgactcagtcacttgctatgatattttcatcaagggacttaaattctgtgaacatgagtttcccaaaaagtaaaattaaaaaaaaatctatcctacagaattattttaaggataatacaaatacaggttaaatgctttgctcaagtggatagtacatgtgaatttgggctcatattattagtaaatagattaccataacatcaggtaaaagaaatgagaagcactaaaaaatgtactcaatgctacagatacttgatatacaaatatgaatattatagaagtatttatactgtgtatgttcccctgcttaaaaatatagactttcagactcagaagacattaaaattaaatctagacaccttttgctgccatctcaccattactactctgaggcttaagttcttttactcatgacttacattttttagagccctaataatacttttcaataataacttcatttatttatccc

SEQ ID NO: 46659 - DNA, 1289 bp, Homo sapiens
agctttggctgctgacgtatgattgcacattaatacttcaagaaggtactttgatgttcaactagttgggtttggagatggaaacatagggcatgaaaattatatttgatattagcataagtacatcattaaacacaaaattatattggcagaaaatcatcaagtggtttaaaactttacacacatacgttatccagggcttcgagcttccctaagaccaccttctttctagataaaactgagaacgagttagtaatgtaagcttttatgtcaatttagacctgtcttttctattctacctctcactcttaacactgtttacactcttaatcctgtttacacacagaaaatcacttttattcccgaaaactcttagaaaaaccctgacaataacataacccacaacctagaagggaggcagccatgaagcaggcgcatccctttggaaccatacaaaaagtgacctctgccaacgggaacagttcagggtgcttaagtggccaaagaagataccgacatggcccctaaagtattaaaagcaccttctttccagaagtacctccgaattgccagggacttcgcccaaaactagaggttggtcgaagtgaaaatctaaacctaaggagaaggcagagagtgggatcccgtcacagtaggaaggtaaagaagacagaagtaaaggacagagcgggagagaaaggacaaaagttcaaaatacaggggtagaggagggacaggagccagaagaatggagcgatctgaaaggtgtacgtcctactcactggtaggcctgttttggactccgctgtgggagagggcggctgcacttctgcgtcccccgcctcacctgtcagacatccacacagccaggcctccccgccctcaccaagcccacacaaaccgcgccaccgccagcgtcagccggacgactctgggggcgtaggccgacaccgccctccctccagccaatctaatagcgctctcatgggcgcattcctgatgacgtttaggggtagggttagatgcccgtttccgctttcttcccacccacttccgggtctcctctgtttacgaatgtttgggcgcgaattactctaagcgcggctctcagaagggtgcaagaagaatcagtggtgagtcgtgatatccttaaccggctgggtggatctaaagttcagggatgagttttaaagccaacgcgtttgtggcagactccgcagtttgcatttgaggatagcgaggggggattgcttacggggaaatgcccgatgtcctaaaagatctgccct

SEQ ID NO: 46660 - DNA, 821 bp, Homo sapiens
ccttcataagttctcatctcattcccccagcacattgatatccttctagccacaccccctcaactcaacattcaccctttgaataaatagctattggaagagtttgtatttaaccagtgtcaaatatttcagttggttccaaatcctatacaaataagttatgttttttctttctgaatctgaatattgaaagggtttttgccttttaagatgctgagcattccaatcatatttaggttacattcttgagtaagaatgtatagtttcctcatgtgaaacttattaataaacattactctgtatatgcaagatgagcagccacataatttaatgattaacagaacaaacatgacccttccaggttactttagatcttgaattttcactaagggtgatccatgttacacaataatataagccgaacccaatttggaaagactccttctatgaggatatgtgaatgaggtccagattgggtaatatagaagaaagttgtacaattctaggcattgaagaaaatgagtgatttagattacaatagtgataaagtcaggtgcagtagcaagcttgtagtcccatctactcggaaagcagaggcagtaggttcatttgagcccaggagttcaaggccagcaaggtcccctttctttaaaaaagttgtttttaattaaacaaaaaagtgataagggaggtaaatgtaggttccaatgtccttataaacaaaacaaagcaaaacaaagtccattgaaatctaacacatgctagctacaaagtgcacacaatttaattatgaaatttaattaatgaattttcataaagca

SEQ ID NO: 46661 - DNA, 990 bp, Homo sapiens
tcttttattgtatttctaattatgaaaatttcaaacacacataaatgtttaaaggatagtataaagaacctcccaccaatacatagctgaccttatttaattcatacaactatatattctttccacttcctggattattttgaagaaaatgtcccagacattatccttaaatattttaatatgtaactctaaaaaatgagtcttaaaaaaaaaacacccactatacggatattactcctgtgtccgaggtccccaagaacacccacaggttctatggttcactatattgacatacaggactcagcaaatatactcacggctatgattgattacaatgaagagataaaatgcaaaatcaacaaagggaaagggagcattgtgtaaagtccagaggaagccaggcacaagcttccaagagttctctctcagtggagtcacacagaatgtgctcagtccctaagcaatgacctgtaatgatatgtgtaaaacgtttcaaactcctggcctcaagcaatcctcctgtcagggcctccccaaatgatgggattacaggcatgagccaccgtgctctgctaaaagttgtctaccacggaaacttattattagacactcagtgcccaggattttattggcagcatcctctgcctagcacagactgatttcctagactcgcagaaggaaagccaatgttcagcaaaacccacactgtttgcacaacttaatcacagtgagccatttatgtgagtcctggaaatggtagcccccctccagatccatgttctcagacaccaaccaagggtcaaccttgcaattcggcctttttaagggcgatggcctcaagccttctatgttagtcttttctgcacattcccttaaaatactgttaacatatttccttaaagtaaaataacattattcatatttccgatattgtcgtaatatttttaagcttgttttgaatcaacatctaaacaaggttcatacatagac

SEQ ID NO: 46662 - DNA, 528 bp, Homo sapiens
tttctgttgaagaaaccaagttatttgttctttgaagtatcccataatctgtttactattgtatgcctgaggtattattttaaaatttcctctgtccagtcaagccttttgaaatggggttttaacttgaactcttctgcatacagttagacattttgtcttttttttttttttcttaacttcccacacaacactgatgcaaacaatttgcctttaacacctaagtcattactcaactgcgtgaactctattttgaacacccagccctttggaaacaaggtcagagtctctaacacaactactcctgaaacacttgccttagcaatgattttatttgcagtgatatttctgcctgctttaaagttcattttcaaaaactcaattgaaaattccattaggccagctaattttttccccctgcttagtggatagatgactggcccagttccatagctgataatatgcctgaaatgtgcaataacactacacacctctaattaaaagaaaacacaaatttttactttataa

SEQ ID NO: 46663 - DNA, 1970 bp, Homo sapiens
ccgcttgaactcgggaggcggaggttgcagtgagccaagattgtgccattgcactccagcctgacaacagagcaagactctgtctcaagagaaaaaaaaaaaaaaggaaaaaggaaaaagaaagaaaacaagcaaataatacaagtttatccttaacaaagaggtaaagaaagaaggaggagtagaagtaaggagcagaattgattaatgaccaactcaatgaccacaactcagcctgccttgccatttttcccaagccttgcccttgagggatgaattatgaagtatatataagataatgaaggattattactaacagtttctttgacttcatggacattccagatcaacttgtttgcaaacctgccaaacaacagacagtattttccacccacccactctttgctttgttgatataacatagcacatttgtatgtcttcacatggagctaaatatttggaaaatgaagcctctgtggatataatatattattgaagattcctccagttgttataacctaatttgatcttgtacattgattatgtaataatataattggaggaaaaattgccttgatcttttaaaaatttttaaattattatctaatccaggtttgatattgattgtgaccttttctttataactataatgagtgattgttttatttgaaatatttaatattaactgatattgagtcaaagattaaattctgtctattggagaggtaaacttttgtttgtgctcaagatggatatgggctaaagtggttttttattatcatcattaaatgctgactcagttactggtgatgcaatttcctgtttagtaatttgcttattcaaactcagtcagagagcctcatcttaaatcttgttctctgacaggagagaatgatgatgaatatactttaaaactttggataatgcaggcagctgacacggaattacacttttaaaatcccattaaagcaacaactaatcagagtactacatgagtcatcctttgcagttatctagctaacctcatattctttgtcttttaacctgcaatttcaaaatgtcttgccagcatcatttaggagttgccacatctctttggaatgaaagtgcttttgagagagaaaaaagagagagagagagtctcagggccacatgctaagtaaacttaagcctcttttatcttttcccaggaaaaaagaaagatattagtcactcaaaatttaagctgaagaaacctttttaaaacagttacttcactttccatttaatctcagaccactggggatatttacagtattgccgctctccctcttttcctttttccccctaaatttgtaacttccaacattttctcttctacccaaaaattacgagtctgattctcattatctagcttaagtccttgacttctacatctttccctgaggacctcatcaaaaactatgctttgggtccacaattctaaagaacaatgaactttaaaaattaaattttaaaatttgtttacaggttttagagtttacaaagagttatcagaagaattgtttcagctgaactccataataacactgggaagaaagcaaggctggtattctttatacctcagagatgagaacatagggagacttgccaaggtaacgtgacccgttcaagtctcctgactcagtccagaaaaatagccaggtgtttttctttgcataggctgtgttatccaggtcatgaaaaccttaattataagaggaaatatgattaagatctcattttaaaggcttgctgtttttaatgtcggtccataatcaggttaaattttgtttatttagagtaatctcactctatcctcaaacctgtgctttgtgttcatttaggctgtttgtttattctttttattaatgtttattcaccttcaaccatatataataaccatttagggtaggattatgaagctcttttatgccatgtctaaaagtttg

SEQ ID NO: 46664 - DNA, 4125 bp, Homo sapiens
aacccttttcagaattagatcagctaattaaaatgcacacaaacttctttgttccttcacctcaaggagcgtccttggaaagcaaacatacttcggggcatttcagtgggggcgcagtgcgagggtgtcctttgcgcctcagctccggagaaaaacgaaaggtgggtgggaaactaggatagaggtgaaaagtaagaggggactgaatcagcgaatgacaaagggagcagggctccggacaggggtaggaggaagaagaggagtgactggggcttgtgtcaagcttcttctgaatggctagacagccgccaggtgggagaggcggagggtgaagaggcgggttccgcacgcggttagcctggggctgatctagtcttcagctttcaccggctgggagtccggagctgcagcagaggccacacccagggcttggtggtcccgcgctttccggagctcagcaggcgcttgctgcttgaaccggtcaaagaaggaacgaatgaatgacccttttgccaggatggagacccgggggcctcagggagctgcgaatcccatggactcctcccgcagcctgggggacctcgggccttttccgcgggaggtagggcgcggggctccgctagctccgggcgcccggaatcccgcgacggcaggggcgagccgaagccagggcggcggccacgaggacagaacggcagatcgggccctcggacctcgggccggggaggaattggaccgtgagtcctgggtcagagagaaagtgctctttctcctgcacccagagaggtggttagggactcgaggggaccctgcacgggaagaggtggccggtgcagaggaccttcctcatgcgggtggagaggaccacggcgaggagcccaactacccttctgtctttcaacgacaaaagcgaatttctggcaggcgtgtagccccgccgcgggacgcagcagacccacccaaatacgtgcttgtgcgggtggaggattatcaggtaacacaagaagtgttgcagacctcctgggccaagggtcgcatgaccacgaggactgaggagcacttcgtgaccgcgctcacttttcgcagcagtagagagggacagcctggggaacgctggggccctgctgaatcccgggctctccaggcacgaacaggggcatcccgcgtccacgccgcggggaggagggtttcaccgtctccagggacttggctcgaggaaattaaactctaatgagtagctcgagaaatgttccgggatggtggatgagcgatcatccttaaaagaaaatgctattctgggagctccaacctgcaattaacctacagaaggaaccttttgagaggctggtgcagcgcttcggggaggcagattaagaactgtaagcagcataatacctcctttgtggcttgaattccttcgctgtctggggacctaagtcattcagaagaggtggagaaaagatattttcagattggcagaatgtgggagttttgaaatgagaaaacctgttgttaatttgcattttggaataactctcaattgatctcttttctgttccccgcccccctcttgtttctctttaggacctagaaacagaagtgaagtttgaagtctgctctctgcaaagagggtgggagtgggtggagaagaggcttgttttaaaagccaaaaacagaaagtaaaaagaaatgggaaagtaaaaccaaagcagcaagtgactctcttctgatgtgcacttttcatttttctcccccacatttcagtgttagaaagaaaacgagaggagctagggaaagaaggagttggggacagaagactaagatttcaacgtgaaattccatttacaaaggctttactgcaaacaatagctaatttagtcctgtaaacatgcatttatcatacattttaattttaatattaaaaatactgcatgtaaatgttctgaactaaaggtagatagcaatatgtagtttgccataaaatgaatgcatgtcttattcttttccatagttcttcattaatgagacttgtagtcaagaatagattgaagataccattctccttgtgtagttcaaaaaaatctcctctggtaatactgaaacaactaatttttcttattttgtttgttcctctttattattaaatactatgtgaattaactctttagtagttggcctggttgaagctctgtgaggagcaaagcagccctctccaggtgaactgcttgactttaccacctgaaggagtatttactgcaagaattaacaaagcaggtaggactctggcttttgatgagcaaatagttgaaaagtgcctccttccccagtcttcccttttgccttcatttttagtttagagcttgaagtgttctcaaaagatcatctgatctacctcttgcctcctggcaggccagatagataagatgcccctgttttactcatgagccaacctaggcctagaggtcttgtagcatgtctaagtcacacagctagtaattgcatatgcttactaagtggatgaagaatgtgataatctccctcctaaaggtttggggcagcctttagaggatttatttgacccttacttaggggtcaaaagatgcctgaggatatcctaggttttctttctttttctatttttttcttttttttgagacagagtttctctcttgttgcccagactgcagtgcaacggcacgatcttggctcaccacaacctctacctccagggttcaagcgatgctcctacctcagcctcctcagtagctgggattacaggcatgtgccatcaccccggctaattctgtatttttagtagagatggggtttctccatgttggccaggctggtcttgaactcccaacctcaggtgatcctcctgcctccgcctcccaaagtgctgggattacaggtatgagccaccatgcctggccaatatcttaggttttctaactcatgtttatgagaagtactagaatcaccttaatgttcctgaattctgcaaggcctcttggctggagaatcatcactagcagttcttaggcctgtgagaccctcacttgggagaggaattcagcatctgagctcatctgtgttcaaaattgcttgacaggtagaaaagattcatcccttaaaatgaatctcttttccttaacaaccctccctgactccagtgggagattaacttacttggcatgtaagtttcagacctgagcttattaatttggttgaatcatcacatgtcccaggtgactaatcattgaatatagagaacaaaaaaagtctctttcacaataaccaaaaatggtaagtagcatcactcagctgccttctctggaggcaatttctggcgttcagctgcttgggttcaaaactggctctacctctttattaacttgtgtccttgggcaagttgccttatctctgtgtgcctctgtatcctgatttgttaagtggggacaataaatagtatcaacttcatagagggttttttttttttagggttaagttaaatgaaaatacttagaaccctgcctgtcatacaataaatcctcaaagttagttacattttttattattagcacggttattgtttagttcacttttcatcctaactaggctttagtcttttgtttagtaacaaaaagcagaaattgtataacacaagaaagctaatgaaagtcaagccggtggtttttaataagactcttctctactcctgaaagaaaggacttatttctagcttttcctaacctttaatggatcagtaagtatatttcttaaattctttagaaatgaccttcacatcttctgtagggactcatggtaaagctcaaaggactaaggtacactatccttaacagtcactgaaaagagtttacatacctcctagttctgggcagatgggagctttgaatactttctttgacctgtcaggttagtttgttttccctctgggattttaaatctgatgccctgttgtctagaaaagcagaatagacacaatttgttttcattttgtctttcagccaaaaacgtatttagtcaagttagcttaactcctttaaaccaaatatgtttgagttaattttgttttgtttttgagacagagtcttgctctgtcgc

SEQ ID NO: 46665 - DNA, 1498 bp, Homo sapiens
gcaatcttcgctcactgcaagctctgcctcccgggttcatgccattctcctgcctcagcctcccgagcagccgggactacaggcgctcgccatcacgcccggctaattttttgtatttttaggagaaatggggtttcaccatgttagccaggatggtctcgatctcctgatctcgtgatctgtccacctcagcctcccaaagtgctgtgattacaggcgtgagccaccgcgcacctggcgtgcccaggctagtattaaaatcctggactcaagcaatcctcctgccttggcctcccaacatgctgggcttataggcatcagccaccatgcctggccaagtgtggttttattttattgtattttcatgtgaatatacctacatatatacatacatctttctaagcataaactatataaagtagtattaatgtaacctctgtatattttctgaatatgatctgtatataaacaaacatatactgatgctactcaagatgggcgttctgtgaaacggcagcgtgggcatctccaagaaggtttttagaaaagtagaatctcaggccccattccagatctgttgaatcagaattcgcattttgtcaagatcattggatgattcacattaaagtttgagaaacactgacatattctcatatatttagttctgtatcctattttgtcacttaccaaaactgaaaagtttttttattctgtattcccaattaattgttaacaatgccatgaagataataattcatagagttttgaacacagttaaagattacaggaaggtgaaagatagaggatatgaatgggtaaattggcgaagagatctctatgaagctttatagtgtcttttttaaagagccttattatttgaaagtttgtcctaatgaaccattgactcatcattgaatttcaaactatttcagaaatatggctattttgttgtctaggaatatgaaataatacattataaaaaactcctgtaaaggtgaaaaagcaggaagtcattaacacattgcacaattgcaactctgcaggctgagtcagaacttgtcagccacttgtgatgaattgagaggggtggggaaaaggtggagccagaatttgaatcaactgattcagataagtaaacaaagggctgtgactcttgaacaccatgacatctctataactgcagtcagtactttgctctgtaattagggagggcaaatctgtgaatttacttctctagatgaagataaagtccagattactttggagagagtaaggagttatgattggttttcaggcattatgcagccaatagtcacaaacaaaacattaagacttggttatcttcaaagcaaggaactaaccaaattcaaacttacatttctaaccttaaaacagaacaagaggccaagcacggtggctcacgcctgtaatcccagcactttgggaggccaaagcaggtggatcacctgaggtcaggagttcaagactagcctgacca

SEQ ID NO: 46666 - DNA, 872 bp, Homo sapiens
tcttatatgggttaaataaaattttcttctgcctgctggataattttttagatttaattagcatgtgctgttttccaggtttcaaaacatttttctatcttgggttgggtctccagatattcttgatcatttaaatgcttatttcttctactgcttgaaaggtacctcctggcctagggaaactcatgaaaagggaatactgtatttatatgcgtggttctcaagatttgttatgagacagttttcaacagaaccattgttgctcttcattttattgtttaatttgtttttcagactttccctctaccaactccacgctccaggagggttgctttctacaaattgcactttgtgtttctcaagcaaatcacactcctcctccctattgatgttgcaaccacactggatttcctaacatttctcagtaaaagctcattcccactccagggactttgtactttctggactctctgcctaggttgctctgtccctcactctctctcctcgtagcttcatggctaggttccttatatctagttatatctagtttggctacctctaattccttcagattttaactcaaatattacttctacttagaaaagccttttctgactcccttagattgtgttacacatataggccattaatacaaatttactgaataaatgactgggtgggtctgatattatacatgtcatatttgaggaaatgaagagatgctgaaagtactggaagtgtatagatgaaatgagaagccggaaatagatcctattaacattttcctaacactttacagtttacaaagcacctttgcatatgttatatcacttgaatttttaatatctgttagagaaaactcttactatctc

SEQ ID NO: 46667 - DNA, 498 bp, Homo sapiens
ctctaccagtaaaaagatgataactcactgaagccttctatgattgatagcattttttagcaatagaatatttttaaattaaggtatacacactgttttttaggcataatgctattgcacacttaatagattgaataccatatagtgtaaatataacttgtacatgcactgggaaacaaaaaaaaattgtgtgactcaccttattacaatattgcttcattccaatatttgctttattgcagtggtttagaactcaacccacaatatttccaagatgtgcctgtatttgatttattgcataacaaattcgtcagttcctggtctaacatatcacagtctacttctggagttacttgtggtaatgtttgaatttttaaaaaatatatgaaaaaataatataagtctttaaagacaaataaaaattaaactaaaaggcataataaaaagtctacctatttcagtaaattagacagtatctgtttttgttcattttctata

SEQ ID NO: 46668 - DNA, 2023 bp, Homo sapiens
aaaaatgaatatactttaaactgctcacataaatagtttctaacacatatatcagaattagcaagttaaggctatccctgtaatagtccacttttgacaaaatcacttgtgaaataaaaaaaagaaaaagaaaaaactctacttgctgagttcctgcaaaagatactgtttaacttgtcagattgattttttaatcaaaattcaaaataatggaataaaaatttaacagcttaaaggtcaaagttagttaatgcatatcttcaaatttgcaactgatttacttataagtaaaaacatccacaaagtttaattgattttccacctcgtacactgagaaatagtattttgtacctcttgaataattcacaagtttgaatcctaaggcatacatatatatgtgtgtgtgtgtatatatgtgtgtgtgtgtgtgtgtgtatatatttatatatatgctgtatttatgcctaattattctggctacaaaggtcaaaaggacaaagtggccacaagttataatgggttggagaatttggatggaatgtggatctaaattactgtgttacgttaacttgttgaaatcttattgctaaaattttgcactgctaggcagtaaaacagaagaaaaaaaaataaattgagaaagtgttaatttttaagcaagtttgacaaagattgagtttcatatgacaaatattgtcagcaagacaggattctgtcagtggaagaagtttaaacattaacaatttctgtcaggctgttgacacaatcatggcagacatttcccaagatgccgagatgactgctggcatttgtcaacaatcctgtcatagtgacagcaataaggccatgtctggaaatgtgacagttttggctttgtgctcccctgagcaatagcccaggtgttcagagaaagtgtgggaaaacccatatttctgcattgtcattcgaacacagaaaacacaggaggaaaatgagctgtcactccaattcccatgatgccttgctgcttagcataactctacagtgcggccctgggtccactggtccatattctgacagataattaagaaagcagcagctttttctagacggctcttcctcatgatttgcattttagccagaggcgaccagttataaaaaaaacatgatggaaagatggtaagaagccaattagatggatggatggctgactgacagctctctggtattacgactccagatttcagactacatagcctggcagttttctacaagaaccaacttttttgcaggttggtaaagctgttaaatgtgggactatatatagctctatataatttttgcaaagttgtacattttccttaaataagcatgtattcttttcaatcagggtttgcattaaacaagtttcaacaatttaatcacaacttgcatcactaaatttagcaatattaaaattctagacaacttgtaggcacattagctgtgccagtagagaagtgattaaaaagctgagaagtactttgagccagcagagataaagtgagctaataattacaatgtctgtgcaaatatgctttggaactttgaattgtacattgtttgcttttaagcaaataaaaacatagaccctaaatttcctctccgtctttagatcttgcacacatatatttggttattatccctgttcagggtataatatatgcttgtgtgtctgttattttagctaattttgaaatttttaaaaaataaactgttagtgtcaagcttccagtttggccatgatattctatagcttctagccaataggagtcaactcttcacaatattttacagtttggaagcttcaccaatgtttcctgtgtactgcatgccgtgtgtgtgtgtgttgtgtgtgtgtgtgtatatatatatatatatacttgtcatatatatattaatatatattatatatcagatacacacatattaatatatatatcagacacacacaacacacacattgttaaaagcaaacaatttgctattagttcggcatgtcttc

SEQ ID NO: 46669 - DNA, 892 bp, Homo sapiens
agagaagatgatttaacttcttattgtggtagctgaaagccaagtccccaaataatggtaggcaagcagctttaggttggcaatggtaggcaaggtctgaggttctgaggtggggagaatactctgtggccaagttcttcaatcttagcatgttgccattttgactgattgcatttttgtttggggggctgacctgtgcactgtaggatatttcacaagcattcttgacctttacccgtgagataccaaaaccgctccctcagttgggacagcagaaaatatttccagacgttgccagacttcccttgggttgtcagggtgggagagcaaagtccccctggttagaaaccagtgctctagagaagggatgagagaataaacttcatcagtgttacagttttccatacggccagatctgaggagaagtcgcagtccctaaaccaaagcagttaccatttttagcagatagagctactaccctgcttcttaggaagagtctacttggtgctggaagctagagaatattgtgaaggtagggacacttttcccctgagaaaagacacagctggtctcctagggagaaatattctgctagtactccagggcataaggacaagtagaaacagacagggagaaaatggagacttgtccaactgaaatgtatccagagtgtattaaccacacatctgctcttttgtagtgtgctatataataaccttgagcagcatcactgtctgtttctggcaccaaaagcagagccttgctttctgtcagtatcatgctactttaatgctcaaagggtgcaataggggagcatattaggttatgagtcagactcactggagttaggcattagtcaccagtattaaccttaggcaaagcacttctcttc

SEQ ID NO: 46670 - DNA, 494 bp, Homo sapiens
aactgacaggattatttagattcataggaatttacatattgcagtaggttttttggttttctgagagaaaaaaaatgtttcttttattcatgtatggaggagcattttgtgttttggtagcaggcacttggcatttggttagtcccagtttctgctccagagcaaaaccatattgagtaagatgacccttctaccttaaaggttactattgcttaacagattgcagatttttaacctggggccacagcatgagttggaagaaggatttcggaacccgtgcccaacaatacaatcagttccattatgtgacttgtttcatgttacattcatgctttatttagtcctgcttctgacacatttgttttaaaggggtttgtgtgtttgcttggtttattccctttcagaggatatgtatgtttctgagaaatacttggttttcatcctcacttttgaaaacatagatcaatttggagaagtttgttttgtggatatca

SEQ ID NO: 46671 - DNA, 1092 bp, Homo sapiens
atttatttatttatttagctagctagcaaatcttgcctgccagctttaaacaaactgatgttcatgggttaaacacaggagcagccaacagcattctttgcagatgcaattcctggcacactctttacccagaatgataaacttatcacctctccagccctcagtttgaagctgcagcagtaatttctgctgggtgccaaaactaaaatgaatgtgactgtgccatgccctgctctgagctgtggctataatgagatttgaatgggaagccccggacacaataaatctgcgccatatgtgaccatttcctgtgtcagttcctttctcataaccagtggagaatttttttccctctcatgaccccacaccatgactctgaaatctttcatggctgcttatgggcctcaggctttttgcagcagttgtataaataaatgaatttgacagcaaacatcataacagttagcagtaatgtgtgttcgccacaagtgcctatactactcactggagaaatggcacaggaaacagcttgttttgttacctaaacaaaagtagtttcgtttgacaagtggtgaaagaattagtcaaataaacttgaaatccactaggactttttttttttttgccaactctccctgccaggggaatgttcccagctcctgagtgcccatgactcacagaaggtaaatttctccctttttattctgagataaagatctgcactgggaatacaaaaccttcgactgatattttatattaatcttttcaaggcaagagtgtcatgcatgggaactcaggtagtcaagaatttccaaggaagcctgtggtagaaatgccaagcaggatgtttcgggaggaaaggaaaggtggtaataatgacccaactcggtgattcccattgaaagcaaattgaagcttacaagtgcttcttttcctttcacactgcctttattcaggaacaaaaaatctctacacaagttgctgaaggaaaggaaattagcattttctctgcatctcatttctccacccttcctctggcatcttaatgccaatcctgttgtctctgctgtgaaagatgttataccacagtga

SEQ ID NO: 46672 - DNA, 730 bp, Homo sapiens
gaaaaggagaaggcagttaaagacaaactttagagaatactaacattggaggtataggtagaagaggattcagagggagaatatgaagaggaggcaatgtctgaggtagtggtggctcccaaactcctatttcaaaaggactgagatcagcaatgaggtcagaagagggcttgaagatttgtttgcatagtagagtatttaatcaaataattgagaaaactcagttgtccatatcaaagaatgagggctgttgtggacattatgttcccaacccagctccacctttcagttactacagtaccgagaagtagaagaaccaggagagtgcactgccttgaaaaatcaaaggaggatgggattttaagaaccagggagtggacttggtgtcaaattccccagagatcataaagtaaggacaaaataccagtcaatttagcaatgactaatgtttgccagtgcaatttcagtgaagtgatgaggggaaaagcccatggcagtgaggagagggtgagtaagaggtaaggaagagtcaatgtgggcagacctctttaagaaatttgactatgaagcaatgaagaagaatatgacagtagctccagggggattctgggtcaaagagcctcaaaaatagtttgactgcacaagtagagaccctgtattagagctactcctcagaactccacgatacacctgcaatgccagcagcacagattgatgactgttcctctct

SEQ ID NO: 46673 - DNA, 783 bp, Homo sapiens
cctgaatctttttagctaatgttcttttctcttgtggaaatatattcagtgtgttcataagcaagtatgtttatatctgttggtatttggcacagagagctaattcttgattattcatgaaaatttgaaactatccactcactaaattaaaaatattgtcttcttaatatcttgtttatttacttcaaaaggaacatataactctatagtgatgattctcaagcctaacacagcagaatcacttattgtttgtgtgtgtgtgagtgtgtgtgtgtgtgtgtgtgtgtttaactcaaaggtctggactttacacacatctattgattcaaaatctccctacatgccaatgaatgtttaatgtcctagatgatcctaatgataagtcagttttagtagctagtgtcctgaccacatcataaaaaaatattggcaggagaatgaggggggtttgttttgttttaaaattttcagtctattgaagagtaataatttaaaaaaatacaaataatcagacaaattagatatacaaactataagccccacgtttacttattagactcaacagacataaaattactctgccaaattgctgtgtttctaagtggtaaatttctgtgaatacctcactgtagacaggtagccgatagtttgtgggccagcacgcgtggagcagctacctccaagccccacctgctccccttccacctgcacagcttcctggctgcactgcccgcctccagacagctagcgcactccaacacagctagcacaatcttttcaggg

SEQ ID NO: 46674 - DNA, 715 bp, Homo sapiens
taattattattttaaactaatactgttgttcctcaacaactcctaaaagggagaggtggataaggaataaacagaaaagtaagagcatattttgaaaatattactttaaaccagggtttctccaccccagcactattgatattttaggctgggtaactgttgtgagggggtgtcctatgcattgcacaatgtctagcagccttcccagcctcagcccactagatgtcagtatcatcaccaccaccaccacttccggtctaacagccaaacatgtttctacacattgctacgtgtcccccgaggggcaacattgcccctggttgagaacaattggtttccatagtaattcgcccagcttctgtggaagaaacttcaaaagcccttcataaaggacaacactaactgtcaaaccagctgcattcaggaaattatcctaccactacccaagtagctaaagcaggaaatactgaaaaagggagcagactctctatttcctgacaggaaacacacattatcttgattacttgtttcagtagttttgtttccttggatggaagctttccctgagtaaaaactgcagatctgggagctggagaattctcaagccaaaactttgcatgcattttcacacctgaatgccctttctttagaaaggtttcttcccctgctgggcaactttccttgtaggtgctgtgcctctagagttgactctcgc

SEQ ID NO: 46675 - DNA, 1620 bp, Homo sapiens
caatgggagcagtgagagcctgagaaagcctggcggtagcattccaaatcatcttacaatgccccctgtccccaaagcacaccctctgttaaccataagctccacaaaggcagggacaatgcttgactgagtcgctgctgtgtctctgtgcatagactggtatgcagacgacattcgaatttttgtgaatgaaaagagtcacccaatctgggatgactgatatactgcctggaaggagaggtgagaacgaggcaatcccaggaactccatctcacctgtaggcatctgtgttagtctaagattagtgcattactccatcaggaaatcacagcagggccagtatgaagaaacaggaaagcttaaggatgaactggccagaccaaggcttgacctgtgagccaattacttacctaggaagagacctagtctccccttccctcccctcccccaatcccttctagatgcctagactaccaccattccacacaacctacagtgcttcccatttgcaaaacaaattacagcagcaaattgttttgtttggtctgcttccagcacctcaggagtctaccttcccagagagaacatcaccaaagaataactcggttgttaatcaacagccttaatcagattgagaatcaacagacatttcaacaaagctgatggtggcttgccaggcgtaggttttaagtattgatccatatgctgtatagtctgccatgaaggctagtttcctcactgtctaaaggaaagggttagaaaatagttcacagaaaatatgtggtgtcagggggtcaaaataacaatgttgttacttcacagcttgggaactggctctgatctcaccaaaagataaagattaatacagttacacacacacctgccaaacattcagtccccaccccaccctcccagccaaccactgcccctaggccttcatatcaacattatttcaactggactatatcataggagcttagtgaagtacagtagtggttattgacctatttcacagatgtttagaacctgaggcagctggaacaactgagtccaaaccaaataaggaagcatacctctctatttcaacctgaaatctaagagccaccactcagtctataatccttctaccagacttccatgggaaacacagcaactcctttattactccctcccagctcgtgagatcgtggtggggcaggcttggggttaaacctcaaaaagggcttcacttgtgattctctctgagctgacacaacataacatggtacgtttctaagagaaacaggcccctggtcacccaccaggctagagacatgacaaagtgaaaaattaatgagcttccaaatcaagcttcccgcatgctgatcctcgggccccagtgtggtcagtagaagcaaaagaggggagaggaaatgcagcagattaggatgagaaagctgcagccaccagctgtgtgatcaaccttctgtgagttattcaaacttgtcagcgcccacagcaggctctttgcagtggactggcaagatgggattaatttttaatactcatggttccccagtcccagtcccaaaacaaagagacacgccgtgttttatttagcctggaatgcctctcattaac

SEQ ID NO: 46676 - DNA, 1039 bp, Homo sapiens
ccctacatttggaactgcatctttttcatgtcaattataaatgtaattttttattagtctatccactaattcttcctaaaaataaactcagactctctttatttctcataactaaaatttttcaaccacagaggagagctgtgtgcatttatttagtcatgtttttgttctcctctctctctctcctctctctgctctcactccctcttcccttcttcctcccttccctctcagcttctcctttgggacatcgagggacaaagttgcaaggcactactatagatctcccatttcttccttttgttcaccagaacgttaacaagagatacaacacctagaaaacagagagcagagacttttctggatcaaacagtaccttttttttctgtttctgtctccttgtgactcaagggagaaatgatcctttctttctaagtgatcttatttctctctgtcaagaatccgtggacatgttatctggttagagctcagcctgcagccaccacgcaggtaactcactcacgttagactataactcacctaactcgtttgtgtcccagccaaatgtgtaccagagtaaaagttcagacctgaccatgggtaagtttaatgattaacataagccactcaggctttttcctcagggcttgttagtaatgaccaaaggaaaagtgtcttacatttttctccacttactgcatgtgccccagataagaattttaagtaaaagtccacccagtgagacaaacaggcattcaacattgaaagaatttgccagcaaatcagcgattgaacagagggctcaagagaaaggaccactagagggcagatccccattcatgaacagtctctcactcttcatcccgaagagtgactcgtaaataccaggttatgggctgttattcatatacccactgtaggggtatgggtctaaagaagtacagaagggaagtaacttggtccaagtcttgctgagaaagggttgattgattctcttcatttttctactcctcatcctccctcttgaccttgctttttt

SEQ ID NO: 46677 - DNA, 1257 bp, Homo sapiens
cactgaaaccttacctattcgctctccagatattgcctgtatggaagcatgacctacaggtaaaagttctctaatagatattcatttgtccactgatgccccagatacttataacccctgaggccaaaaatcacctctagagtcctagcagagtggagaagcaaggatgcctatgtggggtctgctaggacactccccacaggaaagaagggatgtgggtccccctgggacatgttctttcattcttatcaaacaaatcaaaataaaatacagcttattcaatagagtcttccatcacctcttattctccagagcagaggctgaatgtcaaacatttacttagttctttctcttattgccaacataaaccacatttaatcaaaattccaaaacattcttccagggtggttaggagaggttaatgattgattgcctgtcacaaaagagctgacaggatgatcattctcagaagctgcttgaactgagtcctccactgaatatttagctgttctgtggacccatctcatggccaaccttgtagctggtttgtgttcaaagagtccaagatccatactggcatctgggatccactgaccttcttagtgctacacgcttgccctaaaattctagggtcttcctcagaactttatttttcctgacataaatgctaataatattttccctgagaagctgaacttccatctcagcagcgattatttgaggtaatacatctagtgttctctgcccaagagaaattcaggaggggggtttcagcatgaaaggcttttgtatttggggggaggtgggaatttcctactgttcaacaggtttttgttgtaaacattaactaggtgacctgccagccttgggtttggagggcagggtgaagctggggaaacatgtgggagggagtgccacttctgtcccaggagggaggccaggcaccaggcagcctgcattcaccattctcctgacgtcatgtggggacctccctcccaattctccttcaaatgattttcaggaagactggtgatctgtatcgatgtgtccatcagagggtttagacagaaaattcactcttgttttgggggaaaaaaaaggagagaaaggctcacttcaaccagaattattgcaaatgagtaatttccagccctagccttttctgaaagtgggaaggcactggggatggtaactcaagaggcaactagtagggaaaaaagaaggggtttcaccagttgctgctcaccaagaactaag

SEQ ID NO: 46678 - DNA, 710 bp, Homo sapiens
acaaaaacaaaacaaaaaaaagatttagacaaattcatggacacctatattaggttaccagaaattgctttgaataaccatcatggttgcctgttagtcattttttcaaagtccagtccaaatatcatactctctgggaatccttccttgacattcataccccttcagggaagtctaaaagaaattaacagtttattcgtctatgctcaaatagcctttcacgttcattcctttgtaagtaccacactggggtaaatatttataaatatgtacggaagtctttctatctacctttgtgcttcccccgctccggatctgagctctttgaaaagagtgtttattaattttacattgcttgtaagaggaaagactaggtcacttcccagaagtcactcctatgtttgctgaatgaatcacagcttctggaggccaatgtcattttaactaataagagacatgttatctctggggtccttatttcattttcctttataaaaggaaatgattaaaattgtataacaggaagcccttcagaccaggaaaaaagtcactaagttaaaatgctttcaaagctcccagatagcagggactcctgcccagccatatacctaagggaccccaagcctaggctcccccaggcactcaccctggcggtgtctgagctcatgctatcctggctgcgcaggcgtgaatactcttctgcaatgtag

SEQ ID NO: 46679 - DNA, 1277 bp, Homo sapiens
gggctttgccaatctgcttgcacttaatgggaacctgtcgccttttgcgcgcccggaccatcgcttgtacttaagagaaagctggcttcctaagagttcacttatcgaacacaaactagcgagtccggcgttgagaagttacaagattggggctggaggctcgggcccggcaggctccgctgcggcacacggtctggaggtctggcgggcctctggcttcccggccgggccgcgtccgcaggggctccgagcgctagagcccgcgcgccggcgcctccctcacctcgtcgtccaggaagtccaggtaatctctctgagcctcccgcagctccacatcgtccagcaccacggtacccgccatgcccgctgccaaagaactacctccaccaaagtcgcgtggaggttcccaggatgactccaccccggcgcgaaaacttccgaactcttcccgccaccaaaggttacctcgaggaagaggcggggaccttgggagcatataagcattatgattggctgagttctctgaggtcggactagcgactgtccaatcaaaagcttcttcttcttcgggttttccgctgcgcgccccgcggtggcgggaaacgtaccatccgggattctctgttcctcccctccctccgcctcactcactgacgagcaaactgaccaatagggctgagaggaggctcacagaggctggtcattgagcagctggaggggacaggctggcgagagggaaagcattgcgttctgggagttgtagtgttctccctcctttccggatgtttttgcagggtttttcaagctgcagaacttttgacccgatgcaacgaccaaattcagaggatggtgctttataacgcagggagatgaaaacataaaagcaaatcatttttaagatatatccaaatcagaactgccctccagtggcatcctagtgtaaaagtggattttgagaatctataggatagaatatagaactacagtaccttagggaaagattagttaaaaacccatttgctatctgataccgttgcctgacgaactccataaagacatcgccgcagagaaggatgaagtgaaaaaaaaaatctgtgtttaccctgccccctagagacttcatcgtgtgttatacaaattttggaaaccgttactactccatcttacttaataacaggtaaattaaaggctttctggtcttataaaaagatcacaagatccttttaagtaacttagcttactgaacgatcagctcaagaggggaaaaagtgtttcac

SEQ ID NO: 46680 - DNA, 832 bp, Homo sapiens
accctatctctaaacaaaacaaaaaaaaagagagagagagagaagagaagggaaggaaggggaaagggaagggcaagaggaggaagaggaagaaagaagaatgaggaggaggaggaggaggacaacgatgacactgggcagagctgggagtggagggaatgcaaacatttaaatgggccaaagaaatggggaaggagaaagcaagcagagagcccagaggagagatgactctcctgcccttgcttacacaaggtgctgaccacacagccactgcgaaagtcgatactaaatcttggtgctagttagaggaactggtaggttgagtgaaacaggaagaggagctgctcctgaatatctgttcccctgaggattttatatgagtcagagcatgtcatgggaacccaaagtaaaggactgtgtttactttcttttatactccatgtgtgtgatgaggtgactaacggtcaaactatttggtcacggactgtatagctctctcttccatgctgaggggtataagcaggagttgcacccatgatttttttcctgtaagtgtcatactgctgtgtgcctctgtgcttttgcacctgctattcctcagccctgaatgctttcctcccctcttgtctgcttattagtctcagccttcatgactcaccctaagcttttgctgaccctcccaacactaaaaagcttggtaactagagagctaggaatgcctcttctgtttttttcatagtgtctagtgtacctttcttgtagcccttgtaacactgcattgtcatcatttctttaaatatgttttctccactagatcagagagtgaagattg

SEQ ID NO: 46681 - DNA, 401 bp, Homo sapiens
tattaaactctttataattatgtggctgtgatacatctcatggcctagagaaccattgggtctaaatattaaccaaattccaaaggaggtaataatatatccatgcatatgtaaaagcatacaaagacataaaatagctaccatgtattgagcaatcactgtgtgccaggcattgtgcaatgtactttacttgcattacctttggtccctgcaacaaccttaggagggagatatcccagtacaaatgaaacagagatgaagtggctagtgcaagggctcttaaagttagtgtcagagcaaagatggcagatgccttgtttgtgtgggggcatgaaatcgtgtttggaaatgctggtttaattaagggattccttggagtgcatatctagcttggcattact

SEQ ID NO: 46682 - DNA, 2128 bp, Homo sapiens
gacaaatggtaggagatgatagaccaaaaacaagctgatggttagaaattcagccagcaatttaaatattggtgcggatacctagcaagtggatgaaccacacaaataaataagatccaactcaaatggtgttttcttttgaaaacccacattttcgttttcttagatctcactggtttttacctttagaagcaggcaaaggatagtcattcactttgtttttgaacaatgatctattgacacattctggggacatctttcctctgactgtttgctgatagaaataaagcataggtaagccagtgttcctgtctccagaggcttgcaattcaataagcagaagagagaaggctctctacacacacagtagtgaagtaatgggcaagcctgatgttctccttaccaaaatatgtggaatagatagataagggttgggggcgggggaggaatcaagatggcctggagaaggctttgtggtgatttggaattgaactaaggccttggagatatctaaggagaaatgaagaataaagtgacttgcttgactctttatagcaaataaaattgctgggtcttagaaccaccaggagagtgtactgttgtcactgcagaagagttaatgtttaattgctagggaacacagctttctttatatggtgctccaaactctagctcgatttgttatctgattttctgctgtggaaagggcatttccaagattgatttcctgccagtggaaatgagcagctctcttcacgttcacccgggttggcccgggtcccagctggtttgcagatcagtgatgaagcttcctgccggtgagaagctagatctagttgagaggttgcctgactgaagccaaaccacacctaacgaagccgatagttacactcatgtagaaagtccagggagacacctgtccctaggctttaattagtgggagtttcagacagcaaagtttacctttactcaaacaagaagcctcagaagaacatgatcttcacacctgaactgttgattgcctggagactgctcagtgtgttctcccagtaaattgttcccagctcctctgacttctcccactcgacagattaaacacagatactatttattccatgtggcagatgcattctctgtctgtaatgatgcattttgaaaccagtactttctcaagtgagattagctgagatgtggaaagtataggaagtgacagaacagacagaaattctagctagagggttctagttagataaagagaaaaaggcactcagaggaaatttgctctgctcatctttcccagggcacagcaacaaattaaggctgtcttttctttctcctcttaggaatattatagggcaccacagaggaaaagattcataagtggagagctcactgagcccagaaggacacatcttgctgccagatctgtggcaaaaaggtgtaccttactttttttttataggcacggttcagccgtaccacaaacccacatggtcaggaagtgactcacgtattaatgccgtttgagtttgtgtgctgtggggaaggtcttttgacaatattgtgtatactggcttttccaatctaagagaacatctttgctgcattaacagtagatgttacatatttttttccctttaaaccccccatgaccaatagcttaccctatggcaagtatagttaggttactcgtaataattaatttggtatgctaactagttgagctcacagaaaaatgcaagtatgggtgtattcctttataatgctggggtgtttcttggggagggtcttaatattttaccaacttaggttttaccaatttttgcatatttatgtcaaatattcctatttgcagagtagtactaacttttgctttccaattacaaaagtagtaaatgtttgttgttaaaaagtacgataatgatagtatttccagaagaaaagtaaaattccccacaatcccttcatggcaatagctatattgttttgattatatgcacttccatacttcatctgtaccatgtttgtatgattacaaaaatagggctgggcggaacacatactttaaatttgttttttcctttacatgtctttgactcatttattcattcaagaaatcttttttgag

SEQ ID NO: 46683 - DNA, 2255 bp, Homo sapiens
agagctgggcgcggtggctcatgcctgtaatcccagcactttgggaggcgaggtgggcggatcgcttgaccccaggaattcgagaccagcttgggcaacatagtgggacactatctctacggaaggagggaagtagggaaggaaggaaggaagcaaggagggaaggagggacggagggaaggagggaaggaaggaaggaaaaagaaaagaaaggaaagaaagaaaggaaagaaagaaagagaaagattgattttaaaaaagagttaaaaggggaaaaatacaatgtggcagtgggagaattaaggatgagatgattgcattagttcattgaccatccctgagcaacagaaacacaatcatgggtaatcctcggcccctgcctacaagaagcatgggtctagtttagtagcactgccaactggaccgaccatttacacttctgtgtgaaatggggcagaggggggagaaaagagtgcctgagctcacagcgttggcggggcgcagtgaggtccgccaggactaggtggaaggagagaaggaacgtccctctctgcaactcatctaagggcctgctcggaccccggatctcacagcgagaactaccgcctcgctacacccgcctttccccgcgccacccaacagctcccacgtctcatcctccgggagcggggcggggcgaagcggaagaggaggggccgacacaaccacgcccactagccgcgctccaaggccgcggcccacttaccgcgagaacgcggagtcctgcggatggcgcacgcgcaaacctcctgtgatgcctgcgcctcctggccccgccttccgctcgtgggagttccggatgtttagcgttaccatggatcctggaggtgcccgcgaacactgcttgtcgcctgggcaaccggagaggacgaagcaggacctaggtggcggcggtggtaccggctgcaatggtgtccaatcccgtgcatggcttgccctttcttccgggcacgtcctttaaggactctacggtgagcagttatctgccagactcccacctgtccccaccttccagcagcccaggaggtttccccgctcagtgcacctccattcccctccactcaagtctgtcttctctccaaacacgtcttctgtcctgaccctgttctttattctgggccgaacttctgccgttcttccctagccatcctcatcccctctctccgatcctttgccctccgcctcatccctctctagttttttcccactccatcttggcagtgtgttggcgccttcattctcatcccgttagccgcgttctttcttacggccctgctcctccaagcccctgcctcttgtccctttagatcactgtttcccccaccctactcccaacctatctctgggccctctccctagctcgttctctcacatcataacctgtctccgtccatcgccgcccttaaaaccccccgccactatgcaccttcaacctcattcccacaggtccgtcattcccgccccacctcttcctcttctgaatcctgtacccggtagtatctcccactcccagctccatttcctgttttgtatgtatatcgattccgctcctcttctttccgccaggtctttttcctttcttctttatgcttgcatccaaccccattcttttttctccatcttctacattttccacaatttagtcccatcctctccccattcctttctttctccgttgcgggttttccccaaaacttgctcaccttcctcccaaagcatctttccctgctttgtaagagatattcctttccagttccctcaagaattgattagttgctgtttattcttccccggccctgttctttttattctaacgtttttgtaaaaagattcctgtttagattttgttttgctccttccccaaccttgtgtttttatttgcattttctagacaaaattttttaaaaagtagcagcagcttggattcttttttttttttaaactcttgccacagtttagctcttaaaattatttggtttgttttaattctgacagggctactgaaatgtatgtgctgaaaaatcaataatgagattcagtagactgatcatcatagatgagctaacagtagtttatgtttatatagtttaatactttaaactcttgccttcctctccagcttcacaaagttaaaatattttgtcaatttattttctttggaagaatcaatttagaatgaaatcgaaagtttggtgagagaatttgtattctgaatc

SEQ ID NO: 46684 - DNA, 1115 bp, Homo sapiens
gtgattctccctcttcagcctcccagagttctgggattataggcacgagccaccatgcccagccttaatgttggtaagcttcttgatgtaagttttgtgatgcttataagcaaagattcaagttatatttttaaaagttagttttttttttacctaacaaatatttgtctaatgttattaatgacacattcttttcttcttcagaaaacagccttccacagaagtcagacgctgagctacaggaacggctatgcaattgttcgacgtccaacagttgggataggcggagaccggctccagttcaaccagctgtcccaggctgagctggatgagttggccagtaaggcaccagtcttaacttatggccaacctaaacaagccccacctgcggattttattcctgcgcatgtggcctttgacaaaaaggtatcatctggaattttagggtaccccttgaattagggtctgagagccaactgcttgcaaaaaagttaaaacagtaaaccacagaatttccaaagggctctgaggagaaaattgttcagatgccttaacccttagtcatggacagctgaactcaggctaaaaagaggctttctttagtcaggaagctgattacagggagtaaagtagttccctgtagacttcaccagactattttccaaatgcagttaaagaaaagttggctataattctgaattcttgaatttatattctatgtttatcagccgtgtgttctccactttttaaaggtaactgtattctgtaatggtgacatatctaatcttcatgagatgcagaatatcattatgaaaacaatgactccatctattgtcagttttctgcaaggcagtctccataagtttttggttttcagggaacatttcatgtttgatattacataaccaatgggtggtataacatttttgtttgtttctcatttatctttatgtttttgcaatgtgagtttcctcatttccatctattgacattaccacatcattcttgtttttccttgtcaatgagcctcctcttttcactaaagtgaagtagccctagccctgaccatgtagcagaatcactggcgagatttttaagaaagttacgttattcca

SEQ ID NO: 46685 - DNA, 831 bp, Homo sapiens
gatttcaaccgtcacctcaccgtagagaatgtcactatttagttccaactctgacatcattgagactccagatctgtatccccctggcccatgggatatcttcacctggatgaactgttggtacctcaagttctgtatgtctctaacttatctctatccctcaccttttcccatagatctgctttccctgtgtggttccactaggtaatccaagcttgaaacctgagccatctttggctttttctctcctttatcctccacacttaatgagttgccaagtcaaatatctctcactttcatttcctctgccactatcatagttcagacaagccaaatgactacctaactgttgttttagtctcattcctagtccttatgcttataacaggtatgctgccttgtttattctctagagttcagctctgattatgtcatttttctgggaaaatgccatcaggctttcttaaccaatacagtaaacattaccaccattcacctcactgtgacatgaaagtcatctttcattcttctttcccctcacaatccacatctaatctattagcaagttctattgtttctgcttctaaaatatgtaactaattcatttacttattttcatcctcactattaccataaatttattttccacagagcagccaggcttattttttgaaaatcagattatgtcacatactgactgaaacacttccatggcttccctatcatctataaagatccaactctacaggttcctcacagccctactggagctggccctccctgctctctccccagcctcatcttgggtcctttttctcacctatcatgttt

SEQ ID NO: 46686 - DNA, 986 bp, Homo sapiens
ctcccaggagcagtggccacagaagggagggggacaagaggctgtaggaacaaggcctcaagcaggatgcctgacactcctctggcagaaaaattgtgctctattgttcaaaatacctccgtgcgcttgctcaaattcagaggtactggctgcagtcttatgccccatacctcccccgccagccaggcctgactctgtgacacacccagctgcgcgcgtgtctggttcaaacacacataagcctttgccaagcaggtggccacctagagaaaagcaggtgagtcagaaagcagcgcccagtgcagacaggcccccaggctgggcagaacgtgcagggctggcagggcctgaggacctgctgaaggtgggtgatgactggagtgcgtgcacgggccaaaggataagtgtcccacccctaccccccacctagcactatgtcactgtgagtcattcttggagacagaggaggagccagcaagctgggaggcaggggcaggctaagatgtggagcaaaagggcaggtgaggacagaggccgccgtccggcactgagaatgggcggcggcggcagtagcagcacttggctggggtccagaagccaccctgaggacacgcttcctgccagagttccccacccagccactgccctgccccgtggtggccagggctcccagcctagttagggccagccccacccacagcctgtccctggcccacacccagccacgtgccaatcagggagctaggagccccagccctgaggtaagagtcaggaaggagaagctggcaggattggtctgggcagcgcccaagaagccaggtgccttggctcctcccacccatcccagacagacttccctggctccactctctgccaagggccctggcactcaccagattccctcttgatgagcctggctggtagtctgggtgtggctgggactctccgctttgcactctgctcattccagtattcccgccagtgcc

SEQ ID NO: 46687 - DNA, 1646 bp, Homo sapiens
tttagtgtctaggcaagagatgatggtggcttggactatacagatcgaggtttctcaatcttggcactatggccagatagttctttgttgtggaggctgtcctgtgcattaaacgccatatcgtagcatccctggcctccacccactagataccagtagcatattgccaaatgtcccctacaggcccaaatctcccctggtcaaaggtcactagactagggttggtggtgcaggcagaaagcagcagacagtctcaatgtgtttgggaggcagagctggcaggacctgccgatgaaatgactgtggagagtgagagaaagaagagtcatgaaaaaatttgcatcataacagaaaaatattatttttttaaaaaaacaagctgtttttatgccttttacagaactacatctcttcttcttcaatcactttccttccaggaagcacagttccaacggaggagggcaaggagtcaaatgttgttaggaagagttggcgggggtcgggggtcactggagctttccgtggtcccctggtctctgtgcctattgaatatgttgagtggggaactggctcttcccagaataaaaaactgttatgtgcctccccaagaaaagcctatgtgctctcaaactaattagcatcatgttcaaatccttgaagaactgagagaggcaaagacagagctgttgagcatttcacaccctggaaggcgtgttaagcaacttggctctagcctccaaatctggtcgccacgtgtcacagctggggtggaatgtttgggggtgaagttgaaagggtaaaagtgattcagagatgaggcaatcctcctgaacggcgtctttggtatcttgaggctgttctgcttcaaagcagcttaggcctccgggggtgggcatgaactgaacgtcaagggactgggtgtggtctgaaacctggaagtctagggacttgtgtgcatggcacaacagcagggatgcactgttcacacagtgtcaatctgcccctgggactgtgacagccttgcctgagaggacagaagtcttgggccccccatttaaaattcctagtattctgcttaggaaagctgctctatgatgaaatgataataggaataaaaacaatgtacaaaaggacacgttgactctggctttgagaataggaattcaacattcaactctggagacagagttccttgtgatgggagcgcccatcactgtcactgaaagaagaggaagaaagtgagggatctgtggaaggccgggaaggaaatcttaaagaggtcacagggttgctgaattttccaagacccaggcatggatttctcagggggccaggttacaggaaggtagagctccaggtggtggtgggtactaactcaatacttcctagcaggacaggcaaggtcttgttacaggaaactccaaaggaccatccacattcctttctatgagggaattttgctgtatcaaaggctgcttgaaataagagtctgtttacatagaaaggaggggaaaattgtctggtcctgcaggcatttgttgaaacggcattgactctcacaggatttgatgagctgacagagtgaggctggcctcgtttatagaaggccaaggtagtaaaacagagagtaagctgggcttggaact

SEQ ID NO: 46688 - DNA, 1625 bp, Homo sapiens
tttgcttacaacagtaccaacaatttacagtaagtctgcaataaatggtggcttattaaaatacaattaaatagtaataaattagacaacatcccaggtatagaaatcttgtgaaactccgccattgcagcctgtggacagaggagaatctgcatccttgctccagtcagtgggcagcaggctgcggggctgtgagcctggtggccgtgtgcctgggtctgggctgctctctgcaacccccacctccaccaggcaaatggctgctctccagctgtgctgcattcgctctgagtcacacacacatgagtcatctcactgctgggatgcatttaccagaaggtagccaggctcagtttgtttcagggtggccagggaacaaagtcaagctgattgggtcactctgggagtccaccctaatctcagccaccctagactgggagaatgtaacggtgggcagtggtgagggggtgggaggaggtggcgaggacagagagaacatgatcttggaaatcagacaaactttcctttttcctctccctcttcctttccacaaagacctattctgtgagaggcactgggctaactgttgaaacatggagataaaagacaccacccccggttggaaaacatacagtgcagcagggagactaacagacagatgtacgattacactacagacgggcagcgctcctgagaagcacatacagtgagccacagcaggcgagggccccactctggctagggtggaggttgtgggtaaactgttcactggtcagggtgaacagaacggcattggaactcggggaccagcaggagaggccggtattggggacatcctagccagagaaagcagcatccacaaagaatgaagggactgaggctggactgctgggggcggaggggaggtcaccgtggtgagcggcgggctgctgtgcgtggccttgtgtgccatgtaaaagggtgtggactttatcctgaaggcaacgtggaaatattgaagaattcaaattaaacaggaaaatgatgacatttgcgttttggaacatttactctggcagcagtgaacatgcccagaggtaaggacaccggttagaaagctgttcctgtgatccaggtaagaagccacagggcctgaatcaaggcaggagaagagagaggaagggagaaggagggctgtcagtgagagagagctgatgagccttggccactgaggaccgaagggctgggatccaggatggggagtcaggcactgaacacccgaggagaagacacgaagatgagggagaggagactcatggcccagcctctccactctaccacatgtgacgccaggattacattttccttgccttcttcataaagagaccaattaggtggccgcatattttgaaattataaaataactaaacatagtttcatcatcaagatcatccttactaggcataatgggatttatactcaaccaaacaagcacagtccaaaaatcagtgaaacagtacctgacaagaccttagattatccattttaaagccctttacgagggtcacctgccattcttgataccaaatactagggttccaaagaaatatgactataatctgaaatccttcttgaaactagaatga

SEQ ID NO: 46689 - DNA, 1973 bp, Homo sapiens
actcgggaggctgaggcaggagaatggcgtgaacccgggaggggaagcttgcagtgagccgagattgcgccactgcactctagcctgggagacagagcgagagactccatctcaaaaaaataaaataaaataaaataaaataaaacaaaacaaaataaaataaaataaaataaaaataaataaataaaaatcctcacacgacccaggttagagctcccacttctcatagactgcccctgtcgtgcatgagctctcaaaaagaacagcaatcgtttggcaataatctattctatttttttagaagaataagtccagcacatctctggcctatgaggccagagaggtgactctgattttggatcaaaacaaaacgcctacagggaccggggggagcacaaatgagccaggtggtccaggtgtcttaagatagctgctttcaatacagaggcccactgcattaagcaggtcatattcttcacttccacagagaaatatgctttccactgcttttctttaaacatatcaccctctggtctatctttcacatctccactttgagagaaacaagtttaagagatatccactgaccttttaaccttactaaaataaatacacgttaaaactgagataaacagtagtaactggcagcctcgatgtcaggaacacactagagaggaggggcacaccccacactgtgtcccacaggggtgagggaggcagtggcgtagctgcatctcagccactgtggctgcaggagaggcgcaacccagtggctggagtcccaatgtttcaaaagcaaagaaaaatctttacgtgaaatcatctgattttaaaatgctggtgactaattcgaaatttttaaaaacactgcatgggccaacaccagactggccaaagaaaacacatctgtaggccaactctgactacaggccacagatttgtaacctccaaccttcatgacccctgatacctttccaacaccaatactctatgagccttcttcctatataaccctatggagtacgccaatatgctctagtgtaggaattaatctagctttgggaaaaagcaccttcaataatgaccttcctactgtagtgggttatcccacctcccatcaaaaatgacacttactttgcttatctttgattacagtttaaagagagacctgaaataatcagaatcttggctgttttgacaacctctgtgagcagctgtcccttttggggagtcacattctgcttgacctcctgctccgtttcctatgactaatagatattttcctgtttccttctgaggtcacctgcaagcggcttctcctgcctgcctttacatttcccagtcctgtctggatcccactgtgcggtctctgacctcctctgcacaacctgagctggtgtccacttcttactgacatcccatctgcttctgagaactcatgtgagccagggcaggcatctgccctagaagcttcttcttttgtctgaaagctagttgtttaaagagcatcactgtactcctagtttctttccgaatccctgcaaatctggatttgtaaaattttcttctattggttgctgtgccaagagccaactctgttttcgtattattttgaattttttacactatatataaatccagaattagatatggaaacaccaccacaaacaaaatctggaggcaaatgatcacctggggaaaatatttacaattcagatcagagacaaagggctaatcttgctaatatgtagtaagttgctataatttcacaataaaaggatttttaaaaatcgagtagaaatgaacaaaggatataaacagacaagccacagaaaaaagaaacagaaaagatggctgttatacatttaaaaaaatgctcagccttacacagaagagatatgcaaattaaagctacactaagataccatttcatacctatcagattggcaaaaatacaaagcttgacaatatat

SEQ ID NO: 46690 - DNA, 3920 bp, Homo sapiens
gccaagtgacaggtcctgctgaggctgggaaattaggtacctaaaacttcccttcttctcccagctcggcctgtttttggaagccaaagggtcttcactaaggctttccccagattgattttgcatctttctgcggaggaagtgaataggaaaatttcaggcagacaagaaaaccttggaaagttacgcccaattggtggggaagagatttttgggttttttttttttttaaaaaaaatagtcttttagccttttttcctggagtgtttatgtcccaagcccactgatcacctgcatgcgccaggtatgtggtcggggtgtgatggacgtgggtttgcagcccctccactgctcgataaaaggcagatacagctgaaacaaagatgcttttcacttgtgctttctgaaaatctccgttttgaagggccagaggctgtctgtgagggctgagcgcctgaatcacagggggcagagttatgacagtacctttctgtgtggcttttagcaacgcctagagattctggtttttcacctgaaaaactgccttgatacaaaaatcaggcaaagctaaacaaacacgcacacaacagattctctacaagcctgtgatcacgatgttgaatagactcactattaacagttttgatagcagttttagattaaaagtgacattgtgtatttatgaaaaaaactcgaaatttgaatagccacaataaaattatattacttggtttgttacagtcattgatttaaaagtctaaactttatattgggatacagaggaatgtagaaagagtcacaataaagggtttaaaaaatctttgaagttgggctttttaaaaaagagaataaagcttgaacttgccataatatacatccccaatttgggaaattaatcgggtactgaaaaacagagggtggcctagggaaagcccttccccactgcctttatatccacaagttaattataactttaagaagactgtgtatttatgcaatttatgctggtatagcttgaacttggccttctacgtgctttatagatagccttatataaaacatacgaatttgctgaagtaaatgtattacttctttgagagccttaatatatatattctcatcctcccctaaaaaaaagcactgactaggtatttctaatacttaccacttgattatatacttcactctcactcacacccacctgcccccaccaagtagcttttccccttatctggatagcatagcatactcataaaccattccttatggaagctaaaaactacataaaaaattttaaatgctcaggcaaaataattttccagaatagtgacattcttaatatttatttctcctgcatcatggggcagagttcatattactggttgtgtttggatatgagtaaaacacacattggtcagaacaaaatgtttttacttttggccaaaagccacctgttctgatgcagtatcattgatacattaaaaataataacataaaaaagaaaggattatggagtgaaaaattttaggttgtgagttatttttggagagttcagattaggtaatattttagacttgactacagaaaagaaacccctcaccggtgtagcacagtgtcatttcagctgtagtttttaaagatgttttcgctccgtaagacagaaagcaaaaagagaggagggtcattctaatcagtatagatgtgtctgcgacatcctgtctgtcactaatcttcagcaagcaacaagagtgggtgccagggagaatcatccccaaggaacttctggcatttcctggtattcagggaaataaaaggattattcaaggtctccacatactcagggtagctggaccaggcaggacccaggtatatttgccttcatttgcttgtttgctcttagagaaagccagagttggcagacagtgacctgctgcaaccatttcaaattattctccaccaccttgaaagtttcaaacatcagcatgttgacccccacattttgactgaagagctaggcacgtggattagagcctgctaagaaaatgaaccatgagttcacacagcgatggagcagggtgaagccatctccgggggccataaaccaggcccgtcagcagggctgcaggccaattctcacaggaagccttcaaattcctctgggtatttgtgtaggggcacataaagacaggccttgaccctggatgtcaacctccgcctatcattaaactaagcaaactgaggccggaaagtgaaaatatgagttttttaaatgttagatgtgtgatctctgtgtcctagtttccatactacccctactccatggaggagtgtgtcagtaaaagagcttaaatgaggggtcccaaggagttggccatggtaccattccagtagctttagaagtcaaggtcaggctggggacctctgctatgtgtgtctcacttctgaatcaccttggtttcctgtcactctctgttacagcagtgcatcctcctcctgtgggaaatgcatcctaacacactcggcactggcgtttgagtccatcttgctcgagtctacaaagaccggccaatgaccacctacgtgagggaacccgataagcagaacttcatgatgatgatttgattccagcgtcttaaaccaaggccaagaacattaatgaaaaacatccagcactcaaatgtctctgtttgtcagcaaataatattcacaaggggatattcagaatcatcttcaaagtggagaaggaaaataacaacataaaaggcaagagttcccaggaaaatgtgctacagatgaacaggagatacaaatataacaccaaaggcagggcctcaggtaaacactccccacactttgccacaaaccagtctccgcatacccctaagccaaataaacaaagcctgggcaaatgtcaatatttaaataccatatcccaaggtttctctctcacatacacagttatatacgtataaaatctcattagactaacttgaaagtgggttttaactaaaatataaaaagacttggggattttttctcagtcctgctaggctagtctccattccaagctctagcatcccaggaatctgatggtgacttcatgcagggcaaaggtggcccaggaagaaaaccaaaaattagacggagaggctggacccccatctgaactcacagctgggtctcagaggttgacaggaggcatcagacaccctcggccatggctcaatgtgcaaaaccccacttggggctgaatgcaggccttggagcaaggtccaggaggccaggtgtcccccacccgaggcccattaagtaagtctctttcagggggctacaagaagggacaggaactgcctgggacacgaatgaccttaagcttttgccaagaagcacagataatctctctgtaagaaaatcacagggtaagagcataagaaggggcggacacacacaaagagaaggaaagaggaaagcagctctcctgccaaggccttgcaggagtaggggaggaattgggagcatggttctcttccttcattctcctagtcactgctatgaaccccacccccacctattgcacacatacccaaggccacacaaggaaccaaggccatggccttgccaagggcagctggaagaaccaaccccaagtgctgtttctgccatctccctctgaccaagctccggaaaagacaacagatccatcttaaaattccacaggccctgttccatagtcctccatggctccctattgctcaggagagaatcaggacctatgctgacattccaactccaaggtggccctaccttgcttttcatgttttgcccccactcccacactcaggaattttgctccaaccccacacccagcaccaccatcccaggtaggaatggtaccaccgctcaaatgtgcagcccagaca

SEQ ID NO: 46691 - DNA, 2151 bp, Homo sapiens
aggctcacgtgattctcctgcctcagcctcccgaatagctaggattacaggaatgcaccaccacacccggctaatttttgtacttttagtagagatggggtttcatcatgttggccaggctgttcttgaactcctggcctcaagagatccacctgccttggcctcccacctgccttggcctcccaaagtgctgggattacaggagtgtgccaccatgcccaaccgaataggacactttaaaccagcaaaattatcctccacacacatcctggtactacccctcatgaaacgcatgggaggcagacaaatcgccactctttatgggccatctaatttccaaaggaccaacagtgttgataacccacttcagaaatggttttctttaggcatgacaccctgggactggcttctcacaaactcagatcaagataaaccactgtggtggacgaacagtttcctgcctgagtttttcaagggggcctttactgaggcaggaggaggtgaatataggattttgaggacaccactggcctcaggctgcagtgacaaatatgagtcctggcttcatgaacactcgatcacatagctttattattttggaaaaacatatccgttatgaatggggactggctctacactaaccaataatgtctcctaattaatatctgatctgtttcagcccggaaggcaaaggatcttttacctttatgtgctcagagtgccacacagggttgcttggatgtagggattacgctgctagtccctagccatttacctccctttcacaaagggattctttctaacgttttcaggatagagcagcaactggagtgagggtgggcatgcaggggagggtgaatgagggaggagagaaagtctgcaaacaaacgggccacttatctccaggagtctttctaccttttcctacagctgagtagcttgggggcaggttgtctgccaagcttccctggcccgtgtaaacactctggcaccagctggggtttggaatctgctgagtctctgccagctggcaacctggagatgggtcagattaaaggaatgcataatgaagaagtgggtgggagacagaggctgtatttacacagagggggtctgcaggggtcagtacggcgctagccaaaggggcctctggaagtggaaaaataggaagggaagaggaaggggtttcaatgtgcccaagcaccatgccccacccaactggcccaagactgttatgttcatttatttttttccttttaaaaactgacttctttgtccccttctcagtcccccacagcatctcccaagccaattacacacagccctttgaaaggtttgcagctggccgctcgagaaggctcagcgtgatcagacaacacggacacttgatcttctgagatcccaatttgggaacgttaacacggaaaccctagccacgtgctgacaagcaggccctgggccacattctgccccagactgagccctggcaagaggagagggcacagatagccagcagtctcaggcagccatcctggcttccagccttaaagagagcgagattccaggctcctcccccatgcaaagcccagggggcacggatgcagagaggacagccctgggacaggaccaacaggctccccagccctttcactaccccgaggaggcaacgaagacaagaacagactgaaatctgttgggtacttggtggccacacctgctaggaaggccacctgcagctctactgaagcccatgcaaataggtaaagctcaaatggctgtacatatattactaagaggaagcagaagggagaaaagtgcagtgaggaggcaagagacctgttccctgacagctcagccacaaacccgacgggctgcttccagctgctcccatccacctcactgggcctcagagttctcatgttttaagggtgttctctgaagtccctttgtatccacggattcttccccatgcttctgtgacacggcttcacttccaggctcccagtgcaagcctcagctcttcttgctttcttggaaatctctgctgtagcagccacttctattccggcgacactcagatctacttttcctgctgaaatctttctccccaggatgggaggtgggaggctgcatctttacctacatagtgca

SEQ ID NO: 46692 - DNA, 2471 bp, Homo sapiens
aaccagtttccttaggtaagtccacggtatttgcatgcaagcatcattatggcttatttagctaacaaaacaaaagatagagggaaaagatgttctaactgactgggtccctaccttttaagaaattagaagttacatgagatgcaaacaaatacctttttattataataagtccataggacacttcagtgataaagccatacgaaggcaatgcaagaaggtgaaacggaatgatatgcacgttcaggagcaccactggcatcactgcacacgtcagggttataagaaggtctagagaaaagccctttctctctcccaactttcactgtccttgcccgccccaccactgtcctgctgcttgcctgtgtcacatgaaacatatgagaaagagagctgagaatggccttgcagtttctgaagtctctgaatcaacaccagagacagttcagctgctttgggggcttgcttcctggttgggggttgagactgaaatttccccaggtggaagtcctaacctggaccagtgccccagcctcctaaccagacttcctgtctctaatctctcatctcatcccctaaaccactctagtagtctccagagcaacctcatcacactgctgtctttcctaacagtctttaaaggctcccattacctccaggacagtctcaactccacggcaggacctaaggggccctgggtgatctggccccacctccacccttgtccccactgcatcccacctccagagcatcctatgacaccagtgtgctgagtgtccaatgcttcacaccagctcatctgtctacaaaggacggactattctattgccctcccatatctccttctttctctggccttatctagcatccatctatccctattctgagctaggagacccccctccatgttcccaaagcatcccctctagtacactacacttactgagtgagcaccactgtgtgtgctagaccagaagacccatatggcagctcaactggggtagtcatcatcaagtgactgtacttgcctccttttatctatctcccttatgagatggtaaattccttgtgattaagcaatgtgtcctttttctctgtgttcccagcatctagaatgatggttcacacaaaagcactgcttaatcaacatttgcagaacaaggggcaagaggtcaaaaccagctcagttcagactcacgtcccttaggccatgtgagcagcaacccaactggtagggctgagaaaccaacaacattggtcaagttacacttagctatgacacagctgcaggctaaaggcgtggtaagtggtcagtgaaaatctggcgaggccatagttgtcatgcctgaagttatctggacccaggaaatgcagggaagagtagctgagaagtgtcacattctcttctttctgaagctccaaaaatgagcacagtagagagagttgtatcaacaaatatgttagctggcttgaatttcaatttcagcgttttgtacagagtaggtgtatgtgctgaatgattataaataaaataaaactcaatggccaaatggttgaatagtgttgaatgtagatatttcccaggctgggcaaagaatgacagaaatgtttcttttacatttcttgggtaataaaatgtactatgcagcagaccaactttgctttttacttcagcgctataaaactgtagctttccagaaatttctgcggatgaatcagtctggatagccaaattctccatattgccacagatttagttttgaaacttcaacattgttcattatggatggcaatcttaaagtctcaaagccaaacccagattcctttccaatatacagattttctccttctccaccatgggttctgctaagacatatttcatgccaaccccaaatttgtgctagaatctggtttcaactcaaataataaatgaaaccaagattagaagtgagcccactaacctaatggagcacaatgtttgcctagctactactcctaaatctataggattggggaaaggtgcctctctccttctcctcccaatttctgactcgcaatttgagttttatacacattttccagtcctgttctacatgtccatgttaagaaggcacaaccaggccgccggacatttgacacatccatgaagcaggtgagccccagagaggtgaagggccttgcatgggccacaaggctatttaatggaagaatccaggcccctgtcctcgcccctttcactgcacgcttccctgctgcaggccctccattggcaccagccataattcattcctcaagaaccctgaaagaagggcacacgttccagccatcataaccaaaccagaaccctgctattcttttaaaaaatcaactaccacctgttcctttctacttcaacattcctcctccagtcacaaaatccatacaaacaagttattccttgcctgttgaggtcacaagttgatcaagtacaa

SEQ ID NO: 46693 - DNA, 2533 bp, Homo sapiens
ccgtgagaatgcaataagcaagctgacgcagaagggaggacaaggagtctcaggaaccagaggagaccacggtgagagtgaggggaatgtcgctcacatatctcacttctgagacaagatataccgcaacaaacccatgccaagcttcctccagttcttcccacttttgaatatcacatttttcttgctctgcaagagtagggaatccttcccatcagtcttgtgaattctgaccccttgctggctttctacaactccctgcctgggaggccgacaccaggacattgctgttgggggtgggatccccatcctctgccccccactcctacactataagagaatcaactttccccaaaaagtggagggtatccctgtctctcttcttgtctctgtaaagggggtgaagctctgggtcgccgcagatggatctaaagggacagttcacggagtggtaaaggatatccaaaaattggccttctagagcacagcaaaaaagtgggagcgagacgagagcagaaggccactgctgggatggggccagggccacacgtgaacatccgagcacgttccagagctgagatgcaaaacacccagaaaatcacataggaagtggaaaaggttctgggtctctcccactggaaaagcccagaagagctagtggccaccccttggggcaagagggggttgtgcaatgactgcgggtctgggagtctctgggcttggctcctggacgccagaaagggaaccccacgcgtcaagccatggtggcagcgcggcggttggttcgaggccaggctggggtttcagggctgcagacagagctgcaggatacgatgagtgcccaagggggcggcagagcatggcatggctggcacggcgcggagctgggggtgctgtctgggctggccggggtacaggccggaggggtacagtgcacaaagccggggtgcagataacgtacacggcagccaggagcctccgatcagaggagggcccgctgacctgcaggggtgtgccgggcggtgcacgacagggggcactgtccctccagctccctcctccccaggctctcacctcgaacataagcccgatgaggacgcagagcaccaggcagaagccgatgtccgcatggttgtggatgacgaactcctggctgaagagcgggtaacttttcgtcctcctgcggaaagccatggcagcgggcgcgcagcggccggcggggcccgcaccctgcgctcacgaaccgcagcgcaaacttctccagcaccggcccggtccgcccgccggcccgccgcccgctctcccacagccgctcgcccgcccagcgcggaacaacttcggggcccgcccccttcctccgcccgcccccggccgcccgtaaccgcccccggccgcagcccccgcccagcccccgcccagcccgcggcccgcactcggcgcgcctggccccgccccccgcgggcttaaccctctagccgctgggcacgcgcgggctaccggggcggaggcgtacgggggcggcgagcggggctcggctcctcctcgtcccgcgccagcgccgcgcccggccgcattctcggggcccgaggctcagccgctcgcggtggagaaagcaggccgcggaggaggcgggcgcccaggcctgcccggacaggaagtgggcccagctttcccactcctcgctccgctccttcctccgcgggaagggcaggccccggaggcagcgagcgccccgggggtggccgggcagccggatgctcccggggttgcgggctgtggccccgggggctgagggcggcgcgggtgcggcggaagcagggaagccgcgaaccggccttctggctggccacagcgccctgcacggacgatcagtgaatggagattactcaagtatttatcgagaacttgcagtgggctaggcacagttcaggtagatcaacaaaccgaaagaccctgccctaggggagctttcgctccaatgcggggagagggtggatgattgcagttttgcccagtaatttttgggaccctcatgccaccattaattagctacacacatttcaccgaaagtctaccttacatattaatcagaagaagtggaagaataaacacagaagaagcaaaaaaggaaggaactttctcactgaaagtttctatttaatattaagtcttaaaagtactcctggaaggacaaaaggtgttcttaataaattatattcgcaaatattggatttaatcctaccagtaatgaagcagtcagttactttctagatgtgcagaaatacgtaatgaacaaaaaaaactaattcctattccattttttattaggtccacagttatttcacttctaaataaatatggttttttaaaagtggcacgcggtggaatgtaattgagacaggatggagttcctagagaaattttacttcctcaatctgcactccaccttacttaaaatacagtcttgggtctgtaattcccttatctgactctcaaggaaatgacaaagtaatgcctagattggactaaacct

SEQ ID NO: 46694 - DNA, 1224 bp, Homo sapiens
caagggggccttgccttggactatgtccagctttgctgaatagccatgtctgcatgaccagtggactggggctggccagcaatcccagggccacaccaaagcccagtgccgagggcccatttctttgaaatagttccctcatggctctcacttccccttactccaacattattcgtacctaccatgccccgctattccacttctgccctgacctcagtgtcttgcattgagacatttgaagagtgtggttcaaggaaagagcatgtttgttcccagctgaacaaggctcagggagactagcagtgccagagacaggagtgggcaacatttctgtgtgaattaagccatgcagtgtgcaagttccccatggcaaacaccacctttccctgggaagacagccaaggcctggagccccatgtaggaaatctcctgtgagaggcccttcctgagctccacagaaaatgattcttttcataggcactgagtcccctttttttctagccataaatgcccacatcacagtcccccttcctggccttctacactctgctcccgtgccaagtgccctcacccaggccccctcatagctcatgcacccctttcccttcctttccacactcaactggcctccccaagccctcagaaagcctattcctttcccctgctgtgctgttgactctccctccatcctgcactctatgcctctcacttgaaactgctccatgccgtgacctaacatctccagaggctcctctcgggttgaacagacatgatttgttgactttgccagattagcaaagggagcaaattccatagattcctctgcccctaagtctcaaagtgcagaccttcatcttgatagcaggagcgaggtgatggaggcagcctgggattgcataaaacagtaacagcaatatgatgactctgtagggacaattactccctggcaggtctaagggctaagccttaatctttccaacaaggctctgcagtaggtattattactagcctcattttgtagtcgagagaatggaaggccgggtgctgtggctcatgcctgtaatcccagctctttgggagatgggcagatcacttgaagtcaggagttcaagaccagcctggccaacatggtgaaatcccgtcattattaaaaacacaaaaattagccgggtgtggtgtaaacccagctactccaaaggttgaggcacaagaatcgcttgaacc

SEQ ID NO: 46695 - DNA, 1062 bp, Homo sapiens
taccaaaaatacaaaaatcagccaggcatggttgtgggtgcctgtaatctcagctactcgggaggctgaggcaggagaatcacttgaccaacactctcgccttaacctgggaggcagaggttgcagtgagctgagattgtgccactgcactccagcctaggcaacaagaatgagactctgtctcaaaaataaataaataaataaaaggaaaaagaaagatgttaagtgactttttcaaggccctgagtttgcaaaagacagacccctagcatgcctggggaggggctttgtgcactcatccggctgcctttcctggcatgccctggggatggcaggaaacctggatccctgcccagctctgctgtttctaggtaggttacctcaggtcagacacattcatttcccaagtttctgttttctaatcagaaaaactgtgggatttgaggtgatttcttagggccttttccatatggtgatgctgtcattttttttcctaatgataaaagtattcagaaagctcttcaaattttctggactcagggtcagtcctaggcaaagagaagaaataggaggcaacattgatctttggtgacacctaaaggctctgtgcaaccttttcctctgtccagagtaagcctttggtgtaatccctgctgcctctggggaccccagggcaaagtcttggggagggcgcaaagagggcttgtccatcacttgaggacgcagaggacgcatgtgccctgcacatcaggatgagtaaacctgagctccttactaaaataaagctgtcttttgagtgtgtcctcacttgtaaccggggtaaatgcactgaccagtgctagtcaaagatgacctcaacaactgctccattccaactgtcttgggcaagaggggagtgactgtttatgctttgatatgagatggagtcataaatactgtttcagatgtttcagatgccaggggaacatatgatcagagacaccagcatcatactgtcatgccaggaaaccttcagtgactgcctgctagaggaagttcacatcccttagcttggcttcaagg

SEQ ID NO: 46696 - DNA, 677 bp, Homo sapiens
gagccacttagatctgaaagttacaagaggagaagggcactcgggaacgtgttcccccacattcccatggtggtccccaagcgacccctctggagctctaggactctgcaaattctcatttgagaggcacatgtgtaggccacaacattgccaatggttgctctcaatgactcattcatttgattacttgtatttaatctttatgatgtgtcagggatgaagtaggcactgagaatacaaaggtgattaaaacagtctctgcccctctgtaaactcactgtctaaggagggattcacacggataagtgaatgctgtggtgtgaatgtgtcccccagaagtttctgtgttgcaaacttaattgccattgtaacagtattaagagatggggcctccaagaggtgattagcccatgaagactctgcccttatgactcactgcattataaagtgatgtgcaattagagaggtttgagcagcaaacagtgggcacaggaagatgtcacaagcagagaaggcttaaacaagaagcctggtggtgcctgtctttgaggatttttctcttgcatctgaaattcctccgttactctgcccatttcagaccacgccatctagatggctttctggagccgtttctcactaggctaaaacaactctcctatgcttttttttttcttttg

SEQ ID NO: 46697 - DNA, 2314 bp, Homo sapiens
tatctacctcaagggttgttgtgaagattaagagttgatacttgtaaaatgcttagaatagttcctggcacacaataggtactcattaagtgtttgttgtttgttgttgttgttattgtaaccattattgcttataggaaagtcccttgtctgggaaaccctcggtcctggttttagcatggaaagtcccatggccttggtaaaagttcaaaacgggtccatatggcaggctgaggacagagagtcagcctggcgccctggtggtcactctccactgtcctgcatctttttcagagctcacctctgaaaaactgccccttactctttgtaattgccaccctcccagtatttcaggacactgtactacttagccaacagggtgtacagaaatcatatacctttttcgcacattcttctatgtactaagcttgtccaacccgccttattctgttgtcgttgttgttctgttttgttttgttttaggcttttagcagcctgaagccgtggtttttagtttctgtctctaatgaagctgaaaagagggatgaggaaggggctttactggcccagccagaaacagaaactaagaacctgtgactgtattcagtctctttaacatcccagattgtagaccatcactctagtttccccacttcctgttaacttttataactatctctgaactttaacagaacactattttgtgtttgcaaataacgtgctaaaacgcctttcctagccgaatcaaaccctagcatctagtgccccctgctgccctttcataggaaaggcaagaaggatgaaagtttgattcactgacagtaaaatttttacttgtcgagatttcaataggaatcggtataaatatcctaaattatattcacgtttcatcttttctttgaacctactccttgacttggttttttgtcttgcctttgcgaacattcatttttgcttaattatatttttctcatttatatttgctttccttgaatttccttttggttgttttgctattgctatttgaacttgttttgtcttggctctttctcactttggccatgccttgacacagacgcgcggggtcgagaggctgcgggctcggcgggcggagggcgcatgggagcctcttggccctggacctgcccctgcaatccttccgcgggatctcttggaccctctccagggtcctggctctgagacgttgctagaggacaaatccgcgggatttagagcgcggccaatgggacagcggtgcctggctgagtgtcaggcaaaactagccaataaacatgtagtttgggcaaggtgggtccgtcccctaactcggaccttataaagcgcgcccgctgctcccacaaagccgggctgtcccaggctgaggcggttgctcccctgccgggtgtgttagaagcaagttagaggaagaaggtcttggggactacgggcgccaccgagaacccatacgaggcagccgccgacggcgggtcgccggggcggggccagaacggcgccaaggccaaccagaacggcggcaagaactagggggacgcggggcaggtgctgtgggagttggctggacctgtgggatcgacgtctgcgccgtccaggagccgcccaggggagagagcggagactcgggaggaggatgtgcgctccgacccgggcaaggcttcccatccctcccttcctcttctctccttccctccacctgggctcggagtcaggatctgaccgcgggctctgcccaggaagaccgagttccttgagagcgacacctaagcgccggggaagacagggatagaagagacgacagccctttgataagagggtttttagactaacttccacctgtgacgagtgcatggggcctgcgccctgagaggttgcctttccttttcctctcccaccctgggggtttgtggtgatgttaagttctgttaggaccaaggtggatctcagtaaggaggtagagtagatttgtgaacagctgtcggaggtagaatctttgcagacccagagtgggtgggtgtagacactttgccatgggtggtagctttatttgtaatcctcccagtgaaagctttgggaaatccagccctcccaaactcttgcctttcttgtaagactttctaagcgcatggctttgtcgtaagacttctcgtggccatgtgtctcaccctaccgttcgtctcaccaatgaaccagagctgggataccagcaaaaaggacccaaaagactgtttcaccacaattgaagaggtcgtggaccatcccccaaaatgaatcccaacactggaagaccaagagggtt

SEQ ID NO: 46698 - DNA, 1019 bp, Homo sapiens
ttccaagagaaggcattcctggatcatgatcattttgtctgagctgcatgtggccaagtgcactgggggaagcagagtttaggaacttgttcctgtatggattaagtgggaagtgaaaagtattaaatatatgggcgggagtggtccaggaaggggagagtggacatttagtacctgtttgggcccctgcactaaatgcttcacatataaggattagaaaaacacccaaagattcttagataagcatttcagtgccattttacagaaggaaaaactaagatgcagagaggattaagcaactagaagagaccacatagtgagtaaagcgtggaacagcaaggattccaaccctgtagcgcagctttatgtctggaggaagcaagtcttagactgggactgtcaggccaggaagaaaactcagagcatggacaaaaggttcagagggagtgaggaccgatttatatgtgttgaggtaaaccaggtggatttctgttttggagaaaattgggaagtcaggcttaggtagagggtggtgtgtttggaggggataaaatattttgtgcacctgtagtttgtgtattccacctgtggtagaatcttgtggctcagaaagaaagaacctgcctcgggtaatgctactaagaaatgccaaacagaattagaaccagagtctacttaacccccttctcagaagaaattgtccaggttttagcactgaaagtcttacatcttgggaaactgaaccgtcccagttttaatgctaaaagtccctcatcctgggaaatcccttagctgtggttttagcactgacagtcctgcttcctaggaaactccttacttctggttttagccctgaaagtccccaaaccccttagtccttggcaaatctggatgattgatccacttacccttctgttggaacagatcctagagcagaaggagcacaggctgggctgccatagcatggacccccaaaaagccactgtcatgaagaaatatcctgtgaagaaaatctttgc

SEQ ID NO: 46699 - DNA, 1654 bp, Homo sapiens
caggaggcaggaggcagaggttgcagtgagacgggatggtgccactgcactccagcctgggcgaccgactgagatcctgtatttaaaaaaaaaataaggtcagtttaagtttcgttcctgggattgagcggattgccttgcattaggcaaggttttaagtgctttccaactctggaattctatacctttcccagtagatatctaaacccagcaaatcctgggcctgaagtttaaaactaggatcctcgtctcccaaccacatctagatgatcccatagtgtaatgaagggtgcttgggctttgacaccaggcaaacttggattttgacctgggacaactaagtcacttgacctcactgaaccttagctccctccactgacagtggggacagtctgctggagggtgtgtagaagacctcgggttgccttttggaggttctggaaatgtcccttgaaagatgaatggagttaatttaaaaatcttcgccttctgtaattttggcttcttgcaaacacgcttcctgccagtcctgctccgtcaggcgggaggcagcaaaccccagccctggctccaggacagggccgaaggcaggatagacggagcaacgggtccggctgccgccgggatgttgcagcacagggcctcctggctgcctggcctacaggccgcccggattcagccggagggcatggaccgggtggagtcctgcaaggcgagaagggacacagcgcatgcgcgcggcagggagggcgtttccaggagggagcggcctttgctcagcgcgagacggctgggcgccgagtgggacagcgctggtgcggagactgcttccggactccaggtaccgcgcttggcggcagctggccccagacttctgtcttttcagctgcagtgaaggctcggggctgcaggtgagctgtgcatcccgcaatggagaccttcctgctctgaattttcttacaaaactgcagaaatataaggggcgttgcttagcgggcatcccctcccccgcgccaaacctgtacagcaaacgatgatgcagaggaccttgaggggattttgcagggcatcggtcttacctccgcggtatcatttttctcctcctcccgagtttctgccttctggtatccctaaatatcccacctatcctgcctcctaccttcctggatctggggtggtggggtgggctcatggaccattgcaaaatgcttggcaggattttaaccttctcagcaccacccagaccccactcgaaaatgtgccttttgtgccctccaagagctcaagggtaggtaattgttatatctttagcatgtgaaaatgctttttatgtaacagttcaccgaaaatctcttaattctccgaattttggaggatttggggcgggcagcgaggctgtcccctgtcaccttgttttgtacctggtatggtaaatcgttttgctgcattgcatccaagatgcgttttagtccttccaaggcttgagcatcacatttgtgatgagagcgtgtgatgtgctgtgcacatcctctcccaccttatcccttccatgttaacacagcctctggctttaatgtgtgcttctggcctggccacatggctccgtcatggaataggtgattcttttgtctgaatattctctgtgagaacagaa

SEQ ID NO: 46700 - DNA, 3559 bp, Homo sapiens
ccaagtagctgggactacaggagtgtgccaccacacccagctaatttttgtatttttagtagaaatggggttttaccatgttggccaggctggtcttgaactcctggcctcaagtgatccgtctgctttggcttcccaaagtgctaggattacaggagtgagccaccacacccagcctcaattggataagttttaacacacatatacacctatgagactatcatcataatcatgatactgaacttattcacatcctcatgccctttggaaatccctttcttctgcctggccccataccactcatctgctttttgtcacaatgagttagtttgcattttctagaagtttatataattagaagcatacagcaggtattttgtttgtttggtgtctttcacacagcacaattatttcaaaattcatctgtgcttttttatgtattcattcctttttttattgcaaagtagttgaattcttttcctgtggccactctaacaaattaccacaaactaggtggcttagacagcagaaattattcttgcacatgtctagaggctagaagtccagaatccagaggtcagcaaagctggttctttctggaagctctaagggagaatctgttcccagcctctctcttggtttctggtggctgccagcaatctttggtgtttcttggcttgtagctgcatcgttagattctgcgtcatagaaatggacagtggaaaaggaaatacagagagactcatggattaaggtgaagaggatgagggaataagaaagacaaaatggaataaattggaaggggttaaaaggaagtgaggagaactttgcacctctgcctttcagtcagcattttttagttgttcttttggcaatttactccaacttggatttaaaatttatgagaaaaaaagtctctgttccagcaaagggattgcccaacctactgtgtcagtctaacgctgactccatgactgagcaccagatggcgcactgcccagagccaagggacctccctggtggctgtaaagagttcagtgcacagactcagccactcttaggtgactttccacaattgcaaatgaaactgagctcagcctactcaaccttcccttcctcttttagatcactgagaaagtctactgtcccaaccatatgccctttttcggagcaaaatttctcaaaacggctgccggtagctgctgtctcctctacctcacgtcccattttctcctcaacccactccagtcaggcttgtgtccccatcttctctcctcgggtcagcagtagcctccgtggtaccaaattcaatgtccactcttccatcctcttgccggactgttggcctcatgatgccacactttcttggacttccttctacttcactgacccctcctcttcagacgccttcgctggctccacccagccttctcttctccaactgctatctcccccgaggcgatgtcctcagcccttctctatcatcagaggtgtaacttccaatactaggtcataaaagacattgtagtttccctcttgcttacatactccaggggaagttagctgccatgtcctgaggacactcaagcagtcctacacagaagcaggcatgccaaagaagtgagatgtattgccaactttcagagaggaactgaggcctctgccaacagccatgtgagtgagccatcatggaaacagatcccagtcaagccctcagctgacacagcctgttagtgacttgattgcagcgtcctgagaaatgctgattcagaaccacccggctaagctgctcccagattcctgaccttcagaaattgtgtgagataataaatatttattgctttaagtccctaaacttcggggtgagttggtatataacaattgataactaatacacccatgctggcctcatctttcaatacttcctcgccttgctcccacaacactagtgtacctaaaacacacccaacttgttcctgaccaacaccctgtctcattgttccctctgactaagaccctcgctcactggatcttctggttcctgtcattcaggacttagtctttcctggcattctctgtgcctaaaacaattcagggaacaaagtaggtgctctataaacttttattgaatagaactatgaataaaatactttaaacagtatttattggaaccataatccttgagaagattttgtcaatttctgaggttaaagtctaatttttctgctaggtatacttagctgccctgttgacttagaatgttgcaactgtattcaaagtttcaaaggacaaatatattgaaacagctgctgtgtgcagagggaaggtgagtaaagattggagaaaggtaggaggcaaggcagagcaaagtcaacacagattaaatttgtgctgactcacagctgcctcatctaagcagctctaattggcagaatgttgctaaaacatatttgttcttcaagaatatcccagaaaactggcaagtcagtatacctaatggctcaaatattgacccaattcccccagtgcagagaaattaatatccacttcagttatacacacacacacacacatatatatataaactcactattaaaatggcggatggtgtaagtattaaataccaaatgttaattacttcttaacaaaaatcttcatacttttatgtcacagactacccaggagtgatagtcagaatgtttaacatctggtatggtaaatataatatataaatctgtatatatacccaaaattaaaaataaatttccctttattttctagctatgctaaactatatatagcataaaatggataacactttatagcaaatcagtaataaattattgtcataatgtccagtcatttataaactgaccgtgtcttcagggctacttaggttgacagtggatctctctctatgaaagccatcagctcctgttggtgcagacttttcctgcagctgtgactctcagtgttttcctagatccctgaactgctttctgctcttgtctcaatgaaggccagggaaaggagagccccagagtgcttcatcatccgttgtagtagtttaacccttccccagtttgtaaataggtgatatggtttggctgtgtccccaccgaattctcagcttgacttgtagttctcataatccgcatgtgtcatgggagggaccatgtggagataattggatcatgggggcagtttcccccattctgttatgatagtgagttagttctcacaagacctgatggttttataaggggcttccccattctctgggcattcattctctcccttgctgcccgtaaagaggtgccttctaccgtgattgtaagtttcctgaggcctgtccagccatgtgaaactgtgagtcaattaaacctctttcctttataaattacctagtcttgggtatttcttcgtagcagcatgaggtcagactaatacaataggtatttcattaaactttcttcagccactctttttgtttgtttggttggttttttttgagatggagtctcgctctgtcacccacgctggagtgcagtggcacaat

SEQ ID NO: 46701 - DNA, 1013 bp, Homo sapiens
gaaaagaggtttaatttgcccatgtttctgcagactgtacaggaggagtagcaccaacatctgcttctggggaggcctcaggaagcttttactcatggcagagggtaaagggggagcttacctgtcacatggcgaaagtaggagcaagaggcagagtttggttataggggatggaggtgttatatacttttaaacaaccagttctcatgtgaactcagagtgagagctcacttatcaccagggggatggcccaagccatttgtgattatgtcaaacttgattggattgaaggatgcctggatagctgggaaagtattatttctgggtgtgtctgtgagggtgttgccagaggagattcacatttgagtcagtaggactggcagaggaagacccaccttcaatgttgggggggcaccatcactttggctgccagcatggctagaacgaagcccgtagaagaaagtgggataaccttgcttgctaagtcctctggctgccttctttctcccgtgctggattcttcctcccgctcctcttgcccttgtcattagactccaggttctttggcctttggactctggggcttgcaccagcggcttgctgggagctctcgggcttttggccacagactgaaggctgcactgttggcttccctggtgtgaggctttcagactcagactgagccactactggttctctcttctccagcttgcagatggtgtattgtgggacttagccttgtaattatgtgagccaactctctctaatagactcatatataggagatatatatctgtctctctaccttaccagttctgtccctctagtgaaccccaactaatacaccattcatgagggatctgcccgcaagatccagatacctcccaccaggctctacttccaacattggggatgacagttcaacatgagtttgggcagggacaaatatccaaactatatcaggcttttccataaccactaaccgggtatcttgtaactctgcccacccaatt

SEQ ID NO: 46702 - DNA, 1262 bp, Homo sapiens
ggtggcaaagcaatttacctccaatgattgcctttcatagtctagtcattatgctctgatttttacaggtatattaacatttatttttttaaaacaacctattgaggtagatagatctctaaattttgttacacacatgacctaatacaggtaaaaagagcatcggtggtcacagtcatgacagaaacttgtggaatcactgccagtacccactggtgctgtgccaggactgaccatctctattgtggtttgttctgtgtgtgaacttagtgtgagtcaaattgccaaagtcctgcctcctaagtaatcccaagagagtccctggcacagccatctcagtcatgttccttgttctgtctcatcattttacatctcccaggcccacttctatgcccaatattagcagtttttccagttactcccatgaaacataattctacagccctctccatgtgctgttgtccgactctagccacgtgtgccttacctgagactccacctaaaagatccccttccttggtgaaattatttatacagttacaaccagtgcaaactttttcttttgtgtcaaactcaggtttcacaatactttttaaaacaacagcttattgacatacagccacattcagtgctttttagcacattcacagaactctgcaaaaatcatcacattctaattccagaatattttttatgaccccgataaggacatctgtaccatcagcagtattcttcattttactccaagccccactcctttagccccaggcaacactaatctactttctgcctctatggatttgcatattctggacgtttcatacaaaaagaatcctataatatgtggctttctgtgtcttgtttcttttatgtaacatgtctttatggtttaaccatcttgtagcatgcatcagtacttcattctgtttcatgacaatatcgttccatcacatggctaaagcacattttgcccctccatttattgattgatggatatttgccttgtttccactttttgaatactatgaatattgttatttgcattgtacatttatcttcaatatttagtgtggttgtattttttattcttttgggaatatatctagttgaggaattgcttggtcattggtaatactgcaggaaaattttggaggggctgccaaaagttccattcaggatttatttggaatcatgtagttttatcacaatagtgaggaaaccctttggctttgctggtattgaatcaatctggctgtttcagc

SEQ ID NO: 46703 - DNA, 3235 bp, Homo sapiens
ggctaatggccatcaaagattctgccaccaagaggcctcttctgtaatttacctcaccccactttttaggaatcttgctaagtgtgaaataggtcatagctattgcaaagctttaactcttgcaactataatttcctttttctggagtaaatgagacaccatagggtagaatctcaatttaagaaaggaattagagtccccacactaacattatttttaaccaaaatctctggtttctgaaccggttttgtgggttcaatatcaccattttcatatattggcttcttgactttggacacattactgaatctctctgtgtctgagtattctaatctatgaaatggatatacttgtggtacctatggtacagattggtaggttggtatgaagactaaattgcaaagtcatacaaagcacttagaaaagtagcaggtctctagtaagtgctcattaaatataactaattattagaagtttgagagatagctgctatttcagcatgtcatcctttaaaaaaatctaaatcaatctaatattgatgaaactattctttgttattgatctacatccagtaacttaaaccttggagtaaattacaccttgtcctgagacaagagacattggttggaatggcagccagcaacaaggctgtctcaatttgatcagaagctcagagtggatgcaggtatttaatataaataggaaaatcagttgtgacacaacttttcacaaaggtcatcaaaaccttttacaaaaaatactcctgaaaaggcatctgtccagcaactccctgttcaaacttggcctggtgtcacccttgttattgatgtttgcagtgaatgataagtatttcaaaacatttacttaatccttcttattcttttgctttaaaaatctttttcttcctttatctccctaaggacatacatggtttactatggtacacacgtacccattacaaaactttgttcccatataaagagtctctttctgtttattaagttgacacaatatatccaaaagcagctgaatgcacaactcaaactgtcatccaagcacacaaagaaggcattgatgtgagtattaagcagtttttttttattgtactaaggacacatttaaaaatatttttctggtgacctagatgagatggtgtgaggcagtgtagaaagatttataagatcagtacttactttgttaaaggttatcgccctcgtggctcaacaacttaatttgaggtcctaatgtggttgataacctacacgttcatttcagtagctccctcccattgaaaggaatagattcaagttaaaaacagccactcccacatgtttcagggccacaggactgcctactagattctaagaaaaatggcaagtcatcctcttatcacaaggtaactggttaatatgttccttttcaaggttggcaataaaagtttaaccaaaaatttcagcagattttgctctctttataagtcagtagaaactggctttttgaagaaactcacttttcgtgacttggatgtaaggactaaggcagatgagaaatctctgctgggggcatagctgggagggcatgtctgtgaagggcaggctgatggcactctggaagacactgggttgccacataaaatacagggcacccaggtaaatgtgaattccaggcaaaggatcagtcactttttagtataagtatgtcccaaacactgtaggaaacatgtttatactaaaaaagtattgcttgtttatctaaaattctcatttattttgctgttttgtatcttatctgccaaatctggccaccctatttttatgttctttcctctctgcattgctcaaatcacccttcctggcctctgggcctttgcacatggcatttgtcctgactggaatactctactttcacttcctgctgtattttctctattgtgtctttccctgcattaatttgacatgatgtattcaatatcagatttccccttagaccttgagttcttgagagcggagccttcttgtttgagtccagtccttattgtctgggacaaaacatggacatcataggagctcctaaaataagatagtttaaaaatttacatggaaaaattctagcaaatacaaaagtagagggaataatataacaagcttgaaggtacccatgacctgcattcatcaattgccagcaacatttttttatctatgcctggcagtggattaagttatgttggcttccaagaaagagaggtccatgtccaaatccttgagtcctgtaaatgtgaccttatttggaaaaaggctctttgcagatgaggttaaggaatttgagatgagatcatcctggtatatccagataggccctacatccaatgacaaatgtccctgcaacgtagagaatagaagacacagacacacagagggtgaggtgctggaagccccaggcagaaagtagagtgatgtggccatgatccatgaaagtccagaaatgccaagagccgccagaagctgtaagaggcagggaaggattgttctctagtacttccaggggaatgtggccctactcacaccctgacttcagacttctcgccttcagaattgtaagaaaatgcctttctgatgtttcaagccacccagtttgtaggaatctgtgacaggagccacaagaaaatgatacaaactcccacatactccctccactaccaggggattcttttcaagcaaatcccagacagcatatcatttcgtctgtaaatactagtattcatctctaggaaggaagaacttcttttctaaacataatcacactatgattgtgtttaatatgataatctcttatcatattaaaattctataattccctaatttcatcaaagcttcagcattctagttcatgtaagtgtcccataaaaatttcttagcagtttgtttattttggtcagcatgcaagcaaagtccttacaaagcatttgagggatatgagtccattttttttagaaattaatgaatgaatagagacaggcagagtgtgtgggggtttgtgagttctcaaagcccaatctcatatacccaggttctggagttgcatagagctgtgcatgggtctgtgcagatgtcattgtccattggtgatgaagcactggggatccagcaggccaagccccacaccacgagctcacagtacaggggagcaaacacagtggccctcaggtgttattagaggtgaaggggtggcctgcccc

SEQ ID NO: 46704 - DNA, 3695 bp, Homo sapiens
gcaggatgtgggtggggccagataagagaataaaagcaggctgccccagccagcagtggcaaccagctcagttcccttcgacactgtggaagctttgttctttcactctttgcaataaatcttgctgctgctcaccgtttgggtccacactgcttttatgagctgtaacacgcactgcaaaggtctgcagcttcactcctgaagcctgagagaccacgaacccactgggaggaactaacaactccagaggtgccacattaagagctgtaacactcacgcgaaagtctgcagcttcactcctgagccagtgagaccacgaacccaccagaaggaagaaactctgaacacatctgaacatcagaaggaacaaactctggacacgccgcctttaagaactgtgacaccgcaagggtctgcggcttcattcttgaagtcagtgagaccaagaacccaccaattccggacaaaacatcgtgactattttttcccctcatggtattaatttttctactataattaaattctcatagtctagttttctaaattcttcatttttgcgtttctttaatgattgtgagagttgtcagagtcaaaaggagtcacaatgttaggaaaactctgacaacagagctgaaaaaggccataaagagaatgttcttactgtttatctgataacaaaacaaactaggaaaaacacaaccttgaacaaaggccatcgcaatcttaataaaagaatctgttaggacacttgctcagcaactgcctgttgaaacttggcctggcattacccttgttattgacatttgtagtgactgataagtatttcaaaacgtttatttaatcctcattttattcctataaaaatctttgtcttccttaacttccctgaatacatacatagtttactgtgataaacatatacccattacaacacttaattctcaaataaatatcttttatttgaaagggtctctttattatttaagttgaaacaatgtatccaaaagcaggtgaatgcagaacttttaaactgtcatccaagcacacagaaaaggcactaatataagtataaaacagatttttcttgtgccaaggacacattttaaagtatttttctagtgacctagatgggaggtcatgaggtaatgtagggagacttctaagatcagtatttactttgttaaaggctgtcacccttgtggctcaacaacttaatttgaggtcctaatgtggtgtataaactacatgttcgcttcaatagctccctcccactgaaaggaatagagtcaagttaaaaacagccactcccacacatttcagggctgcagaactgcctaccagattctaagaaaaatcgcaagtcatcctcttatcacaaggtaactagttaatatgttccttttcaaggttggcaataaaagtctaaccaaaaatttcagcagattttgctctctttacagtaagtcagtagaaactggctttttgaagacgctcatttttaatgacttggatgtaaggactaaggcagatgagaaatctctgctgggagcatagctggcaggggatgtctgtgaagggcaggctgatggcactctggaagtcttctcttactgggttgccacacaaaatacagggcacccaggtaaatatgaattccaggcaaaggatcagtcatttgttagtataagtatgtcccaaacactgtaggaaacatgtttatactaaaaaagtattgcttgtttgtctaaaaattcacatttatttgggtgtcctgtatcttatccgccaaatctggccaccctatttttacagtgttacctctctgcattgcacaaatcacccttcctggcctctgggcctttgcacatggcatttgtcctgactggaatactccactttcacctcctactgtattttctctattgtgtctttccctacattaatttacatgatgtattcaatatctgatttctccctagaccttgagctcctgagaacagagccttcttatgtcagtccagtccttattgtctgggacaaaacctggacattgtaggagctcctaaaataagatagttttaaaatttacatggaaaaattctggcaaatacaaaagtagagggaataatataacaagcttgaaggtacccatgacctgcattcatcaattgccagcaacatttcttcatctatacctggcagtggattaagttatgttggctcccaagaaagacaggtccatgtccaaatccttgagtcctgtaaatgtgaccttatttggaaaaaggctctttgcagatgaggttaaggaacttgagatgagatcatcctggtatatccagataggccctacatccaatgacaaatgtccctgcaatgtagcgaatagaagacacagacacacagagggtgaggtgctggaagccccaggcagaaagtagagtgatgtggccatgatccatgaaagtccagaaatgccaagagcccccagaagctgtaggaggcagggaaggattgttctctagtacttccaggggaatgtggccctactcacatcctgacttcaggcttctggccttcagaattgtaagcaaatgcctttctgatgtttcaagccacccagtttgtaggaatctgtgacaggagccacaagaaaatgatacaaactcccacatactcccaccactaccaggggattcttttcaagcaaatcccagacagcatatcatttcatctgtaaatactagtattcatctctagaaaggaagaacttcttttctaaacataatcacactatgattgtgtttaatatgataatctcttatcatattaaaattctataattctttaatttcatcaaagctccagcgttctagttcatgtaagtgtcccataaaaatttcttagcagtttgtttattttggtcagcatgcaagcaaggtccttacaaagcatttgagggatatgagtcaattttttttttttttttttagaaattaatgaatgaatagagacaggtagagagtgtgggggtttgtgagttctcaaagcccaatctcatatacccaggttctggagttgcatagagctgtgcatgggtctgtgcagatgtcattgtccattagtgatgaagcactggggacccagcaggccaagcctcacaccacaggctcacagtacaggggagcagacacagtggccctcaggtgttattagaggctcactgggactctgtggagggcagaggacagcccagtgctcctgggaagcaatgaggtagtgttaagtgtgtccactgggaaggagcttgccaggcagggctagcaaacgcacccaggcaggaaggcaagaggccccaccatgctcggagagttgactgggctgaagatcacggagtgaagacaggtgtgaggatgcattgtatatgcagtcaggactcactgaagaattctgtgagtatttttccaatttgtattttggaaaaactactctggttgtaagtggagaagagactagagcaaagtgaagctgcaggtaggaagcctgtgtgtttgtctgctccctcaaccacctctgccaactgtggggaagctccctctaagaggaggagagtgcaaattgcagaagcccaggtgtcctgggagagattagcactatgggaccagtatgggggtggagctagaaagcactcctaa

SEQ ID NO: 46705 - DNA, 562 bp, Homo sapiens
agaagatattgatattcactaatcagtccacctggattaacaggaaattttcagtgaatgtccaagcagtggggcacatcagtaacacagccttgcttagccccatgaggtcatgtagtcccatggttctcaaccagggggattttgctcctctgctccagaggacattgagcaaggtctagagacattttgggttgtcatatctgcggggagggaaagggggttacaaatcagataggtagaggccagggatgcctagaaacatcctagagtgagcaggacagatctccattcaaagaattacacagtttaaagggcagcaacagtcggagcctctttcttagctatcctctatattggccatgagttggtagaactccagagacagaatatgacttgtctttgagctaattagtggcaaaggctcaactagaatctagttctcctgacattcaaactaatttattctaattatactaaacctgagttttgtattttcacagccaatatagaattacagtgtcacaatttacaattgtgtgttgactacttacacagagaa

SEQ ID NO: 46706 - DNA, 737 bp, Homo sapiens
tggagtgagagtgagcctcactgcttctctctccagctattcatagctcttgggcagggtctcactctcaatacttgatgaaaatggttgctcctctacagcatcctgttccttacctgaaaatgcagacattttgctaacctttcttctatttcttgttttcagcatatttccttcttttaaaaagtttcattcaaactgactaacattgattgagctgtttcggtgtctcaagcaatagtgatggcttgtagcagaaaaatatttggttggatttggtctctgccctaaagtggtttagatctagtcagaataacaggcttctggccaactgacagaacagaatgtgctcagcagtgatttcactttaaaggattcctagaaatttcaacccgggaatcatgattctgttaaccaaggaaatcagagaaaggggagaaggctgccaggctgagaaaactgaggactcttgcccttctgcccaggtgggctccttctttccagggtagcatctcaatctgcaggttcagtagattttgtacctcccaaatgtctgccttcctacccttcaaattagtatcaatcctcattcttgtgcaaacattgccttgcaacatgcatttcttgtcatttcagtatcttctcacatgggtgttgtattagtccattttcacactgctatagggacctacctgagactcgtaattgataaagaaaagaggtttagtccactcata

SEQ ID NO: 46707 - DNA, 1297 bp, Homo sapiens
ctttttgaatggtgataaaaatgtaccgtatcctctcaaacaaaaggttgctataattgcaaaaataataaccatattttgtttggaaacaatttgagtaaaagatctcatcctaaatttgcaaactgggaactgcccaaatcagagctgaattcatggcagaccaggaagaagtgctgttcacatccagttctctggagccactaatggagaggggtatgggcccaaggataacaaggccatccctgccagggctgctcaagatctgattatcaagagatggccaagggccagccatgtagccaggaaggctgagcaagcagatgagtcatgtgccaggcaatatctatacaatgtggagagtactaatgtcttcattttagaaatgagggtcacacagataaaaacttgcttagtcatccatctggtaagtgaaagagccagatcccacatctttccagtgtcaaagtccatgctttttttgttatatcatatgcctctcccccagagtaaaagggaagaagcaaattgtgatcttgggcttgaagagaacatgaacaaaagacaccattcccggaagtgagtgagggtctcaaatctgaagcagacagagatggggggtaaggatccttacgtacagagagcaaacaggggatgcaagatcatagaacattctcacatctggagagaacccgagactgtgtttggaaagatgaatgataacacaaggcagtgttgcaaactttaatgggtacacaagtcacctggggatcttgccaaaatgcagatgctgattcagtaaggctggggtgggacctgaaactgcatttctaacaagttcccaggtgctgcccatgctgctggtccagggccacactgtgagtaatgagtgtaaacaatgtaagccaaatgggcggttcagacacaagcgctctctgcaggtgaagccctccacaccaggtgggggacagaaggcgcttatggacagcagctgagaaatcacagccatcagtgcttcagacacaaaggcctgcagaatgcctgtgattttttgttgctgatatagttcaactgtggttcgtactgttttacttcgcaaaaggcatacaatggtacctttgaccagaattgttgacctgggagtgttatctcttttctattggctgaaatgttttaaaatttccaatcgtggttaaactacccatgaggcttcagagtgtttatttacttgtaggcatttgtgttaaaggatggagaggctctcactctgcctctccttctccagagtaaaggaact

SEQ ID NO: 46708 - DNA, 2213 bp, Homo sapiens
gattttggtggacgagaactagaactgaacggtgcttcaaaacgtatttttctttcaaaggtctcaaaagctgtatgacaaatccgtgaagaaacagcatataaggtacctcgactccggcggcagctaaaacccatctcacggactccatccggcctcttccgttgggatagtggagcttgggccttgctgccatgatagcttttcaggctttctgaaatacaaatgcagcagctcgtcgcagaccaacagtcccaatttcgcgtcttcaacccagtgctcaggggcgaaatgaatattcaggattttggcacgggaaactgttctttatttttgttgctgcattttccctcactcaagaaaaaaaaaccaccattttaaaacatggagaaaaaaaccttggcttttatatgatttctatttatgacttcttatcctggatcttgggaagctggggccatttgttgtaaaaacatatgtgctagcagtacgggatttcacaaattcagaatattatatattttgacctcgagaatctcagattttccaaattcagctgggggatagggggtggcaggcgttgaagagggtagcgaaggaaaatcgcacagccactggaagctcttcaagtattcatgcttttacatacatcatcatattttattatcacggcaactggaaggtgaacaggccgagtactactactgtctgcaaaatgtgcgtccaccgtcacgcatgcggtggctgcgccccccgggtcccgcgtgtccaccacccctacagggagatgagcccccggccttgtaaaacgagccgggggccagggcttggccatctgagatcgcactctcccatgctcgtcttccccgctcagcccatgcaggggcgtagcggcagcccagccaggcccggggacgatccgagcccaccttccaccaatgcattcagactccgcagaaggggtttaaaaaaaaatacgcacactgagccaagaaggaccccagctccagccaaggggcccacctctgcccagactggatggagcaggaggacaaaggacaagaggaagaaaagacaagagaaggactgaactgggggagtgagggaagaatgcgagagtgagactcagagagtaaaggggagggaaaaaaaagaagagagaaagggcgaggaagggggcgaccgcaggagggagacagacctggagtccactcggaggcctggagccgcacaaagcgccaggtcagcggtcccggctgggtgagaccagcaggcggctctagcgcgcgggagctgggcgaggctccgggacgacctcaccaatggagactgcagtatttagcatgccccacccatctgcaaggcattctggatagtgtcaaaacagccggaaatcaagtccgtttatctcaaactttagcattttgggaataaatgatatttgctatgctggttaaattagattttagttaaatttcctgctgaagctctagtacgataagcaacttgacctaagtgtaaagttgagacttccttcaggtttatatagcttgtgcgccgcttgggtacctcggatgtgagggcgatctggctgcgacatctgtcaccccattgatcgccagggttgattcggctgatctggctggctaggcgggtgtccccttcctccctcaccgctccatgtgcgtccctcccgaagctgcgcgctcggtcgaagaggacgaccatccccgatagaggaggaccggtcttcggtcaagggtatacgagtagctgcgctcccctgctagaacctccaaacaagctctcaaggtccatttgtaggagaacgtagggtagtcaagcttccaagactccagacacatccaaatgaggcgctgcatgtggcagtctgcctttcttttgacccattacccatctaagttagatgcttttttaaatgttttttaatttttaaatttttaatttttttcattatttattttttatttttgagacggatctcggctcactgtaacctccacctcccgggttcaagcgattctcctgactcagcctcccgagtagctgggattacaggcgcgcgccaccatgcccggctaatttttctatttttagtaaagacggggtttcgccatgttgaccagggtggtcttgaactcctgacgtcaggtgatcctcctgcctcgtgctgggattgcaggcgtgagcca

SEQ ID NO: 46709 - DNA, 789 bp, Homo sapiens
tgatgtttttatgaccagaaatatgctgtaggaacttaactcttgtttatatcaattagcctatggcaaaattggttttgttatatgttgtttggcataaagtcacagtttccaaagaacctattgataagttaaatgaggacttagtgtattgactatgttgccctttacaccgttcactaacccttggtctaaataatgctcttttctaatttcttatacaactagagatattatgcttggaaagtaaatttgtcactgactcagaaatgaatcagctccaattcaatgcttttctgctgactaaccattctgggcaaacactgagagataactgtggtcgatgaaaattgccaagctatgaaaatttcgctaaatatactgtgttctatacacttgagctacaattaacaatgtaaacatacaaaagctaagaaatgctaaagttctcctgatgcagaacttaagtgtgctccatgaactacgtgtggctaagcatcaatggtattattatcactactagacattcagaagctaaacaaagaactaggaattcaaggcctatgtgcagggtatgctccttttaaagtcattcagtttgtgtcttaaaaataatgtcattgatttttcatttatataattcagtctgcctataataaagaaactgtagtaataatgtaaagtgactagtattcctacaaagtgtccagatcacaaaagacaaggacagactaaggaactgtcacagattggaggcaattaagcagacatgccaaataaatgcaatgt

SEQ ID NO: 46710 - DNA, 970 bp, Homo sapiens
tttaccctgccatgtgtgaaactgtagatgagctagaacgagagtccccagcttaatgaaaactgccgagggtggcaatagtcctgcttgcctgtgtttcaggggtgggcaagataagggatagtgaagataggggagtgactaagagcatatcacaagttcatgtagatagtaactttcatgatactggcaaataagtagctggacgttacacaataatactttacctttctggttctaacgcattatcttttacggtagttacaaggacagccacatgttatcagtatttatatgctattacaacacatttgactaaggagctgatctcagtgtaagatgctttgctagcatgtatacaaaaaatcaaaatgaattaaaggaagtaaaggcttaatgtaaaaataaaatagggcagggataagcacgttttttctgtgaagggtcagtaaacaggataggctttgcaggctctccatctccgtcacaactccactctgccattgtagcatgaaagcagtcaaagacaatatgtaaatacatgggcatggctgtgttccagtacaaatttatttacaaaaacaggcagcaggaaggactggcacacaagccatagtttgtcaagccctgaagatgaggaaatcccccaaataagcagaagcactttagtactctccatagagccctcacttacccctaggttacagggctacatacaagctgtgtttaaccttagaatataagctctgtgaggtcagaaacgttgcaatattcacaactgtattcccagtactcagttcccagagaactggcatagttggcacaagtacggactcacaataaagacatgttcaatgaattaactaatgaatgaacaacttatggagctttaaaaggcaatcctgaccatagatgattttcctatactaccacgtccaccctcactgtcatcccgtcacgccccacttct

SEQ ID NO: 46711 - DNA, 2003 bp, Homo sapiens
gcacagttcagcaaatgattgagacacaaattcttcttaataatttatatgttgactacagaaatttaaagctcatttaaactttatattcggcaatggtgccattcactattgaagcacaccctgaaactccactcactgggaaatgtgagaaatgaaaactgtaactatcaaacttctgttactacaaagagttctaccggccaaacaaacaaacaaaaaaattcaaaccccacaagcgcccataccttagagaaatccatcccgcttgtaaaattcagtgtggaattccctcagcctagcacagctccagcaaaagcaggtcttatttagttgtaagtggaaaggaatactcttctctgcagaatgatgcattagctatattacatataagtccttaatgttagtgtcaaagtcaaactttaaaaggttaacattacaaaagaatcagttgttctggaatatccgtcaatatccttctcataacagctactcagattagtaagaaagaaatcagaacagaaagaaatccagtaaaaaatggttgcaaataagtactcgaggatttttgctcagaccccttgtgggacagccaagggcctagtcagggaaattccgaaagcaagtcctcaacgtgccccgcaacgaggcttcaaattagctagggtcttccccctccttaagactaaaagataaacacccgtcaaaatcctccaggctccgagttttcataccaggaaggagagatccacaggatcgcggaaagaaactataacccattagcctcttcctgcgcctccgatccgtcgcggggccacggccaggggtctccccgccgccccatcccagcagctactacagtgacaggtcgcccggcagaagcccctaaatcccggagccccacttactggcgccgcgaacgcaggcgggggcccgcccctgaggtgagcgcagctcctcgacgagcggggcgcagccgcccgctccggagctggaaatggggacaatccctgctaggaccggccgagggctccgtacagggacgcccgcgaggtccggcgagtcgcacgggccgcacggcgcatggtagtgcagcaggaacccggccgttttccagcctccggcaggaaaacaaacaaaaggctgggtggcttctactggggacgaccggccgctttccctgggaaaagttaccctgcagctcccctcgctggccctgcgcgtccctgcactgcgtcctgttcgccctggctcgcgcggccgagccgccaggcgcagctctgggccgagggcagcacagcgcccagggacccctaacccccgctgaccgcaaggcgatctccgactccgaacgaacgcctcgttgcagatcggctcgatcaaccatcaagacttagaaatggaggctgtcgatggacgttctgagcacattaaattaaagataatcgttgtgaaaacatttttctgatttgaaaaaacgtagttgaggtggcacgacattgtgaaagtaatcaatgccactgaattgtattcaaagtggttaaacagcaaatttcatgttacctttacagaaaaataaaatgaaaacgcaactgattgcctgttagcattcctttgaactcttaagagtttttatgttgttagcaagtagttgtaaagactggactcttaacccagatgggaaactgactctagtcagatatcctctacacaacaatcgtcctctgtaactagttatagggaatctgacactaacacgtaattttataacacattgatttatgtcataagtgatattgtagacattaccttaaatcatccttataaggctagagcggtttgaataaagaagttgcttccaggtccctgattttaaatttacataattgttctaagccaacagttcttaaacattagcgggaagcatcagaaccacctggaggacttgttaaaacaaactcctgggctgcactctcagagtttctggtgctaatgttgctggg

SEQ ID NO: 46712 - DNA, 986 bp, Homo sapiens
ctcctggtcagaaaaaactgttgtggaagtggcttctatgtaaatatttgcagaatgagcaaataaaccactaaaatcacccagggcctgccacattctgtcttcccaggacaatgctctaaatttaagggtgggactctagtcagaatctgaactttattctttctgttttgaacatcagaattaaagtttagaagttggttctgcttttaaaatttgtcccattttttttccccttcatcgtgacattaaattgtttagtttccactgtttctcccccagtcctcccctctccctacttttgaaggtctctctctctctctcactcatcccaggaggttggaaggacccatttggccacaaagacagcatttccacctaccaacccagcccagatgtctaagtccagcttagctgtgacccctccttgtggactccatggcagagacaggtggacaaaagcaatgactgttaaggtgccatctggggtcaaggccacatacagtctggcagcacctcagccaattgccttcacccctatcctactccattgacaaggccaggaatatcttctcccttgcctgtctgagcttagtcctcttcatttacacatttcctaattaaatagtacccacaagtgaacaggaaagcactcccctaaatggagggccattagtgtccttgggatcagctaatatgtcagtagttgtttgtagaaaaatactgaatagtagcacagctgttactatttatatgtaaacacaaacggtggctggccgtggtgactcatgcctgtaatcccagtgctttgggaggctgaggcgggagcctcccttgagcccaggagtttgagaccagcatgagcaacacgggagacccctgtttctaccaaaacaaaacaaaacaacctccacaaatattactaatcatatgcaactaacaacataagctattaaaaatatgtgtgaccagtttacattaagata

SEQ ID NO: 46713 - DNA, 1545 bp, Homo sapiens
gtcagagggaagaaacacagaaaacaaatttagaggatcagggcagaaagtccactcagctaaaattaaaagctgcccacgaaatcattgaaagtggaaaaaagaaatgaatgaagtgatacaatacattttcttgatggacatgagactccagaatgaaagttctactgagtgctcaacacagtaagtgaaaaaagacctgccctggacatgccactgtgaaagttcaggacactgggaatcaagagaaaacattcttaaactcccagagagaaaaaggaaattataagcaaaaggtgggaaatcagaatttcactggattgttcaaaagcatcaacttcagaaaatgagaagaaaatggcgtaatgcttccaaaattccaagggaaaagtatgttcaacccagagctgctagagtgagccacgattctggagtgacccatgtcagttaagtgtgagggaagaataaaaacattttgaaacatacaatggctttgaaaattcactttctgtgcactggaagctactggaggatatgttccaccaaaatgggggcaagtgaatgaaaagaaagcattccagagagcaaggaagaaaagctcaggatgttccagcagggcaggaatgcagaaggccatattcatgaacaaagaatctgggagagaggtcatgatggttaattttttttaagctatgatgattaattttatgtgtcaacttggctaggccatgatacctagatatttggtcaaacaccagtctagacattgctgtgaaggtatttttagatgagagtaacatttaaatcagtagactttaagtaaagcagattatcctccatcacgtggtctcattcaataagttgaaggccctaagagccttcagagactgacgaccctcaaagaaacagaaattctgcctctagactgcctttggaatgaagctgcagcagccgctcttccctgggtctccagcctgccaggctgccctgcagattttggacttgccagcctgcacaatcatgtgagccaattcttcaaactgaattcccctctctctccaccgcccccacacaccctcacactgctcccccttcccacaacacatactcccttagttctgtttccctgtagaactctgaccagtacagaagtacatataggaaaaaaatggaaagcaaagctttgtgaatatagaaaatattattgctgggcattgtggctcatgcctgtaatcttagcactgtgggagggtacggctggtggattgcttgaccccaggagtttgagacctgtgcaacatagtgacacccctgtctctacaaaaaatacaaaacttggctaggtgcagtggctcatgcctgtaatcccagcactttcggaggccaaggcgggtggatcacctgagatgaggagttcgagaccatcatggacaacatggtaaaactccatctctactaaaaatacaaaaattagctgggcatggtggtgcatgcctataatcccagcacttcgggaggccgaggcgggtggatcacctgaggtca

SEQ ID NO: 46714 - DNA, 811 bp, Homo sapiens
cctcccattcctgtgcctggaaagccctcagatttgcatcagaaactttggagaaggtttcctttggttcacatggcaaactgaaaagtggctgtgctaaagggtacactcatcccaccaatctgtagatatggctttaattaatttgccccaagatttatgggaagagaggaaggagacagtttttttgtttttctgttttttgctttttttttttttttgagacagagcctcactctgtggcccaggctggaatgcagtggcgcgatctcagctcactgcaaccgccacctcccaggttcaagcaattctcctgcctcagcctcccaagtatctaggattacagaagcctagcgccatgcctggctaattttcatatttttagtagagtcagggtttcaccatgttggccaggctggtcttgaactcctgacctcaggagatccacccgcttggcctcctggagtgctgggattacaggtgtgagtcaccacacctggcctgaaaaggacagttttatgtgtcaccatgacttcccatttaaaatcaatataaaaactgtagcatctctgctggttaatcattaaataaaagaagcattactggtatagcaatattggtatgatgcatttttaaatcacacgctgcagataactgattaagtgctgtcattgctctaacaatgcaatgtacaaaaggatagccaggacacttcgcagggcctcaagagcctccacctgtatttcttcctcattcctcccaagtttacttgtcgcaggtagaaaaaacaagaggcggctgagggcggtgg

SEQ ID NO: 46715 - DNA, 636 bp, Homo sapiens
aattaagtcaatccagatgagatgggacgtagagataggaggagccatcaatgacactttcaaagtagttaacagggttctgtcctgacagctttcctgcccaagggtgattggggaggctgctgacaccaattcatggctggaaacgaaggcaccagctccctgaaggcaccagctccccgaaggcaccagctccccatacccatctgccaataaccaggtcagccacctttgcccctcaatagttacaaaaccttagcacaaggtcacttctgcaatccaacaattaagattttaacatacagtagtcccctcttaatccacagttttgctttctgagatttcaattacctgaaatcaaccatggtctgaaaatacgaggtgggaaattccagaaataaacaattcataagttgtagattgcacacagttctgagtagcatgataaaatctcccgcagtcccactccatcctgcctgggatgggaatcatctctttgtccagcgtatcctcaccgtagacacttcttcacccttgagtcactttgtaaccttctgggttatcagatcaactgcctcaggatcgaagtgctcatgttcagataacttttactttacttaattgttcgatttaatt

SEQ ID NO: 46716 - DNA, 569 bp, Homo sapiens
aaaagtattctgagatcaaacaggaggaatatgtctaacaaaaataagggaatcaatcatttcactttttaattagatctttcagagggctgtagtcagggtcagtttctatgtaatgaggaaataaagaagctggaaacaagagtgaagaaatgtttcaaagtgaaaatacagattggtggggcaggaatggagagggtaacagtagtggccccggaaaaatatgaagcccagtaattgcgataaatgacctattactataaggacaaatgcctaggacatagtccaatttgagaatctaggctaacatcacggcaacagaaaagcagcttgattaaacataaggtaaaatttcagtccaagagtactgaaccagcagcaggctaccaaaagagactgtggaatttagtatttggagatattgaagaatcctgttacaagccatctgtcccaaataatctgagtctaaaccatcttgaagaggccctgtggaagctggcaggcacaggagcactctttcatctttataaaatgaaatgtgttctctacaaaagcacacgcaagaaacg

SEQ ID NO: 46717 - DNA, 2301 bp, Homo sapiens
tcagggctaggctggcatgcacaaggaccagaagccatgacaggagtgggcagcacaatgggaggccttctgtcctccactccgtctggtgcccaggccttgctcagcagtagacagaggtcagtcatgagagctttcttgagacctttcagagagcttgtggccaacgggctaggaacagaagagggtgccaatccttatctgctcacactgctaccatctcctaaccctccttcctgcagccctcctgccagcaacgtgcccttttcattcccatcttccttgctgagcctcatctgctatgccacatgaacagtacaaaggtctcagcaaatgaattcttcatcaccaggctaggctggcctgccctgttaagtaaattgggcacttgctgagtggtctgtgggctgagctatactcttttgtactaaaggaatgggaggcacagggctatgcaaaagtcttgacactttgcctagtaatctggatttatgggaacggcatgacctactttgcacaagatgcccaatcacactgccaggtctgtggttggcctcactggtgcggtttcctatcttctgagctacggtgggccaatgacataacttctcaataacccgaatcacactacaggcagcctgggtgagctgggtcaagtgggaacacagctgctctgtacaattgtactagcagggaccaagcccaggcactaggctccatggaaaaggagctttagtcctacatgcagcaaaagaataagctattctttgatctggctggttccccacacactgacaggaaaatggacagggctgggagtggccagcacttcccaggaaaaagaccacgctgacaccaagccaaagcatcgattcccatcctctttaaccaggagtctctgacctgcactcaacctagggggcttcccagaattacaggttacaacagggagtagtaacagggcccagtgaaaaaaagtcccaatgaaaacagtcttccaaagctattcactagttcaagagccacacacagaaaataatgacagtaaaaatggattacgggcaggtaaattagaaccaattttaaagaattcctttttaacgcacattttccaaaagacactcctaatttaaaaagccgcttcccattataagattctggagtgtttttggtaaccatgcaactatattataattgtgtctcattttaagtatctcactacaaaaaactgactggagctgaccattctctttataaactaccctatatttaaagatacagctgaaaggagcaagagagtgtgagggagttcagcacaccttcgtctgactcacccccaccaccatggatcagttctgcgctcctggctagttccctccccatgtactatactaagtgttgtagaattttaggatccttgggcctgaattcgagagaaagactggaactaccatagcctggaatacaaaaacctggaaatactaacacgagcagaacaaagaacaaaacccaaagccctaaagagagtcctgctcatgtggaaaatccatctgtccactgttcaactccctccaggggcaagtatatgcccaggtgaatcacgtgtgggaggttaagtcaacatcagtgctcactttgaactaataatcaaactagttgctagaagcatgtttgaaaaaagacactacaataagctttacagcaaatcagtccccctccacctcctttccacttggctcccaaggacaacagaacatgaggggatgggggtaggtggcaacaacggaaggaggtggttggggttaatgaggagaaggcacagtcacaattctcaagatgaagtacgtctcaaggagagtgcaaatattaagcatcttggccatttctacctggggtaggagagagtgacaaagctgcccagcaaaggaaaagtactgggatcttaaggcaaatctgttttaaaaggtatcaagatttttaaaaatatacattatagtaaagagttggtataagaattatattaaagaaaagtttatttcctaaacccacaaccaggctgtttgctgactctaaaacagtaaagatatttttagggccaagtcttggtttgtctggcttctaaggcagcagtcagcttgctttgaaagctccctttcctgtggtatcagtcaagtcacattccttttgatttaaaaacgtttagctattgtctagcttaacttcatcatatcctgctttactttttttttaacggttattgttcacctaaaaatgagtcagctgagtttacaaacccatgtg

SEQ ID NO: 46718 - DNA, 1471 bp, Homo sapiens
acaaatacacttgatcttaaaaactcagatatagaacattttttcagcagttggtagcgggagggtaacatgattttagaactttattctaggggaattcttattcacagctaaagaagaaatgtacagtcaagttcaaagttcttcccccagttctcagcagagtcaagacaaggaccatttacaacaatccacacaacaaacgagcattcagaaaagggttcaccactgtagaaaattactcttgtagagttttatcatcttaaagctgccaacttaattttcttttgaaactagaagaagaagtggtgataacttttaattgagtgaagcacactgttatttggaaaaagacaacgataattcacacacagaatgctccttgctggtgggtgaaggccagattgctgcagttggacttagaactccactttcacatagaactttgctgacagtaactaattaatgcccacaaggctgcagtgaagcaaggtaaaaaaaaatccatcaggtgcaggagttagtcatcctcctgactggttttatttctgtgtgtccaatgattctcagaatgactgcttttcaggctaccagccatttgaaaggcagttgactcactgagttaaaaactatttaatgagtgtctactttgtgtcaagcagtattgcttgtgaggaacaggaaagtgacagagacagacatgacctctgccacagtacaaattagtaagcagtgtgcaaagacatctgtggctcaaccacttttgggtggtagtggttaggaacatacactttggagccagagagcctgggttcaaatccctgcttcaccacttactagctgtgtaaccttgggcaagttacttaacattctgtgccttagtttattagactgtaaaatgagggtaattacattaacttcctcatgtgattaaatgagttaagatatgtgaaatgcttagaatagtgtgtggcacagcaagtaccgtaaaaatgtttctattattatcatcattacagagacctttgacaatgatcagtttcatattcaatgtttatggaagagttttgctaaggcataaactggagttccctgcaaggtccatggcagtgaaacatgctcacatccatacctcacagctctgttattttctatttggcatggactcacaaatgatacttgtgaatctggggatttataaaagactctagataaattcctctgaaatgtcaaggagatgctggtcactgacttctctgtgagtagaagagcaggccagtgtctatcccaaccttagtacagagcagaaataaatctgcatctgataagcctttttttttgtactcctggcaactagcatatgatagatggccaataaacttattcatttaccataactgaaaagggggctgagttgccaaagtcacagaggttgggtggagccagaatttgaaccacatctccaactcta

SEQ ID NO: 46719 - DNA, 519 bp, Homo sapiens
taagctcttttttgggggatgctgttgcagaaatattactatcagtagaggagatccataacaccattactaccaggagtcaacagtggccaagtctataaagctctgtgagaacaaggaacgtatctgtcttgctccttgtaatccctagtagctgttcttgggacacagaaaggaatttagtaactccctgtttcatcatattgaactggggcagtatggaacactgctgacaggctgctgctgctgctgctgccaaatcaaatgtttggccaaggacaattccatacattccttggaaggaggcaagatgggtgataggaagaacctgaacactggttgagaaacgtgggctctggctctattatcatcaatcctaaactgagctgcttcctattatattcgtttcattacctagactacaggacctcaagctttcttcaagtaaatacggtatctatgggaggcagagtctaagatgcccccaaagatcctggtacacctgatactcacaccctt

SEQ ID NO: 46720 - DNA, 2439 bp, Homo sapiens
cagctcttccgtacaattctatgaagcacttcctgccacgggtcccgctatttaaaacaaattaggctgctcgctccccacaaatcccatctagcacctctcggttcctcagtctagctaataaaccatgcactggattcttccgaaagagaccccccgcccccgaccccgccacctccgccactttgcataactggccaaatgcattctccaaatttgcaatcaaggagcttaattcacaattgtggatggggcggggggaaccgccaagtgcaagaacacggaacggttgcaagacgcagttcagcaagaacaactcttgctctaggcattgctccgtcgacccgaggtggtggggtgggagagtcttaccggcgtggaaacagtaaaaaggcacttttccttacaactcgcaagacaacacacactctagctcccccggcgcagagcacaaccgcccccccgccgcgcgcctccctcgcagccaaccgctcccgcctctccagggatcaggctcccagaaagggccgccccggtcgcccccgagtccccgccctctcgctttcccaccagcctcatccctccctgagtaccaagggctgccgttgtctggtttcaataaaaactgaagcggtcccgagctagcaggcttccctccgaggggcggacggaaggtccgcagggttaacggaagcggagagaacaggacaaaaaggaaaggccggagagtccccccagcggcgcccggtgcccgcagaccctcgcacaggctcttcgaactcacccgggtttcgccgactccaaagaaagcgcgctccctccgagagcgctcccccggctctcccgccgcgcgctccggcccgcagggcgggaggacccaggcggacagatccatccctccgcgtctggtgtgggcacggtgtcgtgccccgcggcgcctgtcagcgcgcacaggtgggaccgcagcacagagaacgctcccgagcgccctgcctcagcctcggcgtggggcgagccgcccgcgcccgcacccgcacccctttccccgcgcccgaggagccgggctgtaccccggagccggcggagctggaggccgcgggcggagcgcgggttgccccggcagctctttctcggcaccaggtccgagacctaacggcagttctctctgaccgcttcccggccgcgcgctcgcgcgggtgtcatggccgagcggcggcccccgacgaagtttcccggagctgacggctttaccttttagcccaaggggcggcagcagctttgagcagcagcaaggcggcggcggcggagggagcgcgggtggcagccggcgcagaggcggatgtagaaggagacaccggtggctaggacccgcgcgatgggaagaggaaggcgccggctatctacaatcagaacgtgggctgaccgtgacgtcacaatggcgcggccagccaatcgggacccgaaggatgaatcaagcgctatgatgtcatgcggcccgggagccaatcgcgggacaatagaactttcgtgatcgtaaattccagaatccgatgcggtggagagcctaggccggggttggcccctcggttccacgtgtctctgggaaatttttttcccctttcttcctaataagcctgcgtggaacgcagagcctgcgcaatagccccggtgaagttgtcgatgccctgaactctggtttttttactgccaggcgtggcaggagtctgtggccgcatttgggtggcagaagcccaccctcgttacggtctcctctatgagttatgtcatgctgaaggggatccacttcatcgttaaagctgaaagggttaaatgcccacggagaccgccggagtgaaggtctgcagttgaacaagataaaggaacaagaacaaaacgactcaaaactgttgtaaccataactcccttgcaaaggatttaccgtgtatttttcttagggattctgatttttctttggaagccactatcaactccatttctactctagaaattattctaaaggattgttaaatgaggaaagatggaatcagtgtcttttcagctaagcatatttaagcacttaagacaaagggggttcagggcataaacggaagatccttgctgtttttcactgatatttggataattaaagaccttcattagctttgtatcctactgtttccccattcaaaccccagagatttagcctttcttcgtgtgcccctcttgctgtattcttactcctctatgtgcatccacctaacagtcggctatttaatgtaggcaaatttattcttttttttctttttttttcttttttgagacagagtctcgctctgttgcccaggctggagtgcagtggcgcgatctcagctcactgcaacctccaccttccgggttcaagcgattctcctgcctcagcctcccaagtagctggaatta

SEQ ID NO: 46721 - DNA, 2849 bp, Homo sapiens
ctgactattctttgggaacttggtatgtgctaggaattggggtgataaaactttttaccaatatatggcaaaaagcgatgtgccttaggaagtgcaaaaaaagtgctgtgggaatccacatgtcaaagaggatgaggaaagggcattgtagcagtagggcctttgcaaaggctgtataccctcttcttaaaactgctcacctctcctcttcccaggtctcaattgagaagtcatcgttttaaaacgacaggtctttcccatacctggctaaaatcagtttctcctctacttcctcttcctcagccactactttactttgtccacagcacttagcacaatctgtagttgttctgtttactcatttttacctcctaccttccctattacacttcaggatggcagaaacaagtctaccttgttactggggtgtgccgggcataaagtgtgcgcacacttttttttcttcctgtttttcgagatagggtctcgctctgtcgcccaggctggagcgcagtggcgcgatcgccgctcactgcagcctcgaagtcctgggctcaagcgattctcctccttggcctcccaaagcgctggaatcaggggtgtgagccacctggcctgagtgactgaatctaaaatatggagtcaaaaaggggtattggtgtagggacagaaaaaaactgggtgtccagacatgaattccaatcaaaggagccgggccttcttggcacatcgcgctccgagaacccgggagggatccagagaggcggggacgccctttgtcaccggcctgaggggcgggcgtggcttccctttgcaaccccttcccccagtcttgaccgcaggcccttgagggccaccatcacttctgggttcccggaacgcggtgggcacactcgcgccaggcgcgggtaccagggcctgcctggggccccctcctccactcgcgcggcgtggacaccgttaactgcctgtggctcagggcggtgccgccgccacccccgcggcactcggctcctctcgccagccctgcgccactcggctcctttcgcccgccccgcgccctcggcgggcccgccccgctcccccgcggcggtcaccccattcattccgcggctgcacccaccaatcaccgctcaccaacagcgccgcatctggcgatggggcggggcctcgcgaggagcacgctcgcgccctccccgccttgagctcgctcccgggccgggtaattcccgggcaatgaccagacctcgtccccgcgctgacccttcctggggacatcgggtgggggtggaggaggcgctgagctagggagaggagggttgtgcggcccggaccacgcaaccttgggatcggagggtggttgaggccttgagggaagaatggaaggcggccttgacttctggtgcttccacgcccttcagatccagagcccagagcgtccaggctggagtttaggacgttcatcagagtcccgagacgcgcgagtgggtggaaccgcgtggggcgggagaagagggggagattaggcagcaagaaaatggtccccgtgggcagttcagcctaaacctggagctggggaagggcctctggagagaagccttaaatcgttactcatctttcacagtcttttataatcgtgaatgagccctccgttgtagactgttaatgcgtgtccaggatgcccgagagtgggggtaaaacaataaaagactcctcctgttgtgattaaaattatatttgctttttgtatcctcctaagttccatgatattgaaaatgtgtcttgttatatttcataaatgagcttttaaaaaacttctgagatatcttccaaaaagtatcactcaccagggaagaaaagaagaggaaacctagtggcttttctgttgacgccaaaggttactccctctgcctcaccataaaaaaaaaaaaaaaaaaaaaaaaaaacaaaccccaaaaaaacaaaaaacaagaaaaagcacagaaagcagtttggcttgcttgtaaagtcttggtagatatttctgcttatcatttaatccttttaacaagtctgtaggaatagatgggtattaccaccagttgtagatgttgaaacaggctgagattcatctggccaaggtcatacatagtttgtaagtgacaaagtgtgggcctctcaccggtagacggtcgtgactgcaattgtccaggttcttgacattttgaacaaagaattgaacaaaaggcccagcaaagcaaagaaagaatgaagcaacgaaagaacgaaagcagggatttattgaaaacgaaagtacactccacagtgtaggagctaccagggcagaggctcaaggacctggatacagaatctgcctgggttcaaataccctctagaggtttgtttccctttggccacttcatgctcacctcatgtaaatgaagtggtagcccgcaatcagtctgattggttgtagacaaccattcagaggctggagtgaaattacaaagttgcaaaggaagactggacccgcaatcggtctgatttgttgctaactcccaattttccaactgcctggcagaaaatgtcaaggggagtagcctctgatcctcttgttacttcggggtggaaagttagggttttcttttcttttctttcttttttttttttttttttttttggacgaaagtcttggtctgtcacccaagctggagtgcagtggtacaatcccagctcactgcaacctccgcctcccaggttccagtgattctcctgcctcagcctcccgagcagctgggactacaggcgcgcgccaccactccatgctaatttttgtattttcagtagagacggggtttcactatgttggc

SEQ ID NO: 46722 - DNA, 1693 bp, Homo sapiens
aagtttcccattttctctgcataagtagttgcttcctgtcttccagctgggcaaaaatttctagtatcagaagttaggagtattgtgcatgattatattggctcttttgctttgttgtaaacaatacacttagttttatcatactatttgtgaagttttattgaataattgtgaggcaggtttccaaaggcacattgattattgactgcagattgagatagatcaggaggttcagttctgtgtcctcttaatagagttgataaatcatcattttcaattggaatgacatctgaccaccaaacaggaacaccttgtactctcttgccttttgtctcaggattaggagggcaattggaaccaccagccaaagcagacgtctcagcatctcttagcctttgccccattccagacaggatgctagaggtagactcagctaagaattattatctggtctccttagcagagggtgttgattttaagtaccttggtttttttttggaaacagagttttgctctgacgcccaggcaggagtgaagtggcgtgatcttggctcactgcaacctctgcctcctgggttcaagaggttcttattccacagcctcctgagtagctgggactacaggcacgggtcaccacacctagcaattttaagtataccttaaagtatgctctgattccagatgtttgcactgagagtctgttagtttttttaaaaacctatttttttgtgtttctgttttatgaaagtaatacggcttgtagaaaatttgaaaataccaagtttgaagaaaatagcccatcatatcacaactcactcactgttaatgtcttattgccatcttgtctttgtaaaacacaatttatagatacatcttagttattatacatatataaacattatatatgtatattcctagttttttactttaattttgctagcaaattttgtgtgttttatgtttgaacaacaaatcactttgcgctctagtaacctctggacttgtcttgtttctctctgttacacatttacttgacaaaaagtacctttgtgtcaggtcagcatgggacctttggttatatttcatttatactgcagatgtccaggaagggggattataccatgtttccagtatgtactaggttagaatatcctaggggatatgttttcattttaagagcctaatgtatagtctgattactgttacccaagataagatagaaagtagcaattctaatttgtgccagaggctgtgagtttcttaaaagacctgaacctgatctggggtcattccattaaagatactcatagaatggtctatatgcagtccttaaacatgattttcagagaatttacgatcatttggtcaaatgctcagaatcccccattgatgtggccatatttatataaatcgatggcctggtggtctttagggctttagggttggctgcagttatgggtggagactagttcattcagggagctggcagttaggagaattagccaccatctcctccacattctttccttttttggaactttgctcatgtctgcgtcagtggagcctagacctggaatctcaattgtgtgattttgtttccagaaataagtaagtgggcactagagtaagttgttatcaggctaagctggaaagaaataaataacatttctgagcctcactgatttaaatggaa

SEQ ID NO: 46723 - DNA, 1138 bp, Homo sapiens
gaaaagttctttatagaaaaattctaactaataaatgaaaaaggaataaaataattcgattatagccattttgtaacttttaatgagataatggatctaagtaaaatatgtttagcttcatttgtttcatcttacctattttacaattttattctaaaagtagtaaaaattttgggatctgccttatctcagtctttaggatgttctttgcctgcctctaacattcctgtatcttgagtagcaagtggtcaggctgaagtgaaaattctttagtcatcacaaggaggttgtactgttatcatgggtgccggttcagccttctcgtcaatgaagctaccccttcctgggaaactcctgccaggtcattaataacaacaaaggaattctattccaggaggccttactccctgggtctcttgctgctgaagactttatgggatttccatgagcaattagtgattaactatcccaacagctggccatgttgctccaagaggatttgtcctgctacctagttggactttgatctctgatctgttgattactactttaatccattttgtgctgctctattaggatactgagactggataacttataaagaacagaggtttatttccttcttatagttgtggaggctggaatgtccaagatagagaagactgcaattggccagggccttcttgttgtgtcatcctatggtggaaggcagaaaggtgagagggagagaaggaagaggggaaggggagctgaatttattcttttattaggaaccctctcccacaataacaatagtccgttcatgagggtagagccctcatgaccctaataacctcttaaagctcccacctctcaacactgttgcattggggattaagtttccaaaacacaaactttgcaggggacacattcaaactgtggcgatttccttccagaaacgtatggtggctgcttggccagatgcccagctcactgcactagttgagtgcaaaaatggataaattggctacgtagagttatgtcaggcttactagcacaagatccatgagaaaacattcatggacacagggttggtgtcccattgtccatcctagacagaactaaacacaagacatcctcatccttgtgttgtgaggca

SEQ ID NO: 46724 - DNA, 2938 bp, Homo sapiens
tttggtcctctgtcccttctgtcttctgccatgtgaggacacagtgtttctcttctttggatgacacagtgttcaaaatgccattgtggaagccaagagcagccctcaccagatgctggtgccttgatcttggacttctcagccttcagaatggtaagaaatagatttctgttctttataagttctgttctttataggtctgtgctattatactagcacaaaatggactaagacaatgaacatgtatgcagatatgtttaaatttcatggtggaaagaaagatgacttctattttcctgttgtagtagagggtgttgatggatacaaggcagcaaagtccatttctgctataacaaaacaccatagactgatggcgtaaacaatcaatatttgttgctcacagttcagaaggctggaagtgcaagatcaagctgtcagcagatttggtgtctggtgagaacctgcttccttgttcatagacagctgtctgcttcctgtgtcttcacctggcaggagggttaagggaactcgcgggagcctctttcataagggcatgaatctcattcttgagggctccacacttacgacctaatcaccccctaaagtccccatctcttaattctatcacccggggggtcaggatctcagcattcaaatttaagttgggggacacgaacattcagatcatggcataaaccaaccgttctaattgcattattttctctagaaatgatcggctgcctctgtgtgggcaaagaaaaggcctatctaccttggaaacaaagctttggaaaactcattgctggtctaaagaaacagacaattgaggccaggcgctgtggctcatgcctatgctcccagcactttggggagccgaggtgagaggatctcttgagcccaggagttcaagaccagcttgggtaacatagtgagaccccacgtctaccaaaaaaacattaataaattagccaggcatggtggcttgtgtctgtggtcacagctactcaggaggctgaggtgggaggactgcttgagcctgggaggtcgaggatactgtgaaccatgatcgcaccactgtgctccaccctagtcaacagagcaaagccccatttaaaaaaaaaaaaggaaaaagaaaagaaaaagaaaaaatgaaatacacaattggacagtaaaagagcctctaaaggggaagcaaacaagaggttaatagggcattgatgactaagaacccattttgcaatattctctggagctggccttgcatttagaatgaatgtgaacctgaaactcttcaggattcagggcaggggatggcatatgatctatttgcctacactttgcttcagctgacagcagccggcaggtcatgatccctgttttctcccatgatttgttgtctcagctgccagatgacagtgctattgggctgctcctaactatgatcactccttagcctgtcctcgggtagctcttgcttccagattttattaacccacacatcccagctgggtttctggaaacccccacccacccaccctgtgaactgctgacgttgctgatgactgtgggcagtgagagcagcaagtgggaaacaatcttatgaaagagagaagaatgtgagtcagctggatagatggtattatgtgaaagaaagaagatgcattgggaaagtaggataagcctcattcttttaataaatactcatcaaaagctgattacagaatagtactggattataagattgaagttcctcctaagcctttcccataaagataggaagcatgatttcatctttcatttcatctttgaagatattggttactggtcttcatatgagctaagtgctcattaaatggttgctgaatggattaataaaggagggactattttagtgtctttgcttgtgccattctctccctggaacactttcccttttctaatataactccagaaattccactttcgtctgaaggctcccccctcctccatgaagccttatgtgactaacttctgcctaaagttagcttcccctttctaaagtctatggtacagatagttgaatctatgtcaataacacattctgtccaatattttgcttccatattcctctctcccactgtggatctttttaatgctgtgtagatacagaaatatacattcttactctccaacaagtgtgtgcatttcctaaatgcagggatgacatctttgacttctttccgaatgtccatggttcctgatagcgtactgggcacaaagtactgccctcgaagtacttatttatttgactacctattatctctatctaaagcaaatattgttagaaaaaggctgaggcttattgttaacccatacaggacagagaattgtaatgatctttcttcctaatccttagcttaatcctcctaatcctgtagcttaaaccctgaaaatgtttgcatccttgatctataaggaatgttatagcatgtgactctattaagtgtggaaaattgaaaggcaaattaaaatatttttatttggcagcatcatgaaactgttgaggtctatagacataatcttcatatgaatgctaaacgtagtacttactatcaatagatgttcaagtccaatgttactgagctgtgactgtagcaattcgctaatcttcctttgaacatacactatttactttttaaagtcttagttaaaaaatcaatttttttctctctagtgaattttatgatgcttttgttttatattattcaacctaaaacttctgagatttttaaaaggctaacagcaggttgtgaatgttcaaatagacaaaattacaaagtacacattcattactgacttagctcagcttcctgagataatcagaagttaaatttcatcagctctctctacccgaaggctatggcactaccacaaagataaattctttttttttgagatg

SEQ ID NO: 46725 - DNA, 1606 bp, Homo sapiens
tcttttatcaaacgtggtgtctcttgtcgagtgccctctccatacagttaacctataccagttctaaaaactgcttttttttccccctccattctcttttaggctaggaatagtaacagctctttgatcttgccagtctgggatactgcaccaccctttgctgtcagaatcctttctgattacacattgcaactttaaagttgcacatgatgtactctaccagaaggaagctgatttcgtggtcacaatactatctgtctggagtggtgggggttctgcttagcaaggactcccctagttgggcctcttagaatggagaaagttgacagtttcaggactgagatatttgagaaaatcaggagggtgctgaacagctttgtttcttaacttcctggccagaatgtgtagattttcagtacctcccaacgtttccagatgtatttagctcctacacactaaccttctttcattactgaatgtgtcatggagttaacacatattcttgcttctgcctgaaaccttctttcttctttttgcatagaaaactcagatatcagcatgaatgttacttgcttagggaagccttccctggaacaaacccctcatttctgccaggatggatgagtatcctcatatatgctctaacagctttctgagcctttccttcacaacacttaacatagtttctaattatgcatttggtggttattggatccatatctcccctctccctagaaaggaagttccaaaaggtctgaggttggttttgactttgctcgacattaaatttccaggactgagcacagttactgactctggtggtcactgaaaaatgctattatgtatccatggacagatgtatgactaagcatcatgtaaactggtgacgatggtagactgggaagaataaaatgagagcgctatctagtggcaccaggtgcaacaagcaaaatggggccaagtttttgcctgaggccttacaaaagtgttgaaatccttgtggagaaaattttctttttctcaggagggcagtagaatatccttagaagtgactagacttatgacagtaatgacatgaggaagaatatgtcacaaagttaacaggaagattgactccaatcacaagaagtgagggctgcagaggccatgaagggatggaaaactttttcttagttttatcactactgggtaatgggcagagcctgggagacagagaagagaacaggccgtatggagcacgcatcaacaaccctgagcttcagagcacttagtactgcaagaagaatgtgtaagaaactctggaacccagttcctgggagagtgagggaacaccagtgatttcattggtattaggcttgaaatattgattattttctttattccatatttcacattgttatccacataccccttctgactacatacagcaccaggtgtaggaaatgtgtgttagaagatgatgttttttgccttaaccattgattttaatgatcatttcatcctctctgctctaccctaagtggcctttcagagtcaattgtggcttatttcataattatctttttcagactacttctgtacattggtaccacatctgtaatgaacc

SEQ ID NO: 46726 - DNA, 1540 bp, Homo sapiens
taattatatattatcattcccacatgatgggggtttataaaggatttaaaagtttgtttctgcatttgttttcaaggacttgcccaagcacggaaactccatatatatcagcgactagggaaaattgattctaatagatttttcttccaagaacaggaatctttctatttcatattgcacatgaatattaagtaaactacctgctggaaacagaaaaaaaagctttactcaaatataagttgctgatttaaataaactgttgtactttaaatagaaaaaaactctaaatataaataataaagtagcatttctaagtgtagctactaggtttattactgagttctgcagggaactgaatgacctaaccccaaataccatccttttatgaccaatttgtgtggacagttataaatagtgcagtgaactctgcctacaaggctgtaagccaaaaatttttgagtgaataaagggactgctgttctttgtgaataagcaattattaaatgttgtttctgaaactggaagctgagtaaagcagtttgtcagtagacagtctaatataaaagaaattaatttgataaaagttccctcaaaaatggcttatgtactttgtacactatgtatggatctatttacacatgtaaaaattacttccatgtagacatagcattgatatatttatttattaaaatttcttcattagaataaattatatagcgtcaaaactttggcaacattttagtgtaagaactgtttgtgctcttaaaaaactattctgtttataactataatacatattcactggagaacgtgcaacaataaatgcatactgactaaaagaagaatgaaaactattcaaactcttaccttctagaagcaatcaagtgtaacttacctccaaagttatgactcgcagctctttcctagttagtgaatataggtgtacatcaccattttaaattgctgctgttggcataattgatttttaaaaccaactttcaaaaccaacttgtataagcccagattttaactgggacatgcaattctagggcagcaagagtggaggaaaagatacagggaatagtggcagagaaggagcaacaccatgcaatgtgttttgcttcctgatgacactctcagaggcaaagtctgttagcgggggcacttcctggatcaggcactatgtgctcagaaaggccgtatggagaaatcctatcttggaacagtcttttaaaggaaagaaggggaaggtatttatctgctgcctccttttgacttctttcttccactggtcaaattttgtctcatgaggaagtttactccctcacatcactcagcatctttgggagtcacttgccaaaccacatcccatgtcctgaaatgagattctctatctaaatttggaagtgacaggaaggaccagagactgtaaatgtgtagctgacggccccaggaggtagatttttataggtctacacctagcaggtcagtcatagcaagtgcttaggtaaaacaaagcaaaccagggtcaatgagacag

SEQ ID NO: 46727 - DNA, 2227 bp, Homo sapiens
gtatctgcagatgatcctggagccaatccccaatgaatactgagggacaactctgtatacacacatacaaatacatgcacatgtgcatatatacacatttatacatacacacacacgcatgcacactcacacatatagacatgcacatatcatttgagtcaaatctacatgaaccttacctagagttttctgtttattcacagaactgcctagaggcaatagaataccaagttagaaatcaagttgaagcaacatttactcagccgctatttactagggagtgctgtctgccaggaattgttccaggggcttacgatgttgtgatgaacacaaaatctcctgcagccacaggacttacatcccactggggaggcagagagtgaacattacatataaatatctaacataaaatcagatcatggtgtgcgcaatgaaagaagatagaggaggtgggggtgtagagagacagtgcgtgtgtaggagtgggctcacactattttaatcagggatcagtgaaggcttcctgagatggtggcatttatgtaggaaaaggaatgaaaagaggggtgagtcacgtgaagagtggggagaagagcactccaggatgaggaaatcacaaggggaaaggccatgggcagggtgtgcttggaagctcaagggatggcaaggagcccagtgtgacctgagcagtgagatgagagggtattgggaaattaggtcagaggggtagctctggccaggacactgtgacatttgcaagtgaaagtaaagattctggactttaagagatacttatctcagttttgaaaaatgagaagagtcatcccccagataaggaggaagaaaaattctaggctgaggaaacagcatgtgctatggtacgaaggagtggctggctttgcgtcttccgttgagtttctgagagttgatatcagtggaatcaaggctaagaggtggtgagcctgtgcgtagttcgaggccaggctaaaatgtgcccaatgcacaactcaccatcagaccagccccgctgggttctcctgggtgggaggtgagcccagtgtgccagcaggttgtgggaggagaggtcagttcagagacacactatcattgacagagagaagagttagtccagacccatgctttcttctgcagccattatattctctttcctgggctcagaagcagaaggctcaggaagctactgctcctgaagatgggatcaattacacgcaaaagtggacgcctgtgctcctggattgggaaggttgaaggaagagaaggaggctcatgaacaaatgggcagtttgcacaaggaagtagggacaaaagagtgaaatcgccacaaagcgtgaagctccttgccgtgagcaaggctgggacacatgggacagagtctctgacaaatgctcccttctctctgagaagggcctgttcctgcaggcccaattcaatcttatctctgttaagtatctgatcactgcttacccatcagcacaccgtgaaacaaaacaggccaggcatctcagagtgacctcctaagcatggaacagggaattctatgttctgaactaatatggcccttggcaaaattgtgcaacagttgaggctgctgtttactaactcccacatccacttgcagcccaggactttgctttggtcccagcaagggtgttagctgatgaggctggatgtgttacgccataacacagcatgttggaaggggccttcatatagaacgtttgaaagtttctgcttcagggaccttgtttctaaagggctgaggtgtggcatgagacaggaagagatctgccttactcctgagagaggcgactggaacactgcctctgttctctttatctacagagaaagaaagtgattttggaagattggtctgactgaaagaagtttctggagtgatgagaaaggggtgtgattggatagtgcttgccttacactgtgagaattatgtgttccttcattctttgaccaaaatttattgagtgcctcctataggctgggcattgttcaaggtgccatggttatagcagtaaacatatttctgttgtttcatatttcaaatattttaaagagtaagaacagaatcaaaagacgttgggaaaaatccttcccctcccctggtgtaccttaataatgagtcaccacagaacattctacagcaagcttgtccaacccccagcctgcaggctgcatgcagcccaggacagct

SEQ ID NO: 46728 - DNA, 1438 bp, Homo sapiens
agaagacagcagctgatagaactcagtggcttatcttcagggaaagcaggggaggcttaacccaaacaaaaagctcattagcagggcctctgaaaatcatgcaactgagcagcttatttacagttctgagaaggaccccctcatctagccaagctctgaaaggccctggcaccacaggtccccctccccctggcctctttcccccatgtcaagcactacaatggcttgaaggacacttatttccacattttctcttcacgagacttcaggtccccaagaaaccttccaactcctcagaatatggcctaacccacaacacatcctggatttctacgtctcctaatttttgttttgggtggtgatttggaaggagacatccaaggcaatggattttccctcaatttctgaactgaaggctcacagacagcctcagagatgagctgagcagcagaggcatcctgggaccaggaggaaacctcttattcacacaggggactagatgagcagaaaactagtctttaggttagcagcaggttaagtaacaatcagttgtatcccaagttaggatctgaaggtctgggcttggccacaggtatttctaccaaggagaaagcactttttgcttgttttaagatttacagttctgttcctaaaatcccaaattcttagctgtgttcagatggtaaagctcatgagagctgtgaggcttacattctctgtcctggagaaagaagaccactatctggtctttaataagagaaaatgtagacatatcacattagacttaaaagcaagtgttatttgagacttgatattgatgtgtccataactcaggtagagaaagtccttattattcatggggccagcaaatccacagcatcagcatcacctgggagcttgttaagaaatgtgggccccaccccagacttaccaagccagaatgacaccccaaagagatttgtatgtagactacagtttgataagcactgccctaggaacattcaaataaagaaattagagctctgagaaaagtgtgtttctcagatgaacattatttcacgaactctgtgtgtgtgtgggtgaatactgatccaaagacaggagtcgaaaacagctctctgcaggacttgctgactcacagtctaagtatctcctgcttagaaaagtatctcctgcttagactgcagtgtgcacagcacccaggttactcaacattcattcaccatgtacccactgacccagcacaacagcagttgggagtaaaaaagaaaaaaaaaatcttccagtggcacagcagtcaattcagtcacacttcaagttctttctccccaccggggttgatagctactaggggagatacggcatctgtttgtcttcatcactatgcttctttctagaaacatctgaggtcgcaatgatgaaaaaataatttcatggt

SEQ ID NO: 46729 - DNA, 574 bp, Homo sapiens
gtttaatgccattccaccatcatacgaatctgagtgcagacactgtgtcataaccacatctcacaaaggcagcatcaggttcccattcaggaatcgtacctgggtgttatagtggatcccaccaacagagtaactgtaacctgtgggatttggaagatttaggtttttgtgaattcaatctccttccctgccatatttgaaattcatgctaaaggatgaaaatctcagataagttaaagctcctgacttggggttctgattctggcctgctacctgctgccctgggaagagatcgacacaggctgcataactatcaaatgaggtcagcctgattttcatagaaagggctcgtcctgcatctgccttttcacagggctcgcttgccagcagattagctgggaaggctgcagtcacattactaaacttgttagcatttgtcctgcagaccgagaattttaccaagcatattcaatggtgtcgttttgaaagagtgctggcatttcactagaagagaattacctgctatggggtaccaaaaaatgcttaagcgtggatctgtggctgatgacatatt

SEQ ID NO: 46730 - DNA, 2031 bp, Homo sapiens
aatcttagaaaaaaaaaaaaaactaactttttgaaaggagatattctgcactggtgtaacagcacgtcagcacttaggccaagattgataacaacactggccaaaagataaacaatttacacaggtggcaagccatctaaggcaaaagctaaaaacaaaaacagagatggacttctcaagaagtcatttaatgtgtactgcatacacacgtaattttcaaaaacagaaagggaaggcacaaaaagttttggcagatgacactaaatcaacagttttaacattgctgcattccagatcattccaataaacaatggttcaacctactgagaatctagagacatttcatctctaggcagaacactggtttgtaaagtttagttgctggacctaggccatggaaagacacaagcaaatcctaatgttgaaactctaaatgcattcccacttagaattaaacaggaaagggaaggttcctcccccatgtaggaaactgagccgtaatttactggtttcaatttatagctatgaagtgtgtgtgttttggaggggagggaagatgagaagttggagaggtttaaggaaaagacacctgcatgaggtagggcagaagtggacatcctgaagacctgatttctaaaagcagcaggcctactaggaaaacttaaatctctttcatattgaccgcaaaagcgaattttgagcctgtaaggtggatcatggtagttgccggtctgcagatacactaggttgaagactcgcagcacctaatgtcactttttcatgctcacgccctcccagcgcccaatccgtgtttatggaatgaaggggaaaacccaaaagaatgaatgaacaagaaaggagtctagtcaggaggatggccctggacgcggactaggcgaaagcagggacgatgctcccggggccgggaggcgctcgaggacccccgggcgcagtggagaacgcggaccgcgatagggccgggggcgtagggcaagacaaaggcagcgcgggcggccagacacgggtgcccggcggggacggggaccgcgggcgctcacctcatcgccccacttgagaacgtccttgtgccggtccttgacggcgtggtagatgtgcaggaactggaggatcccgtgccgccgcacgtggtcggcatggcgcttggtttcctcccagctcagcggcgagccctgggacagcagccccatggccgccccctcctcctcctcctcctcctccgggctgacggcggtcgcccgctccgggcgcgagacggacactcagccgcccgcagaaggcggctgccgctccaccccgcgggggcgctctcgggccgcagtcggcggagggagggtcctgcccgctccggctccccggcggcggcccctggcgcccaggtgacagaccctgggtccgacgcaccgcgcggaggcgaaggcagaagaccgagagcaggcgggacggctctcggcccggcggcctcgccctccccgctgctcctcctcccgctccgatgcggcggcggcggaccccacggccgcgctgccgcggcggctcccgcttctctttgccggtctggtgcactggcttcttcctacttgtgaccaaaacctgcgccgccgcggagcatgcccagtctttgcgtccgctagctcgccgctcctgggcgcgatcctgcgctccaggttttatagactacgggcgaaggcggggagaggaggcggtgcagcggcggaggcgtggcctgaagcccggtgggaaccgcgggggctcaggaggcgtgtgcaagggtgattgggtcgcagttgaggggagcagctcgcgagaagggggcgtgcggtcggcctcgctttacgcaaacgcgacatatcaaaatgcattttttttcctaatcagaagagataaacttgggattcgggaagaaagttgattatttgaatcaatgacgaactcaccatattatgttttagttggacagggcctcacacttagagtgagagcggcagaatgtgttgagaaaagtattaacat

SEQ ID NO: 46731 - DNA, 1992 bp, Homo sapiens
ttatattgattacatagcgatatagcattttggaaattttgagttaaatatgatgtggtatgttatttaatttaccaccacccccacccacttttatttttaattttaaaggaggctactgaaaaatttaagattacatatgtggctctcattccactttattgaaacagtactgatgtagaccttgatttacactttgcaaagcagttttcccatacacctgctgcacaccatacacttttcccatgcacctgttaggaatcatggacctgggcggttcaataatagactaaattctagtctagccaaagccctacgcgacactgaacctagtaagagtttaacactgtaattggagttactctgtcctagatcccggctcacactcacataagggacctccctcaccctatcctacccccccgaattctgaaccagctcccccagcgggggtcccagagctttggacaatcccaaaaagggcgccggcgctgctgcaccacagggcagttatgcccaatttaaaccttgatctctcagtgtctttagccttttctgttacaaagaaaaaacaaaaatcccatcacggatcaactgaagtcatatttaacaagagttactcccctctgacaatgctttgcctgcataggtccactactgctcgatttcattctgtagactgcacccagggccaggtttcgacatctggaagtgagttttcagcagacagctccatcagggctgtaacgatagctgaaggggaaagaaggagctcatatcttgcagaatcagctcttccctagaccatgaccaaaggccgattcccagtagtgtcttccgcggaaaaacgcgagacccgctctccaggaacccatctctgcccagcggcgccctggcaccgcaacctcgcctcgcagccccgcggaccaacacaggccccgcccccagagccgtccggaaaacctggaccgtggagatccgcatggggggacgccgtgcagtcgtgaggccaagctgagcatgctcggagagccggcctgtcgcgggaggaagcggtgtgggccgcgggcggcgcacgccgcgcagttgttgtgatacagcccccgccacgtgactgcgcgggcccgcctcccccgcgcgcggcaccgcctccccgtgactcagcgctttgtgcgggctccgagccggaggtcaatctgggggaggcttcttagggcaaagtctcagtccatcactcctgacctctgggctgctgctgctgctaggattgccgcagtcgtttcagacacgatgggtttcgggcctccaaggaccaaaaaatacatcattttctctgtggtcacgccattcccagtttcccttgagtcagcggcttcgcgagatcaaataaggaaaacagagagagtgcccaggggactctgaggaaggcacttctaggttatctgcccctgcctttaccgctctctttggcttgagtatcccttgaccttggtggtctgtcgcttgggtcccagtatatcacattctatgccaggcactttgagctggtatccgtaaaacagtactaatctttgccacattttataagtgaggcaactgagatccagtaatactaagtaacaggtagtggctaagctggggtttgaactccagtgatatttcaaagctgtctactacaccacttagcctgggtgaagctggtggctgccttcagtgtgattcttcctgggacttgatgccaaccttcattacatcctttcttctcccttgacacaccctttccccaaaacccgcggatctgcctgtgaagtccttaagctttttgtctgttaaatttctttcttttttttttttttttgagatggagtctcgctctgtcgcccaggctggagtgcagtggcgggatctcggctcactgcaagctccgcctcccgggttcacgccattctcctgcctcagcctcccaagtagctgggactacaggcgcccgcc

SEQ ID NO: 46732 - DNA, 492 bp, Homo sapiens
ataaatccatggaaataaaacagtatcatttcataatataattcaccaaaattcatggtatcaaaaatgaaaattctctgtctagagatgtctctcaaacacacaacaaagccattttgtcctgtctaggaaaacccaatgtaacttttgtgagcgatcatgaaccatttccgtgtccagggaactaatcactgcttatgctgtgttcagtaaggtcaggggcacaatcctgtagttgtaggcatttgtgatggggaaatctggtagtttttctgagtcataatttgattgcaatggtgatggcaatagctgaaactttgactgtgagaatttgtccttgaagataaattattattgaggttacatctggcactattttctttttttcattatgcaaaacaaataactaagaatatggtcaaaccccgtctactgaaaatacaaaaacaaaacaaagcaaaacaaaacaaagcaaaacaaaacaaaactagc

SEQ ID NO: 46733 - DNA, 4825 bp, Homo sapiens
ttatccaaaactaaaatttttcagtattccataactttctcaatatttaacaaataatacagtcataatatcatgtgaggctgaggctatccttatatctgctcatgccaattctcatcccctttctttctaaaaaataaaggctaaactaaaaatatttgcttcaccacagtgttgtgcagctggaggggccgtatgattcaggagtatgatcccatgagatagaaatagagggtttctgtgaaagcttttggtttcctaacacaggtctctccccttcccaactcccgctttcttcttctccctgtcttgaatacagatgtaatacctggagatgcagcagctatcttgcaacaaagaagtaataagcattaagacaaaagcctcactctaagggtggtggaggtaaaaaaacagaaacagcagcctgttgaacctccttggactgccccagacttcttgtttcgtggggcaaacttactgtttaagccactgtttttgagtttctgttatttgtagctaaacatattcctaaatgctatagtatgtcactaccttttttttctcatttatttaaatttatttatttatagacagggtctcactttgttgcccaggctagattgcagtgcacagtcatagctcactgtagcctcgacctgctgggctcaagggatcctcctgcctctgcctcccaagtagctgggactacaggagcatgccaccacacccacccagctaattttttaaattttcagtagtgttccaaacttgtgtgagagtgtaaccacccaatagtttcttcctgcccactgcacagacaaaatcaatccaccaaggccaagtcattgcaataaaatttaattgacacgaggccagccatgccacgtgggagatggagttattactcaaatcaatctccctgaaaatttggaggctagagtttttcaagggtggtttggggagccagggagtctgcttctgggtagggccacaggactggctagtggggtttggcaggcctgggtggagacgttggttcattggtcgtcagaaatgcagaaacctgaaaagacatctcaaaaggccaatcttaggttctataatagtgatgttatcggcgggagtaattaggggagttgcaatttttgagacctccagactaatggctggtaatcgtttaagtctacaccttagcagaattcaggctcctctcatcctaataacctggtggatggattagctttccttagctttacaaagtggtataattttggggaagcactattaccatttaaactctaaactaaatgtctcccaaagttatcttggcataagcccaggaataattaaggccagtttggaggttaaaggctagatgggggttggttagttcagatctcattcactgtaataatttcctgattgttataatttttgcaaaagtgatctcaagagaagaaaactatgtatatgcatatgcatttttgtgtatatgagtaaatatttctgtagagatgaacaaaaaggtgatacctagcctgggcagcaaagtgagactctgtccaaataaaaaagttaaaaattagctggttgtggtagtgtgtacctgcagtccctgctactcaggaggctgaggcaataggatggcttgagcccaggagtgtgaggctgcagtgagctatgattgcaccgctgcactccagcctgggcaacagggagaaaccccatctaaaaaaaaaaaaagaaaggtagtatcattggttgcctttgggtagagaaaacaggtggctgaggatcagagccaggagtgaggcatggcttttgtacattttaaatgtatttttaaaaattaaatatatgtatcttactgtatgatttaaattatatacatttcaagaacagacaaaatgaattacggtgattgaggtcagaatactattaactctatggggagatatttactggaaagtggcatgaggcggtcttctccagctaagagatcagagatatcctctatcttgaattagatggtggtaacataggtacatgtatatggaaaaaaaacatcaactccatactactatttgtgcacttgatgtacctcagtacagttttagagcatatactttgaataataagaaagaaaattaagataattattaatattctgtgggcttcttgttcactatcatcttagttcaaatttcaacaatttccctaatttaaagtttttttaaaagagttttcatgtgagaatgtgtatgtatacatatgaatgtcaatgcagaggagatttgtggccaatctgtgggttatttcctatataaaataacccttcattgacctcacttcattgtccagttatcaccccagttttttacagtcacgctttttcagcactgctgtgtgtaggtgggtatatgtgcctaaactcaggactagtatacacccaggtatgaatagatcaagtcacatacttaaggatttgatgttggagtttgcttctatagcaaatgaatttctaaatattagctcagtgcagctttgatgagtgcacgatgaatcagcaaaagcttaaataagggagtgtgcaccaatgacaaattccctttgcaagggaactttgatctctactggatgactacctgcttctgctgtgcactcgctctctccctctttgcttctagcataacaaatacgttcccctgcattgaacgtgttttcctaacaacagtggcgagatgtgacaaggaaacttgtttggagcaacgtctgagtcacaatagaattagtatcaggtacaaatgaccacaaagtacaggtgctgagtcacagtgatttgggattctctagtaaaaaggacatgtggagaacttaacttttatttcctctcttttgctggtgtaagtttggaggtatcgtcacacaatcacctttcattcactaacgctcacattttaggtgcttttccttcttacataataaaatagcaaagcacataggcctggggtccctggggaaagccaagtctgcctggctgccttgagaactctggactggatttgacatggaggagttggggattgttgctcagggatcagaacagtgaaactcaggttaatgagtaaagagtgagaatatgtgtttgtatgtttcttaatcccatctactaggtgattacaaaactcattcaaagttgaacacagtagaggtatttcaagttgctttagagagagaattacacacacacaaaaaatctttaggagccagacaaccactgtggacaccaataagagagctccaacattggtgaggtatagacccgtcaaagttgttggtaataacagcaaggtccatctggcaagattggtcacctgtggtggaagtggtggtgacagcagggatgcaactgcagcaatcaatgatgatgatctcactagggtggggaggtgttaaaggcatcttcacagcagcacagtgcccagaatgccaaagagcagcaggatggatccagcatcctctcctgataaaagagggctagaagacgggaggctccgggaagtctactgggtgagtattagtccactctcacattgctatcaagaaatacctgatactgggtaatttatagagaaaaaaggtttaattgactcacggttctgcaagctgtccaggaagcatagcggcttctgactctggggtggcctcaggaagcttccaatcatggaagaaggcaaagtaggggcaggtatctcacatggcagtagcaggaggaagagagcgagggggaggtgccacacactctttaactaccagatctgacagataactcattgttccaagggcaggacaaaggggatgctgctaaaccattcatgagaaatctgcccgcatgatccaatcacctcccaccaggctccacctccaacaccggatattacaattcaacacaaaatttggacaggaacacagatccaaactatatcagggtggagccctacatctaatgtttcttgcccttgctcttggtagctagtgtctcattggactctagtgtctgcttgttctattggatcaggagctccttgaggggaggagccatattaaattcatctctgtacccctagtgtttagcagtgttttattgagttagtaaataaatccatctctattctttatcaaaactctgagctgtgatgaaaaagtcactgtctccacctgtgctttggatctgtcagtagggcctttgcttctacagtaacatcatcctacacagagtaaacacctactgagtgctgattatgcctgctgtggttactacaatctcttaagtttgcctttaagctttgtatgtaaaatttttaattgctttgctattttaatctgatcacattcccctggttcctcccttttaactttaagcatatgcaatgtgcccgtttgcacaacagtctgaagttttatttctatgattcctccttttctgcacaaatgttcatgtttctcatacttcctattacttctgaacattttcctaatgacagaagtcatagaagcactccttaaaagttgattttttgtttgtttgtttgtttgtttgttttgagacattctgccacccaggttggagtgcagtggcatgatcatggctcactgcagcctcgacctcctgggctcaggtgatcctcccaccgaagcctcctgagtagccgggactacaggcacctgccaccacacccagctattttttgtattttttgtagagatgaggtttcactatgttgccaaggctggtctagagcttctgggctcaagcaatctg

SEQ ID NO: 46734 - DNA, 536 bp, Homo sapiens
gatggagaatggaaatagaacttgcagttttggttctctgcaatgcaggttggccactgctattgctgtaactctgtcctattgtcctacccatactactgttgtaacttccataaggtgggacctgatgaatcacgcacacttccagagtgtttggtcagggtgaccctgggtgcagcaaggatggccaatgctgttggcatcaaaaggccaagagatgactttggtcagattagataaagaccatttagggccatggagatatggaagcaattttcttctttcctagaagatgatgcaatagatgacaataagcatttgggtgaatctctccagccaggtttgaaggcagtttgtgtcacgtagtgggtgggtggatggggaaagttagttctaattactattccagggccctacatccagaacctttccattttaagacaagagggggactaacattcccagctcattcgcaaatgactcaagagaatgggacagaggaaagggagataccatttttaattccccctggagga

SEQ ID NO: 46735 - DNA, 2694 bp, Homo sapiens
caagtgattctcttattctcctgcctcagcctcacccagtagctgggattacaggcatgggccaccactcccagcttttttttcttttttttgtatttttagtagagacaggttttcaccatgttgactgtgctggtctcgaactcctgacctcaaatgatccccctgcctcagcctcccaaagtgctgggattacagacatgggccaccactcccagctttttcttcttttttttgtatttttagtagagacaggttttcaccatgttgactgtgctggtctcgaactcctgacctcaaatgatccccctgcctcagcctcccaaagtgctgggattacaggcatgagccaccttgcccaactgacttttatctatttttagtagagacagggtttcaccaagttgccaaggctggtctccaacttctgggctcaagcaatctgcctacctggacctcctaaagtgctgggattacaggtgtgagtcattgcgcctggccaactttttttttcttaatggccttttgctaaagaatggggagaggaggaaccatttgcctgcatggatctgtaagccactgcccttcctctcatatcttacctttacaactttggaagccaatattctgaaaccaaaacttcgttcctactttaaagatacagagagggctggaatgtcctattccaggtttccttgaaagaggaattagctacttttcccctcccatctagtgaacttctttgtacacagcgcctctggtaagaattcagttacttctcccagtggcctctcttcttttgtctttcacttcataggcaatagtgaccaactaaaaagtcttagtaattttacttttttgggggtgacacgcacataaagagttaatagatttaaagactaggcaaataccatttcttttaaaacctgaaaaatatcaaaacaaaacttaaatgaaaaactactagaagatcattatcccagccacaatcaagtccaaaggttaaacatgtttgccttccttatctaaggaatgaagatgtacagaccaatgggaagaacctcatcaactctaaattctctttagcaattagcaaatttgccacctgctattggtggaatcgtgtcccccaaagagatatgttgaaatcctaacccttgatacctgcaaatgtcaccttatttggaaattggatctttgcagatggaatcaagttaaattgaggtcattagtttgggcccaaatccagtgtgaccagtgttcttatatcaggttggtgcaaaagtcattgtggtttttgccattactttcagttacttacttactaactactttcattaccacaattatttttttctttttttttgagatggagtttcgcttttgttgctcagacaggagtgcaatggtgcgatctcagctcactgcaacctctgcctcccaggttcaagtgattctcttgcctcagcctcccgagtagctgggactacagacacatgccaccacgcccagctaatatatatatttattttttggtagagatggagttctataccatgttggccaggctggtcttgagcttctggcctcaggtaatctgcccgcttcagcatcccaaagtgctgggattacaggcttgagccactgcacccagccaccacaattaccaaccttataaaaaaagagaaatttaaacacagatgtatacacagaggagaatgccatgtgaagacacagagacaaataaggagaagatgaccatgtgacaacagaggcaaagattggagtactgtctctctaagctaaggatcaccaaagatggctggtaactggcagaagctaagatagaggcagggaaccaactctccctcacagctctccagaagagaccaaccttgatgatatcaaacttccagctttcagaactgtgaaataataaatttctgttgtttcaagccacctactttgtggtaactttttatgaaagacccaactaacataccacccaggggctgaagtgaaataactcaaagacattctgtagcgtgttcccctcaggccatttttatgaaatgtcctgctccttactacttagatatctcagtaatgaaacaaagttaatgatcctgactgtcatcaggaatccataccacacacaggctaccctttggtttcactttgatttatcttttatttggataatctgggagttttaaagtcaaatggagaatgatcattttaatacttttcctcttctagttatgtgaattcagagtcaatgcccggggcagtttggcaagctgtcagtaactgataacatgaccgaaaaacctgatacatcagctgttgttctactgtactagcttctttgggtactatgagctcatgaaatacaacaaagcactgttctgtctaaactcttctgaatatatggctcatgttcatggaactcccattgtcttagtctgtgcctgtcaaaggggcaattctctgacatctttgttttcttttagagcgttctcccctaatttgatctatacttgacaacatgggtgtaaagagcaccatgtccctggtatagcagaagcacacacaggcactgcaaaaaccattcttcagtgttggactgttccagtgggcctactgtagagccaaaggcagggaatttcacaggcggaagaattataatagcta

SEQ ID NO: 46736 - DNA, 2489 bp, Homo sapiens
gaatgagtatatatttttatatacgtgagatgagtgcttgatttttacttaagaaatcaggaggatccatattaaatgggaaacaatggcatttatcaacaggagaacccattcatccagttactaccaaatctacaaattccaaatgtttctatcattcttatcatataaaagattggggcaaataaaattattgttattggttgtgtaaacttcaagctctctaagcttaaggctaatggtccttagggacatagttttatttggtgatcttcgcggggtgtacattagggccaaggttgcctttaaccaggttggtgtagtttttagggtgagggtaaggctcccagggtatgtgaaattcttctttaatagaggacaagggataaaatgcaaatccttctagttgaaacaaccaaatgacttaaatttatgctataaattaaatgattcatatcaattacttcattgagagcatgattttatggtagaaaataaactggggcctgaggcatggaggaagaggaatgtccgctaacacaaaggttatcaaatttagggtccctgggtggaatccctattccttttcggtcagatcttgttttaagctttattacgttgtcatgggatatctttcaaaatcctttactcaatcacatatggggggaaaattgcgttgaaatacagaattaaatcttaagtctttatggagatcgacaatttccatttttaaataaataaaatctatatgaatatcttcaacttcctaaagaaaaaagagagagaggaaaataaacttttgaacatgaaatcacttacataaacctcaagtgtactaacgtgtagaggaaaaaatctcaaatgtgggtgtaaccgctatacatttaggaaacatgccgccttgggagagtgcctataacgaattccgtctgccacccagtggccgctgaaataaattgtttcttttgttggccattgccctgtattttgctaaaaaaaaaaaaaaaaaaaagaggtagattatgccataccaggaatttaaagccatcaggacatgtgcctcgacatattttacaatacaatcagtgtagtaaatgttaaatattttccttttcgcgaactcagaggttaaccacgtggctctacgaataaataacgtgttcttcctgcgtccctgcatctacctgggctcagatactgactggcacagaagataccgaactggcccgggattcccgagtcacgttgttgggcatcgagagggtgcagcaggacacgccgacagtggcctcgggtagctcgtcgtcctccgtccactcgttgagctcggggctgaagcactggatgcacttcttgtacttcttctcgccctcgttccagccccccaccaggtaggcgcggccatgcagcgccgagacgcccgcagtgctcactcccacctgcagcggcgccgcgtagctccactggccggtcgcggggctgtagcactccacggtgagcacgtccacgcgctccccgcgcggccccagctggctgccgcccatcacgtacactctgtcgctcagcgtgaccgcgcagtgccagccccggggtgtgctgaggttcggcagctcctgccacgagtcgctggccgggtcgtaggcgcacacagagcgcgagtaggcgttggctatgtagcctccggtcaccagcacgcggccgtcggcgaccgcgctagcgtggcagcagcgcgccacctccaggggcgtcttcggctgccactgattggtggagggcacgtagcactccagcgaggccaggcttccttctgcgttgcggccgcccgcggcgtacacgagcccgttgaacacgctcaggctgaagtgcgtgcgcttctggttcatgctggccaggtgtatccaggtgttgaagcggggatcgtatctggaaatgatagagaaggtgtaacagctttgtcggcggcagctggggaccccatgttactttgcaaatcatgagtgggaagcctgacactacccctgcaaggaggcgagggacctggcccagcacctcacctggaggctggagtttctctctcagccagtaaaaatgtgtgacacttggaaaagacaaagcaggcattgaccacccctcgcccccgtttataagcctctcctccgtttataagcactccctttatggggccacttggagaagagcccacagagactgagctttcagtccccctttcctccatattcaaatatctatcatccagtgggatttacgagatgtgcacatgggggaggctgggcatttgtgacgatcagaggagtggcgatcagagaagggcatcgccatattaaagtcaattctgcatatcctcagatgccaaccattcctagctccctgtcacagtttaagatacgaattgactgactggatttctccatttctcacaaaccccttaatcctacacctctcttggccattgcgacagtaaagccaag

SEQ ID NO: 46737 - DNA, 2271 bp, Homo sapiens
acacagtatggcatagttttcaaaacgtagaaaacatgtctaaaaaaaaatctgcatatgaatgccaaactctcatttgctgtagcaccattgaaaagtcaaccctcaggccaggcatggtggctcatgcctgtaatcccagcactttgggaggctgaggcgggcggatcatgaggtcaggagattgagaccatcctgcctaacacggtgaaaccctgtctctactaaaaatacaaaaaattagctgggtgtggtggcgcacacctgtagtcccagctacttgggaggctgaggcaggagaatcacttgaacccaggaggcggaggtcgcagtaagccgagatcgcaccactgcactccagcctgggtgacagagcgagactccatctcaaaaaaaaaaaaaaaaaaaaaaaaaagcaaagaaaagaaaagaaaagtcaacccttttagcatgtagaagcctattattcagagaacctgctttcctggcagagcacttgtcttaataaaagttagagactggctcatgtggccacattgagttaaaatgatttaacttttcctttttaacaagttttgaatggcgtacctcccctaccaattgccttctccttgtgtctccttccctgatctgcctggctctcccccacccctgcccatctcccaggctgtgaagtgccttcttctgtaatgatgtatacctgtctatcctggcacttactacattttaacaatgtgtttgtctccttcctcgtcttcatttttttaacatctctatccccagcatggtgccagaatacttgggcaatgctccagaaagtctgtcactctagtgatgagtcatttgcttgcattaatgaccttctaactctggaattcaacaatattgaagtaacattaaacaagaccccaaagatcatccactctttagttgcactgtcaaattttcttaaaaaggtgattaaacgactaaaaaatccttttcactcactgccctaatgaagagatggccccatccaatgcttgcctgccactctgtcccatttcacccacttagctacagtctgacctttgactctattaaaatatttctgcttgcttcactctgatcaagagctacatgattatgaaagatttatagaagctgagaagagatatgcaatcccttttaagtgaaaccttagtaatcattttttattcctgttctttttttttaagacccaaattcataaaatcttgaaaccatattggcttgtgtttatgcatgttgagatcaattacatgttgtcttaagacagttttaaattgcaagagttatttctgaacagaagactatattaaaattacattctgaaagcttgatggcagtctgtgagtactttcaggcaacacagtgactccttactacctggaaaacagctgggaagagcacaatactaaaaaaaaatgcctctgagctgctaaaatagatactataaattataatatctattattctgaaatccatgctttctctacatagatgtcccttcatgtcctcactcaatgccttttcactcttttttttttttttttaacatgttccaatcgatctggttcctaagcaagcaaggagacaggcataacaagaggtgaccaggtaaccagaatggaggaaagctagtgaaaactaagcagaggaaatctgacatcttgtccgtctcagattatttagggtagggctacccatttctaaacacaggaggactcctaactattgccctatgggtcaaacttggcctacaatgagtattttgtttgtcttttacagtgttttcattttctattttattgagctaatattcaaaattaagggagttttccattgacatataaattttaggcttttcatgaatcatcacactatctagtaatgctaggcttgttcatctacatgggaacggcagctgaagctgagtggtgattgctcccgttagatagggcagttgttctctcccttcacagtttccatcacccaccgacggtttgtactgcaccaaggccctgagtgattttacttcttcttgcctggtcatgaaggcaactgagtttgccatgaagggcttcccatcagggcacattttctaattgtcataccattttgaaattagaagcacctttataaaagtgacttccttgggtaggagactggactagaatatcctcagcaagcagccacctaaccacttctggttttgcaatgacagggagttctctgctccaccaagaagat

SEQ ID NO: 46738 - DNA, 550 bp, Homo sapiens
attccagctaatgttatcttccagcttcctttgctctttctaatgcgtcaattaagttttcagcttcaatgaatatacttttcttttctaagcactgtgtttgtttattccgtcaactttgcagttgcatttttctcctttttttttttattgtgttacgtctttaatcattctaaagatacctgttttattgcctatgtctgactcaccggaaattcctaggtatccagtcatgctgtttgtggtatctgctgcctcttgctcctggtagcttgagtgtttcataaatatagattgcgaatttatcaacactgagcctttaactgtgaggatcctgtgaggcctggatcgaaggtgtgattctgcagcaaagttttacaactgcctccgtcgaatgccccatgggtagaaaaccaggcttcatttttacatgaattgcttgattgagagttcttgagctataaaagataagccctgaatccacgtgggggcaggtcttgatcaggaacactcagggcagactttctttttcctcactcagaacccagac

SEQ ID NO: 46739 - DNA, 526 bp, Homo sapiens
gtcaaagaatcaatctaaaaaatttgtaagacctctacacagaaaactacaaaacattattgggagaaattaaagatgatctcactaaatggagggatgtatcatattgttacttctgtcacattctgatagttagagaaagtcacaaagttaacccagattcagtgcgggaggggactatgcaaggacatgaattccatgaggtgtggttcactgagagccatctttggagattagctgcagagttcatgttctggccttttatgttttacattcttcaccggtgaaatacacttacacttatctccctttggactcccaaagcctcatcccattatggcaccagctcaaagtccagtatcttatcatctaaatcatgttggcaaatccagatagggctcttcagatgtgttccctctggtactgctccttgggtgtgggtccttgggtgcagatactgaattgtacagattgtgaattaaaaattctagctctctcaaacctcatcaccaacacacatatacac

SEQ ID NO: 46740 - DNA, 1141 bp, Homo sapiens
gtggcagcttcccagatctacaaagcaagtgagacagtatctgttgtttaagaggtcataatctctttcggattaaggtgatacaaaaataataacacagagaagctgaagcatcatggagaggcacacaaggaatgcttattgaggtctgaatttttaaaagactggacacgtctttaaaatacatttggtgttcgttaaaataatctagtgtgataacctctggaaatcacattattttaaatggagggaactagccttctttaattttttttttaaaaagcagttggaaaacttgaagacagggacttacttacctttccacatgtctctgtcaggaaccagttttctaggaagggtggcagaaatgagcttcatatgtttctggaatgcaagaatgtagaaaggggggtggaggttcaaagtccaggtagccctctgtgagaacgcaggaatcaaatcaggacaaacaaaagaagggtgaagtgggtagggcaacggagtttcgggattgactggaatgagagttaaggtgataatgctggggtggaaatgaaagtcagacccctccttacggactgggaagaaaggagccctcctagtaaagttgaaaagaccaagtgtcctcttctccatttcaccggggaaacgctcctgtgcctagtcgtaaggtacaggagagtctatggagcccatggagagtctaatgcaaaaactagtttccgaccaaactttgccttggccactgagcatgctcagctttgtcttctatagaaaagtgaactccgtggctccagattttagctatagcagctggagggcgggagtgagtgtgggagagccagcgtggcagcggccgcaggtggaaacctggagtttgagtatgcttgaaagggaaagtgtggaacgaaggggcggccgggtggggaatcagagaagcccccaaggaaatgattcatcattgtgattgaccttgactttagcaacccttcattaaaggagaaaatttggttattcggagatggggactgtgttgcaaacagttacaggcaaagaggggcagttcaggattccggccgtggtccgcaggaatgagtcggggcgagggaatggttgttataacccaatagtgagcctcccc

SEQ ID NO: 46741 - DNA, 1407 bp, Homo sapiens
gggttgtagcagaaaagcaggagctgtatggaggatgctcacctggcagcctcgatctgcccctcttccctcgctcctccctccgcaccagccacagctagttgtcaggggccaacatctgggccgggctggaactggctcagaaactcgcgtttgcctgcttatttctgcagctgggctccttgccaggtgcaaccacatctatgagaatctcgcagactctcagactcctatgcctttgctggtacagggaggaggatttactatcactcactgcataaaccatgatcaccagagatgtgctcccaagttacaaagcctgcaggcggtgcccgaggaccagagggccgggcgcggccagctcacacttctggggcagccgtgagcagcgggcacacgggcagccacgaaagcagcagcgagggtggtgcaaacacctcaaaactacaccgaatccagtagcgcctggcgcccccggcgcgcaaggtacgctttggggcggtcctgtgtgaccccggaagagaaagttgttttggggaaggggagcaaggagaggagtgcgagttaaataaaactaaatatcaaagttgttctgctctgctcaggccgcctctactccgcctcatctttgtcccaagtcctttcacagtctgccttcctcaaacggcccgatgcgcccccgtctttgccggagtaagcagaccgccagcagccggcccgcaggtcagtcgaccctctctggatgcaggtcgccgggaaaacccggagcggagcatccctcgggccgggaaacgccctcggcgcgcacccactggcgcgcatgctcagtccgcgcggcggctgcgagtaggaagctccgcgcggcggcgggggcggcgacggcgactggcgggtgggagtggaggcaccggctggcgggcgggggtacagggacggggcaggggctcccgctccaggttccttgaagcacttccgaccgcgaagcccggcgcgagaagcgagctaacccaagagccaacaacgagcgcggagagggcagcggactgagcggagccgccggccagagcgggctcggagcccgggtctccgccgctcgggacccggctaggcggcggcgggggcggcgatgttccactgcatccccctgtggcggtgcaaccgtcatgtggagagcatcgacaagcgccactgctcgctggtctacgtccccgaggagatctaccgctatgcccggagcctggaggagctgctgctggacgccaaccagctccgcgagctgcccgaggtaagggtccggcctcacctgagcgctctgcccgctcgtctgctgtcccttccgctcccatcctctctcgtcccctcttccatctccgggtccggcgtgaaggaaccttccctcttttatgc

SEQ ID NO: 46742 - DNA, 1096 bp, Homo sapiens
ttgggtgcttactgtgtaccaggtatgaggctaagtacttcatatgtattatattatctcatttaatcttcaaactgtctccgagaaataagcttgccatctcctttttacaggtgacaaaactgagtctcaggttagaaactttgattgtgtgactcatgagtagtgaattggtattttgtctcaagtttgttgaactctaaaatcataattctgtctccctagtataaaaacatttatatcccactacccagaaataatcattaacatttttgtacattttatttatctttttctcttttcatttctgttttataaaattgggatcatttaacaaatagatattcctatcttgctttttattcacttaacataggttgtaagcatttgtcatgccattgtttgcacttaagcacaagttttttaaaaaggcagattaatcaataacttttgccttttctataacatgaacatcaacaggaagctattaggtttcaaaggtaaggttgatgtgtggtagataatcgacaagacagggggatttccagaaggttgtgataagttaaaagtcagccagacagagtgaagaaagaggtgagtaagcagtttcaaagtctttacctgatttgggcttcctggtacccagggccatgtaggtacagagggaaagaatgtgggcagaggcaggccaaacaaatgtgcagcttttaaaagatactctgaagcaatcagcctgtatttatgtaacaaaacactctgcttatagaggtgcttggtgaaagtatcataccatgaacattaacagttgatgtcttgaagtatttaatctttgttttacaaaatgttaaagaacaagccttccattcagcgagtgaatgaatgagtgctgggttaagatgaacaagtgggtctgagcaaattaggcaaaactggaaggttgagtgccagtaactcaacacaggcccaacacaaaaggtagcccagagccagtggggaaacctaagtaacaccagagaggctgaggaggactgaagtctctctgcagaggccgaaacgaagttggcacagcagcaagcacctcggggacctgagggag

SEQ ID NO: 46743 - DNA, 687 bp, Homo sapiens
gaggattaagtgggatacataaaacacgctctcaggaagtgggtggctgctattattacaggtcttgctgtttttgttgttatagtagtgttattagcacccctgcaattcctgccaccaagccaacagtgtgtcatcagatgggtatgttctcaggaatgaggacacacactagttctgatggagaaaactttatttgaaaactgtttcacctgtggttttatatatagactcctgcattatgtaatgggtggtgattttaatttgtcctgtgtgcttacttaatggtaggtctagcaatggtctcatggtaaccacctcattttaaccagacttactaactagccatccttaaggtaaaactagatcctaccaagaaaccatgagacagctagttgagaaaagggtctccttttccagaaaatgtccccctctttgtcatattcttggttttctaggttcaggtctctggtgctcattttgccttgtctctatttcaccctggattttcataacatctccttttttacctcttgctttgttctgtctcctttctctcaaaggaggctttcatgtatcagaaggaacgagtcaatttaagacatggatcatccagggagaaaaacctgctggaacaaataaattagtgcagcctgacgtggggcatgtagagaacactcccatctt

SEQ ID NO: 46744 - DNA, 880 bp, Homo sapiens
catctcaaactatgtgcaaatcctaagaaacttgtgagataaagtatttggctagtgggaaaaaaaaaattgataacgtttttaacattaactggagtgacagtttggtaattggctctctgagaaagcttcagcatattctgaaaattggcaggtagctccagagtgagctaattagttaggaatgacttttaatactcactacctttaatagcctacccttggagaaaagacagataatgaacactgggaaatctatggtgctgcaacttgacctttgtgccatttgggggaaatgaggaagatgagtcataatttattatttaaagtcctccttttataatgtgttgttgtgaaagatttgacaaataatgattgctcctttagggactaatttaatcaaagaagcagaaaacaggaagaatagaaaacttgtgtgactaagcaatgtttaattttatttgaaactggctccaccaccctggtgataggaacagaaggtcctatggagtcttcccatagcaagaaaccaggcttgtaacagggtgtaatagagtgacaccccacacctgatgccctgtaaatgcagagtctgcaaatgcctctcttttgatgctttctcaaggtaagtcataaatgaagtcttactgctttaaaaaagtagcttgccaacagttgcccaggctccccatgggactgcgcttcactgagcacctgaagaaagtattcactggaaatgggctctcctgggagactgtctggatcccgagtgtctggcgttcatgttcccacacctggctgctgcttcttgcccttccttggctgcaggtgtgagtgcttgtttgtttaaacctcgctcagcactgcttggaaaaacaaa

SEQ ID NO: 46745 - DNA, 1937 bp, Homo sapiens
aactgaaaatagaaatgctgctcattttctacttgaaataatatttttacctttcaaattgattatctgaaaggttataaaaatatatctttattacattatttcacatatattcatttaagaaatatttttcactaactatgttccatacaatgttttagaagttgagactacaaatgctaataaaacagggattttgcctttaagtcgcttctggattcatcaggaagaaatacaagaaaacagacaagaatagtactgtgtgaatcacaaagcatagagcttagcactacagaagcatcagatagggtgtggagctgctctctattagctggaacagatgagacttgacctgtgatctggagcatgaagataaggtgattgataaaagcaagaggaagctatggaagttatctagacacgaggacctgcatgtgcaaaggcctggaagtgacagagtgtatggtttactcaagaacaagtgattgcatatggctggatcataggcacaaagggtggaaatttaggcaaatactttactcaggactttggtcttcatcctatccatgataattgtgctatagccttctacttttacctgatgctaattccttagaacttagttttggtttcacttttctgcaacttgtaaaccaataagtcaaatatttttcttgtattaacactagtatttagtaggaactgtatattggtgatctgctggcctactctgacctacgggcatggatagtgggatatttttgttttgttttttttctttttttaacctgtacagaataaaaaattgaattagtttccaacatttcacaatcaagagatttcacagatgaaactagtttttctggaaaaatgagaagatctggaaatcctgggcctgcattcccatatggcaacagtaagctggagctgagtaagggtaggtagtatctggttcactacagtcttcattttctgttgttttacaacatactcacctaactaattaaaagtgcttggttggctgatgaagacgcttatatttgctatctctagtgctgatagagacaggaggcagccaaatgcctaggcagataggagcgggtacacagtgaaaccccaccttcaagtggaaggtttaaagcctgcgacccagccacatgggggactttcctgcctttggattaggtaatcacccactgcttcaccattccactgagagctgttccattgctcaataaaaatattctctgccctcctcacccttcaatgtccagtgtatcctcatccttcttgggtgcagtagaagagctcaggaatcaccaaacaggggtacaagctatgacacaggcaagctggggcatgccagtgtggcagagcgaggcctggaaaggagttgccagctgggggcccccggcttgcaaagtgacctagaagaaaagtcccgcatctgtgcaggacatagaactacataaatttagttaacttgcacaataacagttctggacaaggtgcagtgacataattctgttttcgtttatgcaagctgaccctgtggtcagtgggttcacaatggccaatagcttgcttcagcgaacagaaatgaaacacctctgtgttatgaatcttgtttctaattatcttatacaatgtttgtaactctcaaaatggttgctcccgatagacattataatctaaaaatcccttcagcaaattataagaaaaggaacataagattatgagtctggaggcatgatgacttcacagtaacaaacatcccaaatggcattggttgaccatttaatttccttggccctcagaaacttccattagaaaatgtctgtaatgtcacccccaatatctatctgagaggttattactggcattcaagtgaaacagggtgtgtttcagaaagaaaagcaggtaactactgaggaccc

SEQ ID NO: 46746 - DNA, 2188 bp, Homo sapiens
tcatctccaactcaggcacctctggttttacctggtttttgttttgctatagctgggcttcttcctggaaccttttgaaacagcagaaactcagtgtgccacagttacaagttactagggaaccctgagttacaatgtgaatgatcccaaaaggcaaataaattgtgatagcttccttcttttaaaaatacactatagaaggcaggtgggatgatttacagggtgggatgacaaagctaatctgagatgatatattttccacagataatcaagtaaatgagcaataatttgcttttcaaattctgagtctcttccctggctatgctttaaatgggacttccacatgggccatagcccaaagttggatccctttgcacagaggctagacattgaagtagtggcctttggggtaacgcagactcacttctgttgagagtaattagcgaagaaaatttgtgggaactgaggaaggttcagcagaagtctgccctctctggacattttttggtggctgggaagcagggcaattgtcctgcctgactgtggagtttgttcagccttgtcatggacatctattgcataattccgactttccttctctggagtaatggacatttcacttcagaaggacttttaattttacttaaaaaatccagtcaacataatagaagataaattcaattttcagtaacattttactctgttaccacttatgtccttagggaagcttaaagaattttcatcagtacactaaaaattagatagttggatatgttgcaaaactttcaacacttgactcaaaattcccactattgctaagacattcttataaagaaatattttggggggaacttagcaactacggttcttgtgaagtggtcccagtgggaatgaggtttatgccaaactctttttttaaaatttggtttctgcctcttgtgcctggtatccagtattagttacagagtaaacagtattttccgaagactgacagggtcagctgttctgggaatgtggccgttgacctccctgatggattactgtcctgcagactgcttccaagtcagtagaaaggtaagcattctttctgtataagtgcagattgctttggaacatgttacaatttcaactgataaaactgaaagtacattttgggcacactgtctcaaagggcaccgagctgttactttgggggcaaagtgatttatcatgtcaacacaaccatgacagttaagctgctgggtttgggggaggggtgagctaggtgttgaatctggttgtattgattaagtcaaaaagacccagaaaaacttaaatccggaactcctttccaaagttagaaagacacattgtaattctgcttctgagtccttttccctaaaatcctgtcagttcaccttggtttgttgtctttactcctgaaatagcaacggtgtgtgtgtgtgtgtgagagagagagagacagagacagacagacagacagacagaaagtggctactaggaactactaggaagtgtatcgaccgttgaaagggcctagaaatatattgactgcaaatgcaagagcaaatcctgttcaaccaagtacctctgtggatgtaaccatgcacaagagaaaataaattgaaagccccttgaaaacgtgctattatatagtagttgagaaaacggaacatgctggacttgattctcaactgattttagccagtttgttttacagactctgaaggtatgaatttagttttatatccgaattactattgctatgtagaaattgtcaccaatgttaatagcagtagttttttaaaacctcacattttacttttcaataagtttccaataaaggaattgcatttttttaagatggtgcacaaattaaaaaagcacttttcaaagttcttacagttctcacttgattcaaatattttctaatgcttcaaaaaacactctgcctcagaagtaattttagaaagaacatgttttctcccttagatggactaaaatgtattttttatagtcattcaaaaaatatggcccagaaccaaaataaggggacaaccagtatcagaagaagttaaaaaacttacattccagtagaaatagtttatgtttcactgaagaacagtaattacaaaggtacaagtttgttaagctgtcattatcataattatcatctactgatattttg

SEQ ID NO: 46747 - DNA, 774 bp, Homo sapiens
ataagacaccaaaactgagtagatgcttgtgtgtcagtgtgtatgtgtgttagtgtgtgtgtgtgatagagagggagaaagagagagagagacagggagagagaatgagatctaaagcctgtgaaagaggcttaatagatgtctccaaacagtaacactgttctccatcatggttttcagtaaaggcattgctgttgtgaaatgatgtctaaggggaggagtagtctgctagtctttgggaggtgtttgtaaatttgcagaagtttatcagatttgttgagaaagcaaaggtcagcagcctagggttacattttgacaggagaatgattattctagaaaagagatacatgagtcctcacaggagaggatagtgagtaatggtaaaaacaaagttaccagtgctgagtgcttaaggcatcatattggattcaaacaattaattccagttctgatgccctccagttgtggggttgtctttggcaatttctcctcagtgaacctgaaatttgttagtgtattgtaatctcagtattgttaataatatctactgatgatatttttgtgatttaatatgagattaaataacaaaatcgtctagatcaatatatatgcagttcagaaaatatttattcacacctcacctcactccttaatgcactcagtgttttaccacgggtaggatcaggtcctaacatgtggtatgagtacccataaaaagatcctgagtaaggggacatactagactattcagtatgccctctgataactaatcca

SEQ ID NO: 46748 - DNA, 480 bp, Homo sapiens
atttcaaatgctttatatctattgcataatttaatggagcctaacaggtaggtttttataaatggcctattatatataaggaagtggagattttcaggaaggaagacaattgaccaaggtcacacaaactgtaaatggcagaacccagcctcacactcatgtttgtcaaattccccaatccgatgacttgcaccatggttgctcaatattagagtcagcaagagaaacatcaaagaggagaagcgggagctcaggagagagcacagacctggaaatgcacgttgaaattagccagttctaatgagcactgaaaccatgagagtagagaacatgagagaagagagtcatggaggagagacctcaggcaatggaaagaggaggatgccgaatgttaagtcttggggatttttctttctttttttttttttttttttttgttagagacgggatctcaaaattttacccaggctggagtgaagt

SEQ ID NO: 46749 - DNA, 1660 bp, Homo sapiens
ttaggagagatcaatcataggaaacaattagagaagacttttctttgtggtaaaaaaaaaaattccctggatacactatttaccctaaaagaacaatttcttaaacattaattatgtatttaactaaaatgattgcataactccaaataagacattgtcatgcttgtagtgacagaaacattcagctgcccagctagtagtgtttggatttaaatatatctctaaccaaatgcatcagttacataaacattggctaagcagagttgtttctaaataaaacttatacgagtgaattgctaagctttcttcttccatttgattcaattctgcttgacttttaattatctctgattttcccatattctgggttacgccaatatattcaggtgttatttatgtagcaagaattcttccgtgttgcaaagatacaaattcacatataaaagaaaagaatattttgggtatgtttacttagaaacttggaagtttgggatgagtgtttgaatttgccagttttaaatatttttagagattaaaactatatgacatgaaaacctctgcattaggtctgatggaaatcttaaaatgttataagcaaaatcaagaaatatcttttactttatttgtaaagttttgctaagtttgattgttatgtttatatacattttcctgctatgtgcttaatgaatatctatatgtaaatcttaatatttattgatattttgaatgattgatattccctaaattctttattagacatgcatgtttattatttcttttatatattgacataatcaaatcaatgacttttaagggaaagttctgtttaaaaggtgttcaaagtatttataacttcagtgcttatcttaaagtactagatgatttttaaaatggcacaagactacctacatccagttgtttcacaggctctccctagcttctcttgtaaaatgatgaattgttctttatttcctctttatttggtttctttatttcctctttatttggattggtgggtttccttgtttcaggtggattgtatttgtaaagtgttcgggcttcttttgacacaaaagagagcctatttcttccagcatgacccaaatcatttgttaaatgttcattatatgttcatgttaaatgttcattctggcaaataattaggaaaaataagctaaaacttcctgtttaatttggactttgctttcactctctcaatttatcattctgtgttgacattgggtgtttcatcatttgaattccaggcacttttccaagttcacagcatgtaggagttaagtagtagaaactctcagaattttaaacacttgaagtgtgttaaagtttttttaagacttgtagtcgttattataatatcatcctttatattcttacaatagaagaaaataattttccaaagtgaaatttgcaatttatactgatggtgatttaaatctttccaaatcacacaattcaaaattaagataactattttagatgctgtcaacgaattatcttccaactatgcaatacaattttacattgatttcattctgtgggataaatgaggtataggatgtaatgcttcacagcttatttgtatcttatttcgaattcagagcaaggcctcattagcaaaatagaatttccttcatttttg

SEQ ID NO: 46750 - DNA, 624 bp, Homo sapiens
ctgttttaaagcctctccttcagtctggagacagaagacaaggccaaatgggtgtctctggaatgatagacttagaaagatctatctctacatgagcagcacattttaatgtattgagttcaagtctagtgtctttcaacttttaatgtgtacatgaatcgcttagggatttgtaaaaatgcagattcggattcagtaggcttaggtcgggcactgagctttggcactcataacaggttctcaggtgatgctgatactggtctacagccttcattctaagggtcaaagtgctagcagacaatgtcttaattggatagaacattagttaactttctgttgcaaatgtagattgcatcaccatttgacattgtgaaacaaggtatgaggaagaattgaggggaagttaactaatattccaagagagacttatgtgtgatggcaacagtgccagttgcttcacatatgctgttttatagactttctaagtggcactttgagacccttgtttgggtgatgggtttgaatatgcagaaacaagccctttgctgtaactctgtgtggtataattcctgaggggtcggaaaggtaagtaataaagtgtgtcattacccattattaaaggac

SEQ ID NO: 46751 - DNA, 1392 bp, Homo sapiens
ttaattaggaagacaaatttgacaggctaatcatttattgagcacctacaatgtgcaagggaatatggaatataaagcaagcctggttgggatggatatataaaatacaatccctgcattcagcatgaaaatattctattcataattaaccatctttttatatgagtagggtctatactgactcttatgcagattagctagaaaaagttctacagcattacaatgagttattcctgcaggttaatggaccataacaattcatacaatgtatcctttgtaaaatagagtaaagctaacatcctgaggcttctttgaagcagaaagaaaatctctatgcagcagcctaaaagatgaacatggttgttgcttcaaccatgtcctatggaactatatagctgtttactgcctctttttctcccctgtcttccatggcacaaaatgaatatagatgggagataaagagaaacatttagagcaggagaattgaagctggaagatgtgaccatatttcacatttattgaggcctctataaaatatagtgtcttaaacttcttaaaaaaagtcttatatctaaaataggagctcaatgattgaagtatagctctacatggaattttgactgcagttgaaagcacggcaagtatgacaacttgttttggaagcttttactttcgtctgatgcaacaaatatttgactcatgctggaatcagcattgcacatgtaatagagcaatgatctaatccagcatgacaaatcctattttcctctgtggcggtgatttgaacagaaaatgtgggtcatcctgggtaaaaatatagataggtgatttttaataagacttctgctttttatcttccttctatcattttagagtgcacagagtgtatcttcctgtaataacttactcactagagctttcaatcatatccagtgaatacttaccaatataataaagtctgctttaaaaaacacattctcaactttcattataacatagcacaaatgtatcctataaattacttttattttttttaattttattatgctcacttatgtactttgccttttctaaaccttttctttaccaaaacttttctggtttaaaccaaatgctggcacaaagtttaaaatttaatcaggtctgagttaaagtttacttcctaagggatgccttcctcaataactttcttcatagagccctttactctcaggtctacttcctgtctatattactatccattttttatatccttcttagaccttatcacaatctaaatttttttgttattttattgaatttttctcccacaagaatgtcagtttttttagatcaaaaacattttctttcttgatcattctgtaccctcagaaccataaacaatgacttata

SEQ ID NO: 46752 - DNA, 718 bp, Homo sapiens
taactgataaaccatatatatatttactataagtcactgagtaattattaggaatttgcctttatgttgtaaaagagaaatcagatgttgacattatttctcttaaatacattgtgctttcctttgcattgataaaaacgtgaagaaaaaaatagaattttaaaatttctcttaagaatggtagcaatgccatttatgtcccctgtatataaattttggatgctggagataaagccctgttccttggcccagggctcagcaatctttggaacagagctttctggactctctggcacataccacaccccaaactggcaaatgctcatatctgcaaaggtcaatgtactatgagggttggaacaatccctgatgactaagatgggaaaagaaaaatcaaagtacaaagcaagcataatgtcattgatcaaattttgtttgagaaatagctgtgatccaaatctttagttcagtctgacatgcactttctatatgtggtgtagactcatagttacaaaaaaagtacgtaaaaagttttattcacaaaaagttaaatctgttggtagacacaatgtctgtcacacttggacaaaccacccatttgttaatcactcccagattaatatctctaggttggaaatcttccctaaactgtagactcaacgtccagctatctacttgacactagagggtttaatagcccccaattaatatgtcctca

SEQ ID NO: 46753 - DNA, 1477 bp, Homo sapiens
ttgtccccctgaaagaacatctaattgaacaactatccatgcaagaaagcaccttcacaaacaccaaaaaaaatcaggtaagcaatcatagtacctggttttaacataatattaaggatagaggcattgaatagtgtaggaaagacagtcttgcattgcctacaccacccctctcccagccctcctcagtgctatacatgtggaaggagaatctgtgtgcttgggagaaagagacctaagtgagtgtgtgggactttgcactggaactccctgtagccctgtcacagtgttgtgaaacacaacccaaaacagatttctgctggtacccatggagggagcatttagataagccctggaccagagggaaattatccccagcagaagtcctggctggctccacctttagctgactcatggacctgtggcccagaataaatttgagtggcagtcaggccacaaaaactacagtccttgggcaagccttagtgctgacctggtctgataagcagtggacctggggtacacatgacccagtgcaataccagctgtggaggccaagggagtgcctgcatcatcccgcccccagctccaggcagttcagctccaagagagactacctccacttggggaaaggagagggaagagtacagagaactttgtcttgcaacttgggtaccagctcagccacagtaaaataaagcaccaagcagattcccaaagcccctgattgcaagccttaattcctggattgtatttctaaacccaccttgggccagaaggaaatacactgccctgaagggaaggatctagtcctagcaggatttaccacctgctgactaaagagcccttgagtcttgaataaacatcagtagtagtcaggcagtagttgctacgggccttgggtgagacccagtactgcattggcttcaggtgtaacccagcacagtgccagctgtggtggacataggagtgcttacatcccctctgccaattccaggcagcccagcatggtcagagactcctgctgattggaggaatgagagagaaaaaagcaagagacttttcaggataacctaggaattctcccttattttacccaagtcaaccaatgctgtccaatgttgtgcctctaggagttggcaagagtgacagtgcttctggatttggggaactccctgtcctcttctgcccccagtgctgatacagctgcagctgcagtgactacaggcttaaatcacaacactcaatcttctttgaatatgtccttctcaaaaaggatgagtacaaacaagcccagactgcaaagatagaaataaataactcttcagtgcccagatattgacaaatgtccacaagcatgaagaacattcaggaaaatttgacatcagaaaacaaactaaataaggcactagtgaccaatctcagagtaatagactatgtgacctttcagacagaattcaaaacagttgtcttgagg

SEQ ID NO: 46754 - DNA, 2126 bp, Homo sapiens
ccaagttatgtcttcttccccctgactttgtttctcctagctcatattcctaggacattttttactctaatgggcctcgtcctgttgatgtcttccccagttcctaaacccaatcataaaggagcaagcaaacattgtagcttcagattctccccttctttccactcaccaattcctctttccaggatattagggaattgtaaaatgttcctctctgtctctagcaacattttttgcttaaagtctatttcatttcatctttgtatagatacttgagctctcttatgatacttgagctctcttatgatacttcagcttttatgtttgcatggtgtgtgtgtgtgtgtgtgtgtgtatttatctgtagtataataaaaaataaatacttgatctttgatcctctactcttggcacaaatctcctaaaacctttggaatttactggctttgcatctggataagatgactcatggtagtgggcagcagtgggctgcgtagatattcaggttaggggctggtcaccagataaaccaatcatgtaattagagggttgcaacttgcagccccaccccctgacctccagtgctgggattcactcaggatgctggcagaaatattaaagggaaatattagggaaagttatagggaatagtcacaaacctttttggaaggccgaaaggttacatagcttgtaataactgaacaggctgaaggcagctggttcttaccttagagcattatgtcatagggtaaatactagagataacagagtcttccccagttaattttgtttactctacctccattaactaacctttgagccagatagccctctcggggtggggggtgggggaggtcgaccagggatattgccccctaatggtatttactttagactgcggtacctgaactttaatcattcataaaactactctcttaaccatgttaattattcacaagagtgttgactcagagcttctgttgttaattctatactaaataaatgcctggagtgcaagctgctcagggccggccgcagtgacaaacctctcttggtgtgcaggcggtcggacactcagcaggactggcaaaacagaatatctgtgtgtcagtgtacgttttattcatctgtcgttgggtcagggtctgaaggcagacccccgcagctaatgcccttttgtggggagcaatgtctcactccagggaagacagagggactagagactgaattcaatcaccaatggccaatgatttcatcaatcatgactatgaatgaaacctccaaaaaagaaaaaaaaaacaaaacccctagatgatgaagttcagagagcttccaagtttgaatacatctgcatgctagaagggtgatgcaccctgactccatgagggcagtggctcctgtgcagggatatcatcctgaagtacctgggcagcccactcctgcccactaccatgagtcatcttattcggacacaaagccagtaatagtaagtagagtgcttttctgagtcctgaaggctgttctagcaaataattgaacctgagagacggtgggaagccccaaacttgtcaactgggaaggagtttcagtgacctgagaatcccactcgcagctggcatctaaactgaaagtgatcttccgggactaagtcctttaacttgtgggatctgacactaactccaggtagatagtatcagaataggatcgaattttggggcacccagttggcgtcagagagttggagaattgatgtggggaaatgatacatatgcagtgctggggaaaaaaaacaaactatacaccatcctttaattttcaacctatttttagattggaatctaaagtgtttcttacagacagcaaagagttggatcttgtttttttgtcattatgacaatctctaccttttgattggattgtttcattccttcacatttaatattattattgatatagttggatttgcatcccattttactttttagtttgtctcatgtcttttttgtttctctattttttatttactgtgttctttttgtattaagtgggtaatttttctggtgtattattttaatttctttaatgacttttagattatatttttgagttattttattagcattcac

SEQ ID NO: 46755 - DNA, 799 bp, Homo sapiens
catgagcttgcagacctatggtaggatgaggccaggcaaggctggggcctgagaccaggctgactcattaaaatgaggtaggtactgaggaacaacacacagtgatatgtcctggcaagaagcccagttggaggcaggaactcgatgtctggggccacacaggtaggctgttgagcgtatctaacctgcagagttggggttgtccattaggcatagtgatgatcaattcatgagtagacaggaaggctggcaggtggacatcagtggataagcttatcaacgggattcttggaaaacgactcaatatgttgttgaaagtcatccaattattctactatcaagagttaaacagtaaactgataaggttaggtaactaagaggttagggcactaagaaaagcctcacaaaggcatggcagggtctgtgaactaggcaggttatgataatcctttgctccttccaggaagttgaagggctccagttatagcaggttaattgcacttgaataattttagtttataccaaatcatgttgacttctgactccttggtaaggtctagccctatgacttcttgcttagaggcttgtctgttaccacacctcctgtctttgtatgacccaaacaacatgaagcagtcccactgttggaacttaagacaattttcaccaagcagctcataggactacagattgaagtcattggagaaaaggtctttctcctaagcagatctacacaaaccctaactggtatcaagggaaaatgtttactatgtttacctcttcatagtagaataattgg

SEQ ID NO: 46756 - DNA, 503 bp, Homo sapiens
ggagtgaacgtgagacaataccacgagtgtaaccccacagaggacaaagaaggaaagttttgcaaaggtcacagagggttcctgtaaagagaggttttagggcagttgcagagttggaaacacagttgtaaggagctgaggagtctgaagaagtgaaaataacgagaacaaagcaatgttttgagaagtacagcagtgaaagaaagaaaatatctgagataatggttaacaggagttaggattatatttattttacctggtgttctgcaatgagtgctttcacctcttcgatctcctgggggatgacttctttatccttatcagtaagtgtagtttcagcccattgcaaccaagccagcaaagcttccaacaattcctgtttggcaataagcccagccagagcacttgctaatctctgctgatgttgctttgcccaggccagcacctgtcagagaaacagaaatttctctgaatttcctccaacttagtaaaataattgcagt

SEQ ID NO: 46757 - DNA, 3566 bp, Homo sapiens
aggaaagatcttgatttgaaaactcaatagccagatttagacttggttagttattcaatagaatattggcttatgaaattcatttttaaagtttttaatgtatactataggtttcttctaaaaaggatttaaaaggctcttgattaaaaacagaagcagcagaggcttaaaaatagattcaaagatgagttattaaattacctgtgtgtcttgtttacaaagggcaaaattactaatttacaatcctacgggtataattttataaatgccaaactgctcgttaaagaggttttatttttgaaatccacatgataactgcaacaatcttgaccaattttggtcaaaagccaaaaagcctagataaatcaatatgcttccttgagataggaaacagagtaactaccttccctgaaaaggaaacatcaaaagacaggtacacatacatgtgtgtgggtgcatggggacatacatatgtaagcaatgtggacagaagtacactctcaaatgtatcaggtgtttaagtatttctcaggaaggaaaatattcatgcagttgatatttgtaatcccgagtctattttccctgctttgattttctaatttagctttacatagcatttatatattactcactttatgctgatcaatgagagtccggagagcatcctcatcatctgggaggacaccatggaaacgcagggtttgctccgcctcagccagccactccaagagggcatgtaccaccgagtggaattcctctgcctaagagttcacacacacacacaccccaaacaaaattcccaaatatgcctgttagcacaatttacaaaactgtatagtggattcatcccttcaatgaaaaaaaaaaagttttaaatttaattgcttcattactcccattaagaagatagagatacacatattttacaagaaaacacttaatatattaaaaaaaaagcctatatgaagaaaaatttaccactttaacaacttgattttagatgaatggcagtccatcatacttccaagctgagacattactcacgcagcacttgtatgtgaagattagaatgcctccctctagcagtaatttaaattcatgagggagggtgggagaaggatcaaggcaatgttgctattagaatttccttcttcagactgtcctgattgagacacgagggcctcacaattttttactagaatagttcttgttgaggtttcaatacttttcccattacacccagctctcatttacatggtttttacctgacgcagggctgcttctaaccgtgtttgctttgatatagaaagtgcacacacggtctcccagcgtgtgcttaattcctgcatctggaccttgacccaggaggagtcatcccgactgccttctatgagttctcgggctgagcgcttcagggcctgcacactgctggtcctcttccccaactctttttggaaggcctaagaagaccatattttgaaaaattaattttaattacaaaaccaaaacagcaacacatactgtttgagatatatatgtgcacataacatcatgtaaagatatctaagacctacagtttaataaccatatttctggcagcatcttcagaagataaatgacacactgctcctatttgagcaccatcaagaagagtcttgtataaatttgttcagtcctgtcacattctcatgagaaaacaagataagattatcttattttaaaatgacatattggatttaaataatggcagccagccttcattatttcaatttcataaaacaatgcaacaaattccttttcttaatgattctttaatatggtgtcccaatttctctcaaatcactagtgtgaatgtcaagtggatgctggctttggcactactctaagagatgtatctaagaacctaacagaggactaagcaatcttgatgtgtgtaccacggatgtcttagagataatggcagggaattccataggaagttggcagatggtcttttattcctataacactccttggtctttcataatatcttaggtactaactcataatgtcaaattttagaggcttaaatccttgtctttcaccttagaggaaaagcttctgggtttgcttttttttttttttttttttttttttttttcctgcctaattttgacaaactgatgtgccaggaattaaattcatttattttggccacagactgatctaagaagtgagcccagagctctttatttttgatccaagagtctgtgtatgcaactagatctttcaaacattaataaccaacattctgtcacaataaaattaatgtgtttttaaaaaaatcatcataaatgaatattaccatttggccatatctataggtttctattctgatactcagatcattcacaaaagtgagcctatcacaaaagtgattatttgactgattcaactctaacagttaaaatgagatgtgcctgcagaaagacacaaacacacacgtatacaccaatacacacattcacacacacacaagcacacatgcaaatggtacagtatctaaatatcccatttatgataggactagtccaatagttttcagaagactttccaaagcatttttacatacttgaacttcttgagccttccagttgtattactaatgctaaatgattaattcattcttgatgacctttaatatataaaagatctggcaattacctagagtagtaaatatttagacagtgagtttacagaaatggcatttatgtaaaaagtaacattacgctattcattactcattgaataaatgccaggaaatagagaagtttgtattaaccatacacaaaacatttatttcaatataagcaaagccatgtgatttttaaatttttaacttttgtagacttgaccaatgttctttatttattcttttattttattttaatttagtttgtttcacttttcaggtgtaacaaactctcttatgggtataatgatagaatagaaagaaaaaaggaaaaataaatatgtaataagacttttaaaaagaatggtaagatcaaaatagcataaccaatataaagagaacattataaatggaataagttttctgaactcagatactagagagaagaaatacaagatgaatttaagtagagtgatgtaagacatttttatataaagtcaactccaatacaactattctacattagtactatgcttcatattgtttccaaggctaagttgctttatatcatttggtcattattttggaccttacacttagttggacaccttgaatattacctttgatttacatgacatgacagttttacatgcatatcaggagatttcaaggaagccagttttctcgaagtaaataataatcaaatcccttatagcataagctgctgactcataaactgctataattcaaggggcaaggttaaaacagttttggttcggtatttttaaaagcagttggtcatgaccaccatgggtcatgtcacaaatctacatacttatgcaatgacttagtgtcaggtcactgaatgaatgattttaaattttattacataatt

SEQ ID NO: 46758 - DNA, 609 bp, Homo sapiens
ttctcattgccttcttgagagtactttattaataattataacactttcctttatctcccccaatggcaaatattacattctactcaggatggacactgaattaaatattcagacaatgatgacaactgcacgtttcttaagtcattgaaaattatttgtattatatctataagcaggcagagaaagataaggagataaaggctggatgcaagcaaacatcacctctgagggacacagacatcaatactcaagagtgaatgtggtgaaataattttagttaaaatttaatcaggaaatccaggaaaatgtctttctgtgctctgttgtctgcaagaacccaattctatatctagtgtaaacaattacctgagttgattgagaaatggcttcatccagtgccacagcacgctttttgacatcttctttaatttgactgtaaagggtgtcggctgccacatacttctcttggatagaaaagccttccccagggctcaattccagtaactgtggcccagttttgttcatcttatctatatgaggcttgtgttcagctatcaactcacgcagttgctataacaaaccaaacagcttttcagtatctcagggtca

SEQ ID NO: 46759 - DNA, 747 bp, Homo sapiens
ctaggactgaaagctcaacacctgctgttttttcaagagtcccactaccagtccacagacaagattataccttcattgattgcttttcctcttcactgcatgcggtcatgattttatgcccagatttaacaaggtcatcaataatatccttgtgtctcaaaatctccatggtgaatgtctgtgatttaccaaaataaagacaaaaaataaaacaagaaattgtatgactaaaatgaaaacaattaggctaagtagttaaaaatatcacgttacactagaggggtcttaaaaagtaaatcatacaagcacattttatagagttggagcacaccagcaaataattcatatggcaattggaaatgtatttcttcaccttttgaacttgaagctgagcagaagtctggtcttgctcaagcctgatgtcacccagagacatcaattttttttctgtttcagtaatccaggataactcagcatcagctgcttggtcaaactaaacaaaagataaataattaggtcagcacgttcccgttcctgatgccagaaaatacctatctacagttctttgaaatatccttattacacaagtggaaaatccgagcttgtctcctcatggcatcctaaaataattcgtgataatgactaaattttaaagaaaggagaactttccacagagtaattaaacacaagctcttaaaacatgctggatttatagcactgcattaatgattttaggacagctagcac

SEQ ID NO: 46760 - DNA, 844 bp, Homo sapiens
gtttttcttccctctctgctggagggctacataaaccagagtcatcctcctccgaagtgagagaattagtaccccatctgcacttgctggccttggtaacagcatctgacatatcagcaggttcaacaaaagagctttcacttttgtttgcataatccataaaattggccgggacaaacattcgccatgaccgtctatgctctttcttttccgcatgagatttggctttaggtaatcctgtggttcgaatgatatcactatttagtttgagtgcatcaaagatcatcttttcatctagtttgttagcttcccgacctctcagctcaaatacactggaagaagtaagggcaccattagagcataaagaactaacatccagtgttctgtgactgtagggtaaagttcgatctgtaaaatgcctggaagatagactaccttttgaaccagagtctatctgttcatttagtctaacagtatcatagattgaccgctgtgggacgtaacagtcttcgatatttaggtcctcctcttcttcacccttccctacacatgggggattctgacgtaaacagtctggtctgctgagtggcttccccattttgcagatagttaaaacaaatattgcagctcttgacacagataagaaataagataaagcatcttccaaaaaagtatacttctgaacagagctatggagtgtctttagcataaagacacatgctcaaataatatatttcataatacatgaggtgtttaaggtcatcagcagtgcatcagtataaatgcaactatccttttacctggttgattttaggatgattctaaacaataaagtgcatcaata

SEQ ID NO: 46761 - DNA, 1184 bp, Homo sapiens
aaataaaccatgctccagaaatttaaaagacaaacacagggacctggtattgttcacatcaaggcacagaacaaatcttcagagaaaaataagttaagtctaacgttatgagaaagttacatttttcttttactttttttttttggaggggggagtagctataaataaacttgattgaaaaggcaggttttcttcctgttttaagcttcttcaatgctattcagaactactcaaaggaagaaagaaaaaaacaccagacttttagacacccagggcagtacaatccagcaaccgtttaaagtaaacagaaagcatggtgtactactaagcttctttaaaaaaaaaaaaaaaaaaaaaaaaaaagccatttccaaagattcttatctggtcctccttaggaaggcttattccacctgaggcaattgcagcaacgaagagctccgcggcttcctctaaggcacaggcagcgtaattcacattgagcagaaaacccagggactacattagcctttgaaactgaaccaagttctgtggccgcggtatggccttcatttcagctggggctagagagagacggtggcggtggaggcagcagaaagaactccggaagggagctccggggctgtccgcggctcctcagggcagcacggtgccgggcaggcatgctctccagccagggcgcttgcagcaacgccctctctcttcaggcaccatctgctgcgtctctgggcctgccgggcgttccggagccgcagctctctaccacttcggtgctacgccctcccgtgacttaacttcgcagtcatctttcgcttcttcccgggagtcggcgagcggtttcagtgggaggtacctcgaagccgagaggctgcaatgtaacagcttgtggtgacatcagcgcaaagcaggccgagtccggccactggggagagggacagctcaggttcaaacaccgcggaaaccccgccgactacttcaaaatgggaggggatccgtagggcttgcggaggcagaacctggcaccgggagatccgcgaagaaattattttgtgaaggtccagagaccgcactcatttgaatactaaatgggaaaaggggggctacataggtccctatccttcagttgaaaccgcacttttacactgaagaatctgatgcttcagcagtatctgcgatgcaaagtg

SEQ ID NO: 46762 - DNA, 2223 bp, Homo sapiens
aagaataagtagcactcttacctctgtaccaattgatctgcctggtagtattttccatcaataagaatctgtacatcaattacatgctggcgtaaaaggttctcacattcaagtatatacccagcaatttctgcttcattctgaaactgcactcctgattctaatcttttagaatcctgtattttaaaagaactcagtattaattctgtgaaacaagtttcaaaacaacctgaaatataaaacatcaaatattggaacagaagcctacttgggctttctttagttttccttgttggttcaaaaatatgttttccctcttcttgtctctcaagagagcaaacaccaatcataatctttaacaaactttaagtttcagtggagagtattacgaagaatcaaccaaacattatgtaaaagttttagttcatccaaacgcacagtgactcctctaccacaaccccaatggctcctaaaattaacttacagactgaagagcatttccagcaagaatcagtttgtcttcacagatgacactgtccctctgaactctgttggcaatctgttgcaacatttctaacctaaaagatgagacaaaataaaataaagcttctccctttgaagtcaaagagctcaccattcctgaaaagtgctgcccatcaaaaagtaaaacacaatcccacaccaatgattcaatacctgtgtccatcaaaggattcactgccgaagctaatgcaagagttgatcagtgttggaccacaatgaaccaagagaagattttcatttgaatcaagactggttcgagtgctggtagtgttactaaacacagaatcactgctacggtaactataactactactgtgcatttttattcctgaaacgatgttctttctttcacctttcaaagtagactaaaaggtaggaggtctggaaaaagctctacttctaacggtgaaaagtggcagctgaatattacagcttttagtggctccttaaatatgcttcaacatgcatatgcaacacacagcaaataatatgctgataactattcaaaagaatctagcctaaagccattcgtttgctagctgaggtttgccttttgtagcttgtattaaaaccctacaagtatgaacaaagcaggcagattgggcgtcactggaaaggatatgccaaatatttgcactaagagtcatccaattgcaaccacctaaaaaacaactcagatgcctcacagatgtccaggacaactagtaaagattattctggcaataccaatcattagctaaaagaacacaaatatccaatcatagtctgacttctgcaaaagaccaggtctgtgctgaataatgtaaggaaggcaaacagctagaaattatgaagtacctataaacaaatgaatttgatgagaagcaaagtacgcttccattttaaccaccatgtcatttgtttattaggttaaattaatggaaaaagtatccatttacctttctttatatgacacgctcccagtaatgttacttctaaacctactataaagtgccaagtagaatactgatgcaatgcttacaaatttaatttgtctgtgcttgtttttccattctataggatattacatggcataagaacactggctctttcccatttgtttttcatacacttccatgccacatagctattactcgcaatacatagacaatgccaaaaaattcgcatgaagaaacatgaaggcatttatccaaccagcctcctaaatattttcctacctccaataatactgttacttctccactctaagaatagatatttttcttttcaggggtcaagaaaggggaaatttgagagtgccacaccaattgcttcttggccttttggctaagatcaagtgtgagagtgccacatcaaatatagtgagtgaacagaatagctcaaaacaataacagtggcacctggcatttattaagtaattattatgtgcaagaaattaatcattttagatacataactcatctcatactcataaccacccaatgtagtaggcactattacatcctgtttacaaatgaagaaactgaggcttagacggttaaagaacttgtctaacatcatacaactttgcaggctgagctaataatctaatttaaaattgagtggcttctaggccctgaactctcaaccactctctgctttcttttatgaacatatcttaaaattcagctactgttctga

SEQ ID NO: 46763 - DNA, 2666 bp, Homo sapiens
caattgaatcaatcctatgtaatttctacagtgacactaaccttcagttctacaggattattaggaaatgttctctcagacattgtggtcacatggtgtctaatccattggatgaggtagttcaccatattctggtattcaatccatttgacttcaacatcctagaacaatcaaatgatagaaaaggttcacatctgtagataataacattcatatctaagacaatttagtcagaagtcattctgtaaatgtatgtatttgaagcctgacagacagaaccagctaaatgttttcttactttcacccagccccaatccctgtcacataaacacctgtaaaatttgctatcaacatttggccactaacactagccttatgagtgccaattctgatccaaagaaagtggctgcctggggtattgtatttagaaggcttttggggctcaatctaagcacagcagaaaaaaatccaaagtcaatttggggtgtttaccagggctcaagattgggcagtaacaacttgcataagccaagttagttgccatctttgccaactattttagatctaaatctactatgtatctcaaactcaaaagacttacccaatatataggaaaccagatatgtacacaaactacaggaaatgtatatggtgggattatccaagtactcagtaggcaaactctttaaaaatggaggaaacttggaaggctgccaactgctctgtttaagtatttgatgagtgcttattattatgttcaaaggttgtgttgagtgttataataaaaaaatactttaagatataatacctattgtcaaggagttactgtctaaatgcagaggcaagagagatacataatataaacaggcaaaatgaagagcagtatttaattaagtgttgaaatgttgaaataactaaaacgggtagtacatgctagttgagataagaatcaggcaagcatatctgtgccttaaaatagtttctaaaggcttcttgggaaaggcagtatctgagatgttctgcaatgaccagtaagtaattattgatggggggaggtgagtgggggtgctgaaagagtggataaaaggggagtcccaagtgagtcaggacattgacatggaaatgtcctggctaccagtaaacagttcatattgggaaatcatagctaaaacatgtaggtaaacagaataaatatttgcagttttaaatgtcagaatatctagattgcatttaactttgcaaggaatatgtagacactgaaaattttcaagccaaagacatcaggttttagacagattaatttggcaacagtgtgccgaggcagtgggaagaagaacaaaatggagacagaaagctgtaggaaagctatcggcctagttctgcagtaataggcagcaggatcagcatgaaggttgggagaagcagcagcaagagatggccaaagaaacattctgaagcaacgctcaacattgaatcatcaggggtgagcatgggaacaggctactcagggatcaaagagcatgaagcctttgaaaagaagaacctgaggaagaatatggaaacaggtctagaaacagcacagagaactgacagaagcaatcagaaaagggagctcctaatccaggggagctaatcaaagatgagctcctaaatcttcaaagtaatgtaggggaaaaaaggtgtctgcaaagaggaaggcagaaatccaagtgaaggggatcatccccaaatatgtgacacatactgggcttcctgttctcttcagaaatgcataagcacttgttagcataaccacccaaaaaaaaaaaaaaaaaaaaaaagcatcactgaagtgagttacacaaacctttaagaaatagtagactaataaacagcccaaagctatgtgtcagagacctttccctgcttactaagtggctctgctaatttggccaaatccaataattttcctctggagtcctcctttaaatcacaaaaatgttatcaagccaacttatttcatagaatcgtatgaagtaacaaatttgaaattgttttcaaaactgagatattctatacatacaaaagaatagcaaatacagcaatgtaaaacggcagccagctaaaaatggaaaactctaaatttcagaaagttaaaccttttatttataagatgatcggtaactataaatagcctcttttatttatgacacaaaagttttaatgagttatactttaaatttaatggtagaataatgtcatgaaatacatagaatatcaattcatcaaacagcatattaactcaaattctttaaaatatattcaacattcaaaaactgcaaaaatcattatcaataaatgcagtcaattggtcattactgaatcaacagcttccggtgtggaaaaatcaatactcacatttgcaccaatgccttccccaccttcagggactttaggaaatgcatcatagagagatgacacgtaagttattactgatttttcatcaggtgaggagacatcgacatctaaaaacagcaacataaattaattatttcacaatgttgataaattacttttgatcagactttcatgccagtccacatataatcaagaaaataactcaccttcagggtccagaagtcttataacaccaattttttctgctacgtaaaaagcatgctctaaat

SEQ ID NO: 46764 - DNA, 3079 bp, Homo sapiens
ctcacactctttcttacatctgcttttctttttccgtcattacctctactcttacacacaacactgatactttaccccatgttttcccttctccctctggagagagctgagacaacagtcaatgactgaaacaccaataactggaactaaaagaaggtgcagaggattgcggttgagaatctgcaaggagggaatttggacaggcaaagttcaaaccaaagaagaaggcttgaccccatttcacatagttccaacagtgctgtcaccagacatatgcctgctcatggtcagtcagagatgtaaaacaacgtaagttttgtttcactgtgcaagtctgaccaagtgcctcatggagcatggtcaggcaatgtgagccacagtctcaaaaaacagctgaaaaggacataataaatatgagagaccaagcagaatatgttgctctgcagtctgggaaccaaagcaaccagtgctggaactctcaaatgataaaaggatgagttaacccaactcttctgaatctgccttatgtttgttggctcattctacaaaacactcaactgttagtttctcatgcccctaaggaagatattaagttagtacaaaagtatttgcagttcttgccattacttttaatggcaatttattcacacacctaataatatggatatattaactgttctaagattgatttctgtaggaagaagggggtcttatatccccattttctctcttcccactatcaacttgagtcaaggcaactattatctctagtctagattgttaccactagtctggaatgtcaataccaacaacatgttttgaaacacattcgtgatacacctcgaataatattgggcttctaccttcttctggaactaagcctccgtgtctggattagtaacagcctcctaactagtcttgctgtaccaaatattattgtactctcattcccaaaatggtgtgttctttactgtgccagtgcggtaatccagattcaagcaattctcctcttctctcctatgatcaaatcacattaatatcaagttatatgaaccatatgtttcctctctcctacggtagtttgttcaagctacttctacccttggaacattctccccatgctcaacgtgacatggcacgtatcaggtgctcaataactctctactgaataaatggagagcaggagactcaagagagcagcaacaaaggaagtattaaagacagaaaaagtatgaaagatcagaaacacacgtctcctgctttcattttgtatgaatgagttttaaccctgccatgtaaactttgtcatttcagaaaatcaaaaggtttccaattaacctcactttccgataataacagaacgcccttaccaatgcacaaaagtgtccaatggggaacacaagcctcgagaccactcaatgagaacctagtgtcaagcaagaaagctaagcttcatctgaatcacttatctaaaaaaatttcatgaactttacatcgtatatagcttcaaaatgtcttttcaataaaagaaaacaagccaacctatctcatcttatagcacactgatttcattcacagcttattactaaatgacccacttactgctaaatgaattgcaacagcctcacccatgttagtcagctgaatctgtaaacatgaaagtcctatgagcaaagtcaatgccaccagacaactgggcaacagaagcaccctatttttacagatgctgtcatggttatggcatgcactgagtacacaggaactgccaactccaaagttgacttagatattccctgaaagcttattcacttttttaaaaagtatgtattttattattccatacaaagaaaataatgcaatttttatttttaaacatttttaaataactgtataatttaaagtgttatcaaataatctaaataatttatgtcaatagtagaaaaagcaacatctctgaagttaagaaaacagagatatttaacttaaagaaagttatataatgaagattaagaaatcatggggattcaaactgaaggaaagcagagatatttggcggatgccctcctctcactactgaacaagcttagactaaaagaggtgacgtcatttgcgtagggtctcacagcatgctagcaggagacctagggtatgggcccaggtctcctacattctggtacagaatttacaagagaatggcatttctccttcatgtttagaaaagaaatctatccttacaagtcagactaatttttcttctgtttcagcagccacagtaatccagcttcctctcagtgcacctactgccaggaaaatggctgcacatagataggtcatgaaagggaatcccttggctttgcctcactcctaaaggcagacccttttcactggagcttctcggcttctatactggcaaaggagctgatgcacagaacactacacattttcagaggaagataccgtcctggatctctcacatgaactggatgtcagggtccataaaaattttcctcacgagaccagttgtacctccttaaccaacagcccccacccacccccccaccccacacagaagagcagatttgcctctggcattatgttctcttcctctctcatatcagagttactctcaataacgcttttgaaatgtatctgtactagtgaagtgtaaataaccaaaatgagcttcaaaaattggttccagacctaagtaaactaaagagcttctgcacagccaaagaaactatcaacagagtaaacagacaacctacttttaacctggaataaatatttgcagactatgcatctgaaaaagaactaatacccagaatctataaggaccttaaacaaatcaacaaggaaaaaacacatgacacttctgttcatgtccattgcctgctttttaatgatgttgatacttcgcaaaagaagtcatacaagcggccaacaaacatatgaaaaaatgctcaatatcaccgatcattaaagagatgtaaatcagaaccacaatgagataccatctcacaccagtcagaatggtcattattaaaaagtcaaggctgggtggcttatgcctgtaatc

SEQ ID NO: 46765 - DNA, 9357 bp, Homo sapiens
aattctagcctgggcaacagagtgagactctgtctcaaaaaaaataaaaatcaaaattaaaaaaaattcaaaaaagtaacacaggttggtgcggttgcagagaaaaagggatgcttatacactgttagtggaaatgcaaatagttcagcccctgtggaatgcagtttggagatttctcaaaggactaaaagcagaactatcattcaacccagtagtcccattactgggtatataaccaaatgaaaataaatcattcttctaaaaagacatctgcactcgtatgtttatcacagcactagtcacaatagcaaagacatgggaatcaacctaggtgtctgtcaacaatggactggataaagaaaatgtgctacatacagccataccttagaatactacacagccataaaatgaaaaagcaaaatcatgtcctttgcaaaaacacggatgcagctggaagccattacactaagtgaattaacacaggaacagaataccaaaaaccacattttctgacttatcagtgacagctaaacattgagtacacacagatacagagacggaacaataaacactgggtattccaaaagtggggatcataagagtgggagaagggttgaaaaactacctatcaagtattacatgacaggatcattggaagctctaacctcaggatcatgcaatatacccatgtagcaaacctgcacatgtacccactgaatcttaaatatttttttaaatggttccttccaaggtatttctattccaacaaattgacagggttttcattgttgttgttttgttttttatttttgttttagtttcatgctaccttatctaagaaggctaacaaagttttaagctaactatggaatttgaagaatacagtcagcacactgtatgacacataatagatacttagtaaatatttgctaaagaaatgagaggatgaatgaaggtgggatcacagcgggagggaaggtggcagcctgctctggttatacagaatgctctgtgtctaaaggagagaaagaagtgtcccgttaaaagttttgaaaacttacagaattctttctacttaaaggatgatcacaaagtatttcctcttttctccagaaacagaagacaaaaggatataagttataaagcactttacagtctcctaagtctttttcacatacgtgacctcgtttaatcctcaaaacaagaaaccaccccaattttaaggatgggaataataagacctgcattgaatgtaagccttctgactcaacatcttgtaagttctcctcccctactctgccaagctaagtgactccccgtaacactgctgagggagctatacctatccatggaccacctccttctacagaagcagaaactgacttgtgggacacacagtggatgtagaaatgatagtcaaatgttcttctgtgcagaacacaaatccctattgattcagaggtttacatacaaaaacgttaacaaatgaaaattcaatccctttatatgtttctattaagataaaaataaggattatattctattcgagacagtgtaggtattagtaagaatgaaagcagcaagtcaaaaaggtcatgctcaggattcttctcctacctgatgagtttcattattgcaagagtaaaaccttaacatcggtaggaagattggtgcaaagctgtggatggcagcaactggaattcagttcctgttcccactattttctagccctgtgacttctctgggcctcagtttcttcttttgtaaaatgagtataataatagaaccttcttagtgtgagagactaagaggtacacacacatggctgagaacggtgcctgccccacagtgaatggaggcgtgtaagagggtattatatttctaaaactcttttattcacatcacttgacactacagtcaagcaaaagcaaattccatattgaatttgtcaacacaggcaaatatttccaagccaagatgtttgtttccaaggacaatttctttaaaaatgtttaaactattttggcagaaacaaatgtaatcaacacatttttagctctgcttccaagttaaaaaaaaaaaaaagtgtgaaaatgcttcacaaaatatttttaactgtaaagacagcacaaacatttttaaaattttaactggtacaaactgcctatataagggaagggtgaaatggagaacaaaagtaattaaaaagctgataaagtccaagtgctaatgctctaaattgataactactttgaacaaattatcatttacttatacaaacagaggggaaaggctacctttttttgtaaagccaaggatttaaactgtgcatgtccttcatttaacttaaaaggcagagaaaggcatcatgatgatagggacccaaattctatacaattattctaaaactatattttcacaaactggttatgaaatctaaatgactagaaatagtcaagagaaatcaatatgaatgttcatttttaaagaaagagataaaatggttcagcaagaaatgagttagtcaattatagaatgaatgaccttcgtcttcaagatctgtggagcaaggctaaacacattcagattttatcctggtccttgaattccaatcataaattttatagtctaagcttcataaaagagttggtgagagaaaaaaataatgaataaatatatttcaggtaggttgaatgtaattcctctcacattctgagatagctcttaattttttttcaaagttttttaaatacaaaagccaaggtaataaaaatattcaattcttcattattcagagactgacaatatattgtgtacaacagccacactcatttcttaaccttctctcttcggcttctttactttaggccactgcactattcattagcaattcaccaaaggatggaaaggaacagaaatgcagttcaattttcattacttaatagagtcaccacatggtttgctgagaagttaaacttattcctgatcatcaccccaggtgactaattctcaggtgactaactttacagccatggtccctgtcatttgttatgaacaaacaatgagatataatgcacaaggaaaagagctacgttttacttatctctgagtgcctagtttgggttcaatacataataaatgtttcataaagaaataaaggaagagagggaaagagagaggagtaataacactggacaaacaaaaaggcatacacttatgcacatgaattcacagaaatttaaaactggaaaagaggtatgtaggaaaaggagggtaaattgcctcaggtaacagttcagcctggcagacaattttgggttagatcaaagctgtaccactcattgttaagtgagttgagtaagctacttaactttcctgagactcagtttcctcatctataaagatggagctcataacagaacacttcagagacttgctctgaagataaatgtagttggggagtgcttggaatatagcaggactcaacaaatagcattattattagcagtagaatcatgatctagtacagtatcctccttttatagaaaatgaaactgagacctagagaaataaagaagactgcctaagtcatgcagctgtctggtggcaaagcctgactagaagaacttcgatcttctgcctgccaggcccgtagtccacattgcttatcagaaaacctacattaagaagaaaatgaaatggcaaatactaagctaaggtgatgctgattctctaaatctggtgtgtttttaaaaacacacgagcaggtgcctaaaacatatacaatactgtctcatgacagaagatattctgattaaattaaatctcaagcaaggtgtttttcaataagcaatctagaggattctcctgcagggaccctggggccaggctttgagaagtactgctgcagaataagaatagtaaaaagctccctatccaacgtcctgacccttagaatcacctacagagcacccacccttatctattacattagaataactgtaggtgacatccaggcatctatctgttttgaaatatcttcagatgactcttacatgtatatggccaggttagagaacccacagtctacagatgatgaaaacaactatctttgccaatatcaacttaacaaaactgggaagaggtgggatttgtgaaactaaagaaaaaagaatgttttctggaaagagctcaaggacaaaggtaggaaaccttgtcacaaggtacaaggtgagtcttcgacaaacagaagatccttgaaaaaggtacaaacactaagttcattactccttgtctcccaaaaggatctaccttctgccacctgtttataacatatccttcacagatgacactattaacatcaattcctgctctaactttttagcaatctcccttaaatttcattgacaagtaaaacaagtgggatgtcgtgccataatttaactcaggtaatcttatttaccatgttgccttaaggatttatttaacctgagtttccattttttcattctgtatatgaggcatagtctattttgcctatttcatagagttgtttggatgatcaaatgacgcgatgtgtctgaaaccattattccaattccaaagcagtatacaaatctaatatactccttttttacctacttatcctaataaaaatataacatgttgataacatttatatgcagcaggaagggctggatgaatggcctccacagagccccctgaaccaggaagaccactctaggtcagcatgtcattgcaacgactcaaaagggaagtaggctgagaatgatgaatgtcacaggactaggggagatcaagtcaggttaagataagctcaaaaaattgtacactattctacttagaagttaactcaaaagttaagtccaaccctacatgcaactcagagcaaaaactgatcacatagggaagctatgaaaaagaacaaacaaaaggaatgttggttaatcagtcatttccgggatgaaatgccaatgaagcggctggaagctctcatttgcaactaattctccaatgaaaaatgtagaatccaatgcaagataaagagttctgtggaagtttccaaccaaagataattaagaaacagagtcaaacacctccaaggtaacaggaagaatgtcctaagaggaatagctaaactcttgatttggactctttgtgtgccacagaataaataaatagtctttatctgaactacagggacatgagatgtcaaacccttcagataatataatgactacccattcagctttaacctagaagacgtcaggctttatatacattgcattacagttatttcgcaaatctgactggtcagtttatgacttatttccacatatattttccattgaaggaaaggctaatgtaccactaaggaaacagattataaaaatttccattaatgcaaaaatgtacagcttacttgaagccaaattatgctggaaaacatatgtgaaattaaaccaagtgcttatattcataaacatatagtagtcaagtagttttcttttgcactaggctttatgacagagctacatagataatgacacagactgaatgctttctttttaaaatataaccactgtaaaatataaacagaactgatggcataatattggcaaggtgtagcggtgtatataaacaggacaccttcaggagaactcagaaaccaaggtcagtgatgatggcgcacactaaccctcataaaacctcattctatcattatgcaaatgatctctgctcattgatacaatgaccttgccaagaatgtttaacatcacaaatattctttatgttcagattttttattaaaagataaagttaggaatagcttaaagaaaaagccatcaactcctgagtagtaacatgtagaggttatgtggataatacattttttgagcaattaaataaatacctatctaattatattttaaagacaagtaaaaaccccagataagtaacttgtctaaagctaaatatcagtgttaggaataaagatctcaacttcctagtagtctgtgtcattttcaaattcctatggcatgctaccctaacaatttctgattttagactggggctggggaataacataaaggaaaagatgtaccctagccctcaaaacatatgcacagaattgacagcaattatgtgaatgtttctgcacatgaaaatcaacagagaaccagaatctggcttttcaaactcatgaatcagcaagtcggtattgactgataattttacagtatcctattatttgttacaaagctattgtcttctcatgactatttctaattgaacttttacctacagtccaactaagcttccacaggctattccacaggcaaagtcaagaatcatgaaccagaaaaattcaaaagatatgcactctcttactgtagtgctttttaaagtcttccaccaataatgaaaatgtacaggatttttagattaaagtgtggtcaaagaatgtgcacagcacaaaaataaaatcataacaatcaaacctgaggctactaacaaaacgcaacagaaactctatggcttttacatacactaatatgaaaataactttataaaagacaaattagatgtcagtctgatgtgagcacctggaacacttatttacttgaactcagactccacatttcacttacctcatttccatctgtgtccttagaaacagaggacatactagtataaagggaatggcatctcttttttttaaactgaaaatgctgtgttgcatgagggcaaaatctctcagtgttttgcttttcttgaatactgctataactttttggtgggtcttcaggaaacccacttttttcgagtgatctttctatacccgagggaatagagcttaagctggctgcctttcggaaagaaaaaacatcagttttttcctggaatgttatttcgcttgtgttgacatcatctaaatgtttcttcctctttgcgcaatatggagtgctgtctttttctgaaatcctttcatccagttcactaacttttacttctgtttcactgtctttagcaggagaagtgttcacacagtcagaccaactgcttacagcactcggcagaagtttctgtttaacgctgtcagctacaacttctgtcttcttttgctgaataccatctcccagtgcagagtttagggtaacagattcctgctgtaccagtcccctggataaaggagctggctgttcttttgaaggctgactgctgctcttcttcttgccttcattttcattgtttgccccaactgactctttgtcacctccagtttttttgatcggttttcttctgaaatattttcttccaggagagtatttttcagggttcaaaggagttttggcaggatctacatattgttcttctttctcagctcttacacatccacagacattccccatttgatttgtaggagatcacagctccatagattcactcatttcaaaatccagagcttacttagatcctctccattaagtctgaaaattccactctgacatctgttccacacagactttatgaccatcctcttcagtctgaggccattttgcttatgagaaaggcacacacaagaaatgccgtggcatcctgcccagccggtccgtgtctcattagacactgtggcttatttctggccaccaatcctcttagacaaacattactgctcactgtcaaattacaacactgatgagctctcaaggcaaacccttagcttcactgtatgagaagattatgactgtttttaaccttcggttttctgaaatgcagatacactaatgaagtttgcacttaacctttgaaactatttggtggttcaacgaatgagagcaaaaagaaagcaaacaccagtcaggagagatttaggaaagtgcccttcaaatttggattcaaagtgcctttcaaattgaatttcagagactctctaccctctaccatatatttttttttcttaagaaataccaactaattttggtacttgcacacaaacacatcaaaagctcaaagatctctgtaaattttattaagactcttattcaaaacaagtcataaaaaataataagctgattcaatagctagcaggagagataagtgctaaatgcttataattctctaataaaattgtttctaaaaaaaatcaatcttttaaaatagtttataatacttttcaaataatataaatttccaagccatgaccttatctaattattaggactttaatgtgataccaaatagataaattatataatttaaagcatgaaagatttagcaaaaggaaatatatgtgcattcatatatatatatatacatatatatatatgtagttaaactttatatgtaacttttataatcataccctagttaaatattatacagtttttatgagggccttgctggaaaaataatgaatcagtatgagacttgattatctaaggtgtgcatatttctaacactgagtcatagatatggtaaaaaaaaaaaaaaattagaatagcatgaaatggatttacacataagtacaaatcatttcactactaaaaaaattaataattgcctttcactaggtagtctttagactgatcaaaagatggaactcattatattttactaagtaagaatactcagttagtcaagttagcaatgatactgtagatgtttgtcaataacagatcctgcattgtaaaattttccttaatcatttaaaaacattctccggtagcaaaaactgaacatcccagaagagaagctggtaaaaataaggtcccagatttttttttgtttttaacttgattttcagtgtattcaaaggtaatgagtggtacattattcaagagactataaatgtataatggctgatatttgtactaacatgatggaggggcaaccagtgatctgcactcccccaatccttccctccatctctgctgatgaagtttagatatttgtcccctccaaattccatgttgaaaatgtgactcccaatgttggagatgggcctagtggggggtgtctgggtcacaggggcggctccctcatgaacggctttcggccatccccacagtaatgagttcttacccacttaagagttagttgtttgaggccagcaacggcagttcatgcctgtaatcccagcactttgggaggccgaggcaggtggatcacctgaggtcagaagttcaagaccagcctggccaacatggtaaaaccctgcctctaataaaaatagaaaaattagccagatgtggtgatgcgtgcccataatcccagctacttgggaggctgagacaggagagtcacttgaacccaggaggtggaggttgcagt

SEQ ID NO: 46766 - DNA, 3503 bp, Homo sapiens
ctaattagacatagttcatctgtgtgccatgacttaaaaaatataactaggtgtaacaaagtctgcttgacacaggtagtctataatgacaccattacagtcttattctttaccaccactgttttaaagagattccactatatttttaaattccagcttttactgaaaagcttttaaaacagaattgtaaatactttaaaataaaaatcatgcaaaggttattttaaataattttaaattagttttatttaaatttatatcatgatcaaaattcacactagttcaaaaaatgtgtatttcctcatcaaatcctcccagctaatgactctcttgtaacgttataccaaattcataaatcagattcaaattgatcattataaatttagagatgtattcaagtaaaagcattctgtctttgaaacaacaacaaaaaaagagagctcctgggacagatacagcaacctctcaagtcatgtgcttctaacacaaggtcactttaccagactgactttctctttatacctacctatcattggttttaaagaaatcttaatcatggttggtgataagatggaataacatgtaggggagtagcactgcagtgcagggcatggtatgattccaggtaaaaggcagtctgaagaccctgggcagctggtgagtgggaagagaagcatcagaaaaggaatataaggatgtgacaaataaaaatttcaactactttgcaattctgattaaagtgctggttgtggcaactaccctgaatacttctgagctgaatcatctcttttggggcttttgtcaaatgagctataggttgtcaatgcctgacctataatctcaacacacacacacacacaatcaaagaactacctgaacctcaaaaattaacttcatctacttcctggataatgtcttacatggctctatccttaaccgaacagtgagccacttgctggaatggttacaatatgagtcaggctgcagactcgagaggaagcaaggtcctcatagagcggggttagtgctgggcaagtaacagaatccactggtagatacagctccaggaaaggtgcagccagccaggagtgcagacaccttctggtcatgccatcatgggcacttcccggtgtccctttcagagcattatttcctaaggtgagagattaggataggcatgacacaagtggttgcttcatctctttttttcaagtctcaaggactggaaaatctaggggtctcttcatagcatattttatagttttaaggctttgacgatactctgatactttcagatactttatatgcaaactaattcactcctctttaaacataagctcatttccttgggtccttgaaaataaacaactgagagcaactggttgcatcctcttcattaaacctttgaaataacccaggattatgatcaagacaactgacaaaaggagaggaacactaaaactatttttaaagacacccccagatgatgagataccactgccactgctacaatccgttctgatgcttaacacctcttccctgtcaaagaatgtttccttaaatccagatgacactccatgtccccagtaccacgattcatatttttctaaaataaaaccacccaaaatcatatctggggaactgatatgtttggaatggaattataaatacaggtttattcttttaattacttaattaaaaatttgacagatgctatatacactcctgttaaattaatctctgcaacagaaatatactttctgtaggaggattaaaagtttcaaagtgatcacttcctaaatgacatcataagtctgccaaactttcagattctagtctactcaacagagatctccggaccacagatgcttaaaaactagttttcccagttgtaaaagcccagtgtcacagaagaggtactgcactgatgtctcttactaaagctgaaatctaagtggaagttattttctctccagcccctgtctgagcacactcccttttaaagtgacaagtttcaccaagagcaggctagagccaggtaacacctagcaaatcaggggccacacttctgaaagtgaaccacataacagctatgggtttactggaagatgctcaggtcccagtgccctaactagagcttcatgtccattcctgatggctaagagagattttgaaacaaaatgtctcctgaatatttgaggtcacattctaaaacctctgctgtgatatttctctattgataactcctcctctagttactgaaatcttacttttcctactaggtcaaattctaacgtcatccaggcagtgatggtttccttcttctgcactcccatattctttggattataccagtacaccaatcatcattttacttatagttttatgtagacaatatacataaatgtattaataatttccttaagaagaaagggccctgtctttggtcctcactgcaaatgcttaatgtctgacacagtgcctttcatatagtagatattcaaagaacttttgttgaataaacaaaagattagtcacctacactttgcatttgaccttagccatgcactcagctgtgggctcttgaatgcctgccggatcacagggaaaaaaacagaaactcaggaaatggattcacaaatcccatcaaatgacttcctagcaggggatttgtgtttgccccaaggcccatcatggcatctatcggagttagtgcctggcatcatgttctgccacacagttggagttaagtaaattgcttctgaatgactaacacattgaagagaaatgtccacttctgcatgccaagcctcctaagtatttcccctattaaggagcacagaatgacacctccaaagtatggtgctttggcatgctgagcactttgaagagaagaaattggaagtctttagaagttgcctaactttctaaccttctcttgtttctctcccactcctcaccaagcgcaaagagggaggatctctagaatttccttagctgactagggaaatttctgtccaaaagaaatgcaattgccttaagacctctctctagcagttacatcaaatagccaggaaagattaaccacagaaaagagaagagattaaaagtcatcaccatgcccagacagacttttcatctattcttctcagggcagctcagagagattacctaaaagactttatctgaataataagacaaatgaagttctgcccctcaccttcccagcagcttccccagagctcagaggaactttgtacccaggccattgttctttaagctcattcatttcccctgaaaatcatttattgcccctctaaaatttcctatacgccccccttccctctcccctgtgaagagggtacataagccctaaccatctggcccttctttgagtctcatatttgaaggacttccaagtctacgcattcgtaaataaatctgtatgcctttttctcctatgaatctgtctgttgtcagcatttcagcaaatcttcaaagag

SEQ ID NO: 46767 - DNA, 954 bp, Homo sapiens
caggacaaatgggtacaaggtttctttttggggtgaggaaaatattctaaaattaggctatggtaatagttgcataattctataaatttactaaaaattgttcaattaagcacttaaatgaattttataatatgtaaattatctcaataaagctgagatttaaaaaaatattttagtcacactccttttgaaaaaatggagtgacagcagtgttcacacatgaaaaatatctgtatctgtcaaaattcaataaaaattaataatggttcccagaatgtaagacagaatgttagactattctaatatgggtcagtacatacaactgaaatactcttaaagggatgtgtaatttgtatttattgaaaaatagctccaagattatcaataaataagttaaaggactgatcataatactaataaataaggaaaatctgtcagtgtcaaccactataaaacccttaatctagaccaaagccggggttatacattaagagggcaaaaagcaaatggaaagtcatgtgcaaaaggttaccaagtggtctagttaggaaacagattaatctgagtgataaaggaaacatttcctcagttctacattagcataggctttaaccttgacacacacgtaactgaactgttatttgaaagtcacatttgcaatgagatcatcactcatgaccacatctttcctcaaagagaattatcaggagaaattcagccagatattgggcaaaattcacccccgacatttcacgtaggttcttttctattttccctaagcgtcagccggtttgagaaataaagggacagagtacaaaagagagaaattttaaagctgggcgtctgggggagacatcacatgtcggtaggttccatgatgccccacaagccacaaaaccagcaagttttattagggactttcaaaaggggaaggagtgtacgatagggtgtggg

SEQ ID NO: 46768 - DNA, 3330 bp, Homo sapiens
cacctataatcccaacacctagggagacaaaggcagcagtctggccaacatattgaaacctcgtctctattaaaaaatactaaaaattagctgggcatggtggctcatgcctgtaatcccagctgctcaggaggctgaggcacaagaatcacctgaatccaggagggagaggttgcagtgagctgagatcacgccactgcactccagcacgggtgacagagccagactctgtctcaaaaaaaataattaattaaataaacaaataaagcaggttaaagagacatgacacctaaatgcaatacctgaccctgaactggtccttgccctcggggaagagaggatgatgtaaaagatcaacaaacaagactgaaatacagacattaaaatattataccaatataaatttatgaagttgctaactgtgtggtccaaaacagaataaccctattcttaggaaatacatactgaagtatttagaggtaaaggattatggtatatataacttaccctcaagtggttcagataaaaaaagtacacacacacacacacacacacacacacacacacacacacgactggggaagggagaataataaagcaaactaggtaaaacattaacaagagctcaatctgggtaaacagtctatcagtgttccttgtactactttatttttgcaactttttaaagtttaaaatatttccaagtgagttcgataaggctaaagtttaggaactactaacataaatctaaggtctggggaaaaaagtcttatttgtaggttttaagaacccaaagcaatacactctaccaagcagtatttttcattagccctttataaagttgatgcttcaaaaattcccctattttggctgggggcagtggctcacgcctgtaatcccagcagtttgggaggctgaggcgggcagaccacctcaggttaggagttcgagaccagcctgaccaacatgaagaaaccccgtctctactaaaaatacaaaattagctgggcgtggtggcacatgcctgtaatcccagctacctgggaggctgaggcaggagaatcacttgaacccaggaggcggagattgcggggaggcagaggttgcggtgagccgagatcgcaccattgcactccagcctgggcgacaagagcaaaactccatctcaaaaaaaaaaaaaaaaaaattcccctatttaatctgagcccacagatgtgaaattattctcgatcactttgcaatggtcaaaaccacagaggaaatagagcttttttttctgttctctaaaagataccactgtgttctcagcttgaggatttatattatcttcccgccaccaaatcagaaaataaagaacagtgtgattgatttggtggagtcatgaagtcactgacttcactatgtgggcaaagaatatctgcgccatgagtaaattaagctttccaaagtcgtgatggaacagtgataaaatctgtgatagtcagttgggtgtctcccatgcagtaaccaagtagatgactaacaaacagagtgtgtccaacaatggcatccagggcctcttcctctccaaatgcatttatgtgtcaataaattaaagtttacaaaaagaaaaaatatttagaccaaatatcctctttcaaatgtgaaggaataaatttaaaatatagctgatcagtattgaagaatatatttccaccataaattgccaattagatggatcctatgcaaggaaaccacattatatagacttctctggactccaatcttcccctaaaaatcatttatccccttaaactactcctcctaaacacagtctctcatggctcaagttctaattccaggcccaagtaagtgattaaagggagtcttctaatgatagctgttaacatacttcagaaaataaagtccttccttctttctctgtcccccaccccattccccgagaaaagcaaaagctaaatcagtacttaactcataggtgccatttctcatattgttgtcctatgaatttctagacagcaaattgcacatgatgagtaacaacaagtagttatataaaaccctctaatataaagagggagtacctagtgtcataggtagaagaggcagaaataaatgttgtaaatgacaaaagaatgtcatcaattttatattttggaacaattctccaggtaaaatttagctaactgaagacacaggtatttccaataacaaccagctcttactctagttctgcagtttaaattatgctaaagaataatatataaatgttcctgacaccagtaatttacctagaaaccatgatttgcaaggtaaataatctgtgtgttaactgcactttattcttaaaagtattctgaagaatgatgaatcaaaaggaaaacattcttaatagaacaatcagtttcaagggcaggcttagtcatacaactgaactaccggaacactaaaatttaaatacatctggaaaaaagccacggatgtctgctcaccaacaaatacaagttttaattaattagccgatttgctttaaacaaatgtaattttagcctgaaaaatacaaaataaggccatattaacttttttctggagaaaaggttacattttaaaagtcctcagggcccatcctcaagcagccttggcccagggctggggtgtgcagggcaccaggatgccagtgggaaagcgagatggagcagcagtggttgaaggccaggctgagggctaggtgtcatccactgagactaaacagagtttagtgttatctgctggactgttgagtgaaaaatattctctgacctgatcctgaattttccttgataatcaaaagattaagaaacagggtcacaccacgttacccagactggactcaagagactctcccacttcagtcttccaagtaactgggactacaggtgtgcaccactgtgcctggcccagaattgttttcttcatttcatttttggattgttctttgcaagtgtatagaaacacaatagtttgttaaatactgatattgtatgcttcaaccttactgaactcatttattcattctggtagttattatgctaggttccttgagattttctttaaacaagatgctatcatctgcaaatagagatggttttacctcttcctactcagtgaaaccatcaataagagattgatgtgtttcatctcattttctggcctaatgctcctgattctttttaatgttgtatttcgctgtttggatgtatcataattatttttaccaatctcttattgatgaacatgtaggtcatttccaacctcttgcagttataacagtgctgcaataaataacctatt

SEQ ID NO: 46769 - DNA, 2510 bp, Homo sapiens
attctgtggactcaccctgaattctctctggcaagagatccaagaaccctctcttggggtttgaatctggacccctgtcctgtaacactgagaccaccaggctgcagagaaagcactagtcttggtttctgaagctcatgacctggagaggacacctgacagaaaggcagtgtggtaagcacaccagttgagagaagtacatggcactcaccatgtatgcaagcacaaaagagagaaggaccaacctcatccagggcagtcaggtggggcttaaaggacaggaagtagggtagcaaaacagaagccagccatgtgtcaatttctccactaaaaagaatctctgacttaatcatttaacattgaaagagccttggttaggacccaactcttatgtttccctacaaggttgcttccactatccccaagatactgtcatttttcaaatggaagtgctgaccacatctcagtcacagacagggagctggggaatctggctctgtgatgtgatgtgaactttggacaactgattgcaaacaatggaagttctgtgccaaagtctagcactcatatcacattttcagcagtgatgttctaagcatccagcaaaaagaaaacagagtaaatgaaaaaaattacttcctaggtaatatccatattattcccattaaataacaaccaaggcccctgatgctaaatcctcaagaaaaaaaaattaataatatattaaaaatctttataattcaagaatagagtttccatataagtcacaaaataaatttaatctattatgtgtattatataaactattttcttcttgggtaaaaaagggttaacaaaatagatttcttcttttctaagtgaataaaaactggtcctatagttcaaggaacatgaggtaaaacagattctatagataaattggctaattacttaccaaagcagtatattaagaaagctgatttaatcaaataatttacctctaagtacagaggtacttactatacaaaggttcttttgatcaatgaggttttgttgttgttgttgtgctagatgctcaaaagcactgctaataacatgatatttcgtaggtactactgaggtaatatctaggaattatgatccgtaactaaagtacataagatacaaagactaaataacacacataattcataaattctgatactgttttctaacaggaacaacctaaacctcttcttttaaaccatgatcaacttaaatgagtcccattcaaataccaaaatatgctctttaacatgagaaggcttccacaatgctacaggaatgagaaaagagttaatgtgaattctaaaggcttcaactttcttcaagagagcaacctagagtcagagaataatttaagtctgggaagactttgtaaatcacaccactttccatacacattatttcaaaagggagttatttcaaaagggagtattccagattacaccatctaattttccaattacaagtctcataatggttctttatttcatttcagttagagatgtctaacactgagatttatatttagagcaatgttgctacagcaacaaaaagggaaactcattcctgtgattttaaacaattgaacttttataacattcctctatttgaaaattatttcatttatagattaagttttcaataaaaatatatatttatatcccccttataaagtgtaacagctgaaaatatgtaacgacaatgaagacaaagaataacagaattgggggggaacaaataaatgcaaaaagagtactgattattacaatctatattgactggttttcagtgaaatccaaacaaagctaaactcactcagtaccacacacgcagtaagtattgagattatataaatacatattctgtggacaacaataggcaggggagttctctccagggagcctcagaagttgtcctgatttcagtacaggttttcgaaagatgcccgacaatcagctgaactatcgccatgcaaaccaaagcaggtagtgcaactttcccttcccagttctgaaaacatgaaagtgatagtatatgtgatactactaacccatacagcacatcagtcccaccagctttgcgttccaatcttgatcatttttcatgagctgccccatcattctgcaggaaatctgtgcagcagttccctaaactctctccgtacaaactctgatgtgtcagagtcctgttaactttctatgtagaaaagaaaacactgactagacactcctacttgcaagctgaaaactagtcaacacctccttttaaacaaatattaacaaagccagactcctctactatttttgtaggggatatatacaactgttactaaaaagaaaccaaattgtctatttcttcttttcattttaaagttgttcttaagaagtcctttaaaaaaagttttaattccctttttttgttttgcaatgaggcgaaccaataggatgttagatttcacagctgaactaactcatcacattctctct

SEQ ID NO: 46770 - DNA, 934 bp, Homo sapiens
tgtgcctagcaaattaccatttgtcttgaggaatgctggtccaatcccacaaggaactctagtcctacatcacttccagttttcactttgaaaatgtacttagactaagtacacaatgacctaaggtttgaaaatatttctgttctccagtttggagagctccctctaatgaaactacatactataaatatacagattaatatgcaatagtctaacctatcagtagtgatagtccaataattaagtatagtattaagtctgcagtcaaaattcatctacctgttcctgagcacccttcctcacagtcaaaaccttttcccaaagtgcacatgcacacacacacacacacacacacacacacacacagcctcagatgcctctggaagagacatcaaccctggtctgaccacttctgcctagacaagggcctctgtgaacctctcttcccagtttttctatgctccccagtggctgaactgaaaaatgcaagtcaccaacaagcaaagcaacaagcacaatctccaaaacgttttctcttcaaaccactgtaagggcaaataccatatactattctgcttggcttgtagccttttctttcactttctttggtcactttcaatattctgcaatttctggagccccacgacatgctgcttgattttctacactccctttgcactagtagcctgggatcccctggctgcaggtgcggtatgtttactcatctagctccctaactttactcatctagctttgcctaatggcaaaacttgagagcaatgaccttgtttcatgtctgtttgtagtaaacacactgcctagctgacagaagacattcaaatatttatgggaagaaagaagaaaatttaaaaaagaaggagtgggaagaacactaaaaagaaggatgttaggctgggcacggtggctcatgcct

SEQ ID NO: 46771 - DNA, 763 bp, Homo sapiens
taggctaatgataatcctcacactagtatgtgactaaaattgtctgcaaagagcagttgtccaactgacattctggatctgtctgtgatataataggtaaagaatgtggtgtcatttaaggagacactataatttcctgtactgaatgcagagtattaaaatgttgctgtaattttatttttttctaacatttctaaatgtataaatcatcatcaaataaacacaaaagccttgcatcaaaatatttaggtatatattttattattgactatttatggacaagatgttgaggctccattttcctatctaaaaaactggaaatacctggacattgcttgccatgaatacaaaatgcacacatgtaagagcaaaatcaatcacaactacagggaaaaaactgcatcaaacactagaaatcattaacagtttttggctcatagctctctgcaagaatctgatgaaccctgtggacttttcttctaaatgcacatatacatgtatacaaaactataccttacaaacttagaaagtaaccgaccttttacctcagcccaaaaacttctaaccaggagaaaaatcccattataacattgcattgaagagtcactagacatgtactttggcctctaagacacaggcagaatgacttatatataaagtattaatactccagtgagaaaataaaagaataccagtattagttataaaaggttctccaaaagggaaactgaaataaaagtagggaagagtaacaccctagcat

SEQ ID NO: 46772 - DNA, 417 bp, Homo sapiens
tttagactcaacacaattacaatcaaaatcatggcaaacatttttatagaaactgataaactgatttaaaaatttacatggaaatataaaggaacagactagccaaaacaattacgtaaaaggacaaactgggactcacattacctgattgcaacatttaaagctatcatcatcaagatggtgtggtaatggcataaaattaaacacacgggtcaatggaactgaacagggtccagacagacctagcaatatagggtcaacagattcttcccagaggtgccaagttaattcaacggaagaaaggacagttttttcaacaaatagtgctggaaaaactagacattcatacgtaactagcatattacctagcatcatacacaaaagttaattcaaaacagaccacagtcctaaatgtaa

SEQ ID NO: 46773 - DNA, 1491 bp, Homo sapiens
ctggtttaagatacaaggctggctagacaccaacttccaagagacctgcattttcttccaactatagctctggctcctggagctgctgcgagtgagtggtggaaacctgcccccttagagaagctgcagctgatcagcatcatgcaagggactgctgagatggtagcatgctggtaatgaagtgttatggagccactccatcctttattcatccttttcctcatacacacagagagcaaaggtgtataaaccatcttgttcattgtcccctttcacacaggagttgttttggggaacataatagtcacgccatttacacatatttcttataacattttatgagccatgatattctacttaaaagcacaaaaataacaatatccctatttcttctgacttccaattgtctgtaagtaataattgttcccactgcatttatgaagtaaattcactcattctttcacagtgcccatcacagggcagttagaatcctgtgctacagctgtgcagcccacacccctctcctccttagtcatcatgtacacttaggatctgtgtgaattccaatcccctgaccttcctccccttcacagctgccctcctgaccctgaaatattgcttgggtgttttttctcctccctttctcaaccggggatttccaagccagcctaatagcttcctccaacaataataaagcaaagaagaatttttaaaaatgtgtatctgtgtccataaaacaatatgatgaattctatcacaaaaaacaagcacaccatagaacatatgactatatgttcctttgtgccatccttcactctcttcctcaactggccttgtgtttttgtccacagcacaggaaccagctacagaatttgcaagtggagaatccaggtacctttaaaagtctatttagtgaaaatctctggctattgatgtgacggttaattttatgtgccaacttggctaggccatggtacccagtttttcataaaagatcagtctagatgttgtgaaggtatatttttaaatgtgattaacattttattcagtggacttcaagtaaagcagattatcctccatatagtgggtgggccttctccaatcaggccttaagagcaaagaccatggtttctcaaagaaagaattttcctcaagactgcaacatagagaccttgcctgagtttccagcctgataccctgaagaatttggactcaagactgcaatatcagctctttcctgaatttctagcctgctggcctgccctacagattttagatctcccagcccaattgcatgagctaattccttaaaataaataaatctctgtgtgtgtatgtgtgctgtaactaatatatcctattggtctgtttctctggagaaccctaactaacacaattgtctaccatattactgcataaaagacttatgactcacctttactacatttcagggaagtagaaacacctgccataattcacattttacagttt

SEQ ID NO: 46774 - DNA, 1227 bp, Homo sapiens
gaaataatgactagtcatttaattaaagattgtttttaaagttaagttccaagcttcttattttggaatcaataacatgtatttaggtcccagtgatctcaaaaagcctttgaagagctcatggaccctaaggacagaccagagtgtctaatggacacaccatcaggccaggagcaaaggctacagattattggtgtcaatggtagagggctgtctgtggctacccctggctccatccctagagctgctggaatcttagcacaggtgaacttatccaccacaccacttctccctaccatacttgtatactacccccaaattcaagccccatgggcaactcttttctcaaaaactatcatccttttgctactctgtagctgctccactgctgcccgcctagtcaactcttttctaggtgccctttgaaaccttcatttaattgtcaggaagctctaactcctcacgaaagtgccatctccactgcttgccttaccttaatcattccacgttgtatttgttaagtgcctgctctctatacctctgcacctctccagcagaggcttctgcttctcctgcatgtctcatcgaaatcccggagggaaacatcatccaatgccgctctcttcctttccctgaattgtcactgtctgacctctggtcacactccctcatttgctgaggactttggaacctgactcattgcttcttcttcactttgagtgtagtcatctgggaagatttccacattcaatgtggatgggccagccaacacctcagccacaaaagttcctagcctcctgagttcaaataatctttatcttctctcttcttctcccagcatgccatggccccattctggatgatcacatcacctggtactgaaccaactctgagacctctcactgtaatccaaaaatgtgacctccaatttttggctctccagctctctcactcctcttcaagctaatccagacctctaatgctctgttcctggactgccgttaagatttcctgttcttcttcatcaagcctcatgatgcatcatttcaagcattctcttgacatcaatatcccagctgcctcctttagagctatcaagtccaccctctatcttggatcagttgaaacattcaccttaactcccaattctaaatggctgaaatgtgctttgaaaacactactcaatgaagcagcttaatccctcgacaaatgtccaaccatctaaca

SEQ ID NO: 46775 - DNA, 587 bp, Homo sapiens
tgaaatttttgaaaaactaagttgggcctaaaaacgtctggtagaagtaatttccatacatatgaaagccaagaaattggaaaagactgtccagggaaaaaaacagaaaaagcttaccatgagtactttagggatagcagacagtagcaaaccaaaaataaatcaaaagattacctacggtagattgcaaaaatggccacaatactatgtaactcctcctatcaggactcttctctacccactgtgacttgctttggccaaaacaatgtgtcagcagaggcactgtacaagcccagattccagacttcaagaggcctcatgcacttccactcttgctgcttttggaacccaaacctaaccacatgtgaaccagcctgagttggcttactggaagaggagagaccatgcagaggaaaaccatgagtcagccagagctcatcaaagatacctgggtgacttccagctgtgatgagccaagcctgactcagaccagaccaagtgcccaactgggcacagcccagatcaccaacccacggaattgtgagataaatgattaatgtctaagttactaagttttaaatggttac

SEQ ID NO: 46776 - DNA, 696 bp, Homo sapiens
taaaatttgctttcataaatttcatgtttaaaatcatttgtgaataaatgttaaaataaaaaggtgagccacgattttggtaaggcaatttctgagcaaatcacacacaattttttttcattcccattgatctattacatagacgaatatttggttgtgaaaaagtgagagaaagaactcggctattttattatagtagagcaacaccgaagggagacgacttcgctgtagctcagagtctttttccattcttcacccacgcgcggggcagtcgcgcggcgcggtcgcgcggcgggtaggaactaccatcccagcatcctctgcggcgcggggaaggaagcccgggaatgagagaaagaggctccggggagatagcggaccagtgagggctgcccctcttttgaagcggttttcgtctctttccgccagtggcctcccagctcacgcaggggcgggtcccggtagcgcgaggcggtgcagggcgggaaggggagtggtggcggctgcggcagtagggacagcaggagcagtggtgctgtcagcgcggccgtcggagacatgggagacccggggtcggaagtgagtagtcgagtgagggtcctggcgttctcagaggcgaaccgcgaagggtttgtgttttctgcggtctgaggcctggtgctccgtcgcagcctcggggcgatacctcttcagtgt

SEQ ID NO: 46777 - DNA, 644 bp, Homo sapiens
aatacataaatttaaaaatgaaaggaaaaaaagagaaatccgttcccaccacccaccttcagggctaaaacagaaaaatcaatgagctgcgcttcacaaccataccaaaaccaaacaaataccaactcaaaccctccttcacatcctcccacatcttcccagtgcttcgctatctcacaggacccagctggcccctggcttcgccccacccactgcagctggcgtcttttaggcgcatggttcttttcctctccggcgaggggcggtctcggggcggacccgaactacaattcccagcatcctgcgcggcgcggggaaggaagcccgggagtgagagaaagcggctccgggggcatagcgggccagtaagggccgctcctcctttgaagaggttttgcgtctctttccgccggtggcgtcggcgctcacgcaggggcgggtcccggtagcgccaggcggtgcagggcgggaaggggattcgtggcgacggcggcggcagggacagcaggagcagtggtgctgtcagcgcggccgtcggagacatgggagacccggggtcggaggtgagtagtcgagtgagggtcctggcgttctcagaggcgaaccgcgaagggtttgtgttttctgcggtctgaggcctggtg

SEQ ID NO: 46778 - DNA, 2935 bp, Homo sapiens
gtgcagtggcgagatctcggctcgctcaacaggaataattttaatagcaaaaatttaaaaccccttcattaagccaggcgtggtggttcacatctgtaatcccagcactttgggaggctgaggtgggaggaccgcttgaacccgggaggtcgaggctgcagtaagtcgtgatcgcgccactacactccaacgtgggcgacagttagaccccatctcaaaaacaaaagaaaattagaatggtaaaaatgaagtaaattcactttgcttcccacatctagctagacagggaaagatggagtagctttttcttttttacttcatagcttcagtgttgtccgggctttcattactctcatctcagtataaagtggtaacaggaaggtcaggtgagtgtgggctgcctacgagctgtacttactgccttctgtttcacaaaaggacgttttctccccataatgtcgttgttcttgctttgaattatgggtgctgggagaaactaaacgaagccgtcactgagcaatacacccacagcccgtcgaccgataggaaccttcgcgtggggggagttggttacttttaggttgcatgaagaggcggggcctcgcggggcggagctgggggtggtctgtgggtccgcgcgggcttcgggtagttcctgggtccggggagcagacgatccgctagccacattaggcgctcggtctctgcgtccgcccctcccgtgcctcagagacttgcgctccccaggcccgagcccctgtcggcccatcctcgagcccgtgtggctcgcgaacctctaactccagccgctgcagccccctcccaggcccggcgtccccgagccccgcgggcgccgcgcctgcccttctttggctacgctgcagccgcggtgtcggcgagtcctcccgggttgcccccgcgggcgtcagagggagggcgggcgcccgcgtggtgacggcgacgcctgcagcccaaggagcgctccactcgctgccgccggaggggccggtgacctcttggctaccccgcgtcggaggcttagatggctcaggcgaagatcaacgctaaagccaacgaggggcgcttctgccgctcctcctccatggctgaccgctccagccgcctgctggagagcctggaccagctggagctcaggtgagctccgggcgggcggtctcgggcgttctgctcgccgcgcgggcggttcgcgggcggttagcggacggaggccgcgtgtggcgggccggggcctggggcacagtgaggctgcggcaaccgaagttgcttgttgagatttgttgtggatggacgtggtgtagttttgtttgtttcttggattatctcccctagtccgagagaaaacgcattcgatttaagctaaacctgtgagggcgttatcggtggccacactttgattaatttacctaggtgttagggagcggaaaaaaatcagaggagataaaagttacagtgagattccatgcgattaaggactgtggcagcttgggtctgcagaacttctagaaccttctgtgtggccccaaacgttttaacttactcttctcgttatgcattttttaagggaggcagcagtttacagtggccctccacgtgaagttaagtttccttgcttcagaacaaaaatgaataaaacaaaaccaacccagcaatccattgagagcaaagattagacaggagtgaggggtaggcagtaagttaccgggtgcttcgtgcagcagagacgttgccgcttctgtttctcccctaacctcgcggacgggattcagcggttccgttcgtctctcggtatttattgggcacctccctacatagaagactaagtgctagttactggcctgaaagcatgaaaagatagttttccccttttcttgcttaagaatttatttggtaatacagtagtagacttgtatagaatttctaaacaatttaatgttaatagatttttggaaagactttaacggtgtattgaaaagttttatctacttcctgtgaacgtttgtctcaagttactgtgtaaattttgtgagcaggtgtagttaaaagaaaatcttgttaggcacctgcaattccgtgaaactgtacacaggagttggttacatagttttgtctaggttgtgcatgagcaaagaagcatgtgagccaaaaagtttaggaaacactgcatgtgtgtctttatcttcctacattaatacacccaaacatgaagtatctgtttgctgagaaaatacttcaataaccacggtatctcttaacaagtgaggcattattattgttactattgggagaaaagagccagagagtgagagattctccactcaaaataatttcttggattattaagccctacaccaggttctggggttccactcagaatgaggcaagtggaagagagaagtaatgcttcctcatggattttcacaatactggcaaacctgaccgttccactcccagaaaaagtagagcgaaagtagaaattggtggcctcagttacttgaagtccctctaactggtaatgtttctttttagggagccacataacaagtaacacacatctctccatgtcttcagaacgttgagggcatgttctcaaccacttcattctcctctcccttagccagaaagaaaagttttcctaaaggaatggggaggttgttactccactccgccttccttcaagctgagtcattgtcctccaacttgaattaatgcctcacatgtggtaggtacaaaagcactctgaagtgctcctctttaaaagaaagcctcaggttttgaatattattatattctactgtttgattaatgtaaaatgaattctgattgcacatcagtgattaaattacaacttgcttaattaacatttgagctgaggagaaaagtgattaatatgtggctgttcatttcaaggactttt

SEQ ID NO: 46779 - DNA, 1806 bp, Homo sapiens
atgcggtctaataaattagagaagcaaagggtgagttaactcactaatcaaaaggttgttttctcataacagcctttatttaagtagaagtacaggttatatttgtaaaaatactgaaaaacttcttagggtcaatgaaattacctagatgttaggagatacataaaaacctagagaagttaacagcccttttcagaccctactgccacttcactagctcctgataatgaagttcttactctcacacgctctcaggttcttactcctgggaactgccgatggctcctcggatctccgagtaaagttaattctgtagcaaccagtgtcaatggaacagcacaatttggctcattcatattccagcactctatgaacaagaaactagggaagggtggggtcgcgggtaaagagtggtcgcactgcagggaggagtctaaatgccagggtggagctgaggactctcttcgccatcaaacctaacctgagcacttcacgcccttactggtgtctggcccagcccgggtcgccccttccccagtcgggacttggggcaggcaaaaagccgaacgttcggccagactggggacgcagcgccgccctcgctccacccctctttcccgcccaccaggcaattccaggtacccaccgctgggagctgggagggggcgccgggctggcgctgccgcccaccttctctagctggaacttgggatcggtgctcagggaggggagagccggcgctcggcggtccgaaccgggggatgggggagccgggccgggaggcccctgccctcgatacccctgcccactccggagagtaaggcacaacccgggaccccggggagaagctgagtcttccccagtggagccggacgaacccccagcccctggagagggcgagtgagtgcagcgccgctgcaccgcagcgcgagccgctactcaccgtcccccaccggccgcggacccgccgcccggcgccaccggctcctcctggtcgcggcgcaaccgctgccgccgctgtctcctcccgacgcgccagctctccctgcggggccgagcggctagttcgcaccctctttcgctctcttaagaatgattatgatttttaaacgaactttattagtagccagggctcagattgagtggctcagcagcagctccgccgggggtggtggggcgcgggagtctcgactcccctcatctgtggacccgccgcgctgcggagcatgcgccgtgcttcgtctgcgcatgctctgtgcggacccgcggccctgccccgcccctgttctggcgggtggctggcggcggctcagctttccaggcgcctccaagggagcccgggagggcagtggggagatcagagacgagcaggatctcctagatcgtgaactctagaaaagagaaatcggccaatgacggtccgcatgagtttcgcctacagagttatcacacttccagtgtcctcaaagggcttgccccgcttcggacacctaccttattttcttgaccagatgacatcttaagtggccaagtgagcaaaaaaatgtcgagcaaagtcgaaaacgcactcacacagcctgcaggacaaaatagaagcctgagatggttaattattcagagaagcgaaccaaaaacgaaaaggttccgcaaaagcaatctcaactttgcttcagttgtttttatatttcaaaataaaatagaatagaaaaaaaagatggaaaataccaagtgttggccaggatgtagagtaactgcattcttctactttgctgctggaatgtaaactggaacaactcctttgaaaaa

SEQ ID NO: 46780 - DNA, 1798 bp, Homo sapiens
tagaacaggtcctgatataaagtcagtgccagccacagtttagtccaggctgggtagatgctttgaagcttgatattgtttcaatgtactttgcatttctaaaaacgtgaacatttcaaagcattcatttgatctcctaaggactacctataccggagcctcattccagcacatttgtaagcgaggcacgcctcctagaggccacgagtgaagttaatttccagttctcgaaaatcttacagacagcggagaactggtgtggtggctctgacgccccgcttgtgagtctgcagtcggacatctggaaagtaagcggcacgtccgcgtgatttccagtgcttcatcttcttccaccctaccttccctccgaggctgggttcttctaattcctgtagattgcagagcgattcctgcgaatgtgccttctttcattcattctagttcattccacagataattcagctgcgcgcttcctctgtgcgaggcattgccggagagcggggagcgaattgaacgtggaacctgccagtaggggcttgccgcccaatacgaaattcaaaatatgtattgtatgtagacgggcaaactaacgaggatcttgtaacttgttttctcatctgccaaatgggggtaatacgatcttataggaccttataggtcgctgaaagattaaacgagcggaaaaaaaagagcccctaatagtgagctaggtgcaaaaaagatcctaatgccttttttcctcattcctccccagattgaaagtgatgagtgccagccctgagggttaaagcgccatattttcctcaatatagggaatatttgttagtgtccccagacgaagttacattggttcaattttcggcgtgtgggagttttcgccactagcattcagcaccccagtttcaaccgttaaagctaccgactccacatacaggaaatgcatcttaaaatttggaaaaaaaatccccaaaacactgacatccaaacactttaaagctgccaaggtggacggaacaccttgaattcccagacgcgctccactgagcatgcccagagcctcaggccaaaccccctcctacccgccaaggggaggtggggcagggctggccttctgtgctagtcacttcctcttccggtttcatatgaactctcccgccacccgggaacagtggctgccaccgtttgtgttttcccgagtttgaattcttgcaggtaggggaaacttccgcgaatttaggacagagagcaatcctgttattaaggcttgcaagtcgagagaaaggagagatggatcactttgcaggcagcagtagcagaaggacagacttggcgggttggttgtttggggcagacacccaggtaccagggaggagttggggagagataggtttgccagtggagtgaggaggggtgttggggatggaacttttgtaaggcacttgtggatgctcccgaaaaggagttccgaaagacagttgctctgtttcccagagtcataacagaggaagtgagtaactggacccagtccatcaagtaagaccctcatttagccagaacctacagcactttcctctaagttcaggattgcagaccacgtaaaaccttatgttaactcttgggatcgtaaagatccaagaacagtgacacacaggcctataatgagcaggcaacatcacctgactttcatgttgctgaaaattaggatcaccacctgcatctgctctagcgcctctcccacccccattacaaaattattataggtgtattgtagaaaatctggaaacgagagaaggacatc

SEQ ID NO: 46781 - DNA, 825 bp, Homo sapiens
ctttctgtcgctattgcctctgccataatttggctcttcatcttggatccctagatcactgcatgtgccacccttttgacctctttgcctctactttagtttgctctcctccaagccgttcctcaccctgctagaaaataagtcagttttcactctctgcctctcttgaactattgcaaacacaaatgtatgcaaaatagtagaacattcgtgtatttacctctaggaattaaccagtgtcgacatattgtcaacctaaaataatcaaaagggtcagagtctagttgaaagaaggtttactcaagcaaaaagtttggactagccacaggggaaacacagactccaaagaatggaaggcagtgttccaaagtgtaaaagcataggattgcttatatagacaaaacgtagggaagtttaacccaattttaacatctttctatgttaggcttaatgcatacttacaatgatttgattagttaaggcgctctttttctttctggaaagatatttaacgttccacattgaagatgtaactgtcatggagtcttgggtgccatctggtctgagttaggtaaggacaataaagaaggccagttaatctgtaacaaaggtcagtgattggaagcagggaggtttggtctctcctagttatttacagaaccaatacaatgaaaagagagataagctaaaatctaagaaacagaattgcaaacatgttaagtgattcagtctccagagctttacttcttcctcggcataaatttagagggttgtatttgcttcagaactttcttgcattgaatccaaggaaaggatgagaatatc

SEQ ID NO: 46782 - DNA, 2807 bp, Homo sapiens
tatttagagcgccttgaagcctatgctagaaatggaaatatctccccataaaaccaagacagaagcaatctcagaaactaatgtgtgatggctgcattccacacacacggtggaccatttctcttgatagagcagttttgaaacactctttctgtagaatctgcaagtggataattggacctcctagaggccttcgttggaaacgggatttctccatctaaacctacagagaagaattctcagtaacttcatcggatgtgtgcattcgactcacagaatggaacattccctttgatagagcagttttgagacaccgtttttgtagaattcccaagtggatatttagagcactttgaagtctctgctagaaaaggaaacatcttcatgtaaaaagtagatagaatcgttctcagaaagtgcttagtgacgtgtgcgttcaactcacagagtgtaacgtttcttttgatagagcgtttctgaaacacccttcttgtagtagctgcaagtggatatttggacctattggaggccttctttggaaacgggatttcttcatgtaactctagattgaagaattctcagaaactcctttgtgatgtgtgcattcaattcaaagagtgaaacctcccttttcacagagcagtttggaaacactgtttttgtaggatttccaaggggatatttatagcgcattgagcctacggcagaaaaagaaacatcttcctataaaaactagacagaataattctcagaatctgctttgtgatgtgtgcgttcaactcatagagtaaaacttttcttttgatagagcagttttgaaacactctttttgtaatatttgcatgtgtatatttagagcgcattgaagcccacagtagaaaaggaaataacttcacctaaaacctagacagaagcaatctcagaaactactttgtgatgtgtacattcaactcacagagtggaactttcctctttatagagcagtgttgaaacactctttttgtagaaactgcaggtggatatttggacctctttgaggccctcgttggaaacgggatttcttcctataaccctagacagaagaattttcagaaacctcattgtgatgtgtgcgttcatctcacagagtggagtcttccgtttgatagagaagttttgaaaccctgttcttgtaggatttccaagtggatatttagaccactttgaagcctatgatagaaaaggaaacatcttcatggaaaacatagatagaatcattctcagaaacaactttgtgatgtgtgcgttgaactcaccgtctttaaactttcttttggtagagaagttttgaaacactctctttgtaaagtctacaagtggatattttgagcccttggaggcattctttggaaaagggaatgtcttcacgtaaaaggcagacagaagtgttctcagaaactgctttgtgatgtctgtgttcaactcacagagtttaacatttcctttgatagagcagtttagtaacactgtctttgtagaatttggaagtgtatactaagagcgctttgagttctatggtagaaaaggaaatatctttgcataaaagctagacagaagcaatctcagaaactcctttgtgatgtctgcattcaactcaccgagtggaacattcctcttgatagagcagtttggaaacgctctttctgtagaatcagcttgtttgtatttggaccaccttgaggccttcgttggaaacgggttttcatcttataaacccagacagaagaattctcagagtcttctttgtgatgtgtgctttcaactcaccgagataaagatttctcttgatagagcaatttggaaacactctttttgtagaatttgcaagggtaccctgagagtgctttcaggcctatggtagaaaagggaatatctttccataaaaggtagacagaagcaatctcagaaactgctttgtgatgtgtgcattcaactcaccgagtgcaacattcctcttgatagagcagtttggaaacattgtttctgtagaatctgcaagtggatatttggacctctttgaggccttcgttggaaacgggatttcttcctataaacccagacagaagaattctcagagacttctttgtgatgtgtgaattcaactcacagtgtggatccttccttttgatagagcagttttgaaacactgtttttgtagtatttccaagcggatatttggaacgccttgaagcgtatggtagaaaaggaaatatcttctcataaaacctagacagaaccaatctcagaaacgactttgtgatgtctgcattcaactcacagagttgaacatttctcttgatagagcagttttgaaaccctctttctgaaggatctgcaagtggatatttggacctcctttgggtcttcgttggaaacgggatttcttcgtataaatctagacagaagaattctccgaaatttctttggttgtgtgcactcaagtcacagagtggaaccttcctttggatagagcagtttgaaacgctgtggttgtagtatttccaagcggatattagagcgccttgaagcctatggtagaaaaggaaatatcttcccataaaacctagacggaagcaatctcagaaactactgtgtgatggctgcattccacacacacggtggaacatttctcttgatagagcagttttgaaacactctttctgtagaatctgcaagtggataattggaccgccttgaggccttcgttggaaacgggatttcttcatgttactctagatagaagaattctcaaacactactatgtgatg

SEQ ID NO: 46783 - DNA, 1595 bp, Homo sapiens
tagaacaagaggcactcctatcatccaggaaatttcaagggattggaagctctgtgccaccagagacacccagttgatgtttgctggagaattagtatgtggggaaaaataaatcctacccatctggtgtcagaagtgaggaactgagaatgagtggtgagtaggagagggaaaaacaattcatggggcaaatcttacttcattatttcttttcaaaatttcttagttttatgtatttttccttactgattaattttaaaaccagtcttttttaaaacaaaaaaaagaactccaaagtactttgaatttgcattaactaaatatttgggggaaattgacatttttacaatttggagggttataataatatggtttactattgatttaggtcttctttgtgctcttcagttaagttataaggtctaatttactgttcagacatataatttcaaggtctatgactttcctgcttcagtgtcttttctaatccatcattattccatcagttcattcactcattcattctttcattcattcatttgttttccaagatggctttttccagtatgcttaaaaggctagagaggtctctaagataaggaactgcttatcttacagtgacacatttcatgaaataagataactgatgccaaagtcttttgaaaatttggaaaattaccacgtaaatatctgttccattcttatactcaattagtcactaagtgaaaacatgtaagctgaatctcacaatgactaatgtttctgcagcctgcttaaataagcggtaacttatttaaaaatccaaaatgcttgctaagtcatatatgactcatacagcagagtccattagtcaggaatgacttgtagggaaatattcctaatattagaaaaaggttaattgtgtgaataagaaaataagatataagatcaagtctgcttctagctcttgaaaattttcttaaaattggaggagaaactcctttctccaagtaagaaaaaaacaaataaaaccactgatttataacaaaagaaagcataaataagctagtcattcaatattagccaagagctgaagaatatagtctaacgtaaatacagcagctcaggagacaatgaccttgaaaactagcagccacaaaagaaagaacagactaatataaaagtatggactgggaggcagaaatgggcagatcacctgaggtcaggagttcgagaccagcctggtcaacatggcaaaaccccgtctttactaaaaacacaaaaattagctgggagctgtggcgcatgcctgtaatcccagctactcgggaggctgaggaaggagaattgcttgaatccaggaggcggaggtttcagtgagccgagatcacaccactgcactccagcctgggcgacagagttagactctgtctcaaaagaaaaaaaaaaatatatggaaatgtaattaagcattcacaatgcaggtctacgagctcttggtgcgcatggcattctagtttctattttgattttttagttaacggctcaacaaatattttggaacatatcatctctacaaggcactagtagatgttgaagagagacaacatcttatt

SEQ ID NO: 46784 - DNA, 2142 bp, Homo sapiens
gtcattgcctcaggattttccaatgtataaagaaagaatttcttgtaatgacctcgtagatatggtacttaagagtaagtaacaaatagacaaataattttaaaacaagaaatggttgagacagaaatgaccttcctggaaaataaatgcaattagaaaaaagactattgttacatgaaatgaattatatgaaggatgtttctaggcaaacagtaggtggcaacatctacacagacttgttttagaaatgcttgtataacatcaaaacaaaacttacaagctaatgattcatgaaatagggaattttccaaaactcacatgttagtagagatatttatgcgcaaatccattgttttgtattctttctattttggaatgtcatgcttatgccttatcacaaggactccactaagatcaataatcttaaaaatgttttgtttggccaggtgtagtgactaacgcctagaatcccagcactttgggaggctgaggcaggattgcttgaaccaagaatttcgggaccagctctggcaatatagagagtctccatctctacaaaaaatacgaaaattcaccaggtgtggtggtacatgcctgtggtcccagctacttaagaggctgaggcgggaagattgcttgaacctgggacatcaaggcttcactgagccatgatcacaccaccgcactccagtctgtctctctctctctctcttcctctctctctctctcacacacacacagacacacacacacacacacacacagacacacagttttatttgtgggttatgttagagactgttcatctgtctctcaaacaaagggatagaattttgttcccctcacatttcttggccagattaggtggttgaattagataagagtaaggattaagggaaccatgcaaacagctggatttttttttaatgccacaatatgacctcaattactggagttcacagaagttgcagaagacacatccggtggtcaagaaaaggggaagctgccttaagtttccttttctcttgtgagcgcaacaacctccatctgtctttctctgtaacgctgaagacagacacgtgaccctggttctcacagaagaactttcaaatctaaaaagccattttaggaaataattggaaaagtctctgtagcctttgagctccaggatatttgttttccagaatgatgagattggttattgaatgttttaatggttggaaaccagagagtagctttagaggcaagcagaggcgctgctttttaacagcagaggtcagtaacaccaaaggggaaggaaattgagcagtctggccagaaattgcagatttctgttgcagacccaacaggcaagaggcaataggcaacatcctgagacacacaggaaaacctgatccttagtacctaacagggtctcctgtgcagaaaatgttcccatccctggcaacagtgccttcctggatatgctcacagatgtttaagactctccctaccagagaaatagcttctatcacagagtattttgtagggaaccataacagaacgtaaggtgaagttttctactatactcttataattattgaaatttttcctacttcattaatacctggacttagatttctcttttagaaagaagcagtttgtagcaaaaaaaaaaaaaaaaaaagaaaaaataatgtttttcacagaaattgaaaaaacaatctcaaaatttgcatgaaaccaaaaaagagcctgagtagccaaagcagtcctcagcaaaaagaacaaagctgcagacatcacaccacctgacttcaaaatatattacaaggttatagtaaccaaagcatcattacagtgatacaaaaactgacacatagaccaatgaaacagaatagagaacctggaaataagtctacatataaggcaactgattttttttataaagttgccaagaatatacattgggaaaagggacaccgtcttcaataaatggtgctaagaatactggatatttatacacagaagaatgaaactagacccctatctctcactacatataaaaatcaactcaaaacggattagacttaaacatgagacctcaaactataaaactactagggaaaaaacctagagaaaacactttagggcattggtcta

SEQ ID NO: 46785 - DNA, 3144 bp, Homo sapiens
tataactgtacaacatatacatatataataagaattactgctgtcacatactgttaagttacaacagttcaagaatgggtaaaagtaaatactgttaccatcattattagccatgaaaaagacaaaagggattatctagctcaatgatctttctaagtttatgtaagacccacattctaattaattaaatagctacaggcatatgtatctcaaattcaaaagactgcttaacctttcctgcttttgttcatgttaagaaggaaagccttaagcacctttaaaagagcagatttatttgtttgtttgtttgtttgtttgtttttatagagatagggtatagctatgttgcccaggctggtctcaaatttctgagctcaagcaattctccttcctcagcctcccaaagtactgggattacaggtatgagccaccacatccaaccaagagtggattttttttttaaaactttctcaatgacagaagggaagtcaaccaactcataggttcatacccacacaaaatagcacataaaccttgtttaaccattacttacacacacacacacacacacacacacacacacactcttgcatgcacatacacagacccaggggatcaacagcatattcacacagggataagaatacaccagaacagaatagaccaaaacttagagataaaccttttgaacagggcgtttttttaatccaggtaactacttgatgatcatagtgcaaattatgccctcataaataaaaataagacacaaaacagattatagaaattctaagtctttactaaactaattttctcagattgtgctggacacagacaagtcatatactagattcaatgccattaactatacactataatagtttctaatatccatgtattaccttatattttaataactttttcactgagttgtcttatttaatcctccaaatctgtgaaataattgactttatcattcccattttacaaataaagatcagagagggtaaataactcatagaggatacagtatactgcctgcactgcaaagtcagaatttgtagaactatttattgagccaccctttcaaactcattttatctctggttattcattaatattgtctcccacataccagcttctctgctaaccacttctctaacttgacattctaaaaggatcctagatgtctgctttcagttccctagatttcaccactccttagtgtatttacagtctcctctgcttctaaacgtttagaccaacccaaatcacccataaaccacaaacctatgatgattgtgcacaccagttggctgccttcctagaagtcctccccagttttttccatgcttgaagggccctgatttcatttgatgtctacctctcttcctgccacgagaaccaaggaggggttaccccattttcagttccaagagtaaatcttgataagcctataccaataattatgaccccagttgtttttccaaggattggtttaagcatgatcacatgacctaattctgcacaatgagacatgaggggagatgatatgggagaaacttatggaaaggttttccactaccgttatgagcagaattgtgttgaattaatacgttgaagctctaactcccagtaccttagaatatgaatgcctttggaaataacaccttgtgtgtgtgtgtgtgtgtgtgtgtgtgtgtgtgtgtgtgtgtgtgtgatggagttttgctcttgttgcccaggctggagtgcaatggcacaagctcggctcactacaacctccacctcccaggttcaagcaattctcctgcctcagcctcccaagtagctgggtttacaggtatgcactactacacatggctaattttgtatttttagtagagacagggtttcaccatgttggtcaagctagctggtctcaaactcctgacctcaggtgatcccgcctcagcctcccaaagtgctgggattacaggcatgagccactgaacccagctgagataatgtctataaagaggttactaaaattaaatgaggttttatgggaagtccctaatccaatctgactgatgtcattttgagaggaactatggacacttgaaaagacaccagggataagcaaacagaggaaagactatgtggggacacagagaatgtggccagctgtaagccaaggaggatgacctcagaaaaaacaaacctgtgaatcttggtgttgaacttcgagcctgcagactatgagaaaataaatttctgttctttaggaagctcagcctgtggtatttggttatggcagccctagaaatctaatatagtcatttaaaaatgacatgtaaatgaattttaaaataatgacacaaggaaggaagcaccctttctgttactggacattttgatatctgattatgaagatgggaattgctttagccatcttacacctgtacagagaatccatctgagaactggtttccatgttgagtatggcagatctaccaaaatatacataaaacaaaaacttatttcttaatgatgctgctgagccactgaattaactaaacttagatcactctgtcttcaaatgtcctcttatatgaaaataagtttccctgatttctttaagctgtggttttctataaattatagccaaaatcatcctattgatacaatcaattggataaagtttagctattgacaagctaaggctgtttcagcagttgctctagactttactcctttattactcatcagttcttagtcttcttccatttccaactctatactcttggctcttaagttttgcctccaacccgtcacagagtttttaacttatgtctaacttatccatagttttctaagcattagactctcaattgtcccctataaacttgcttagtttctcttaggtgggaattacaatcttggatctatccacttaaatgaagtccaaagtcagttccaaaatgtaggcaaattcagaaagataagctaataacctatcttttagttgacatggtcaacccaatacatatatctgtgttatgctctgtttataagtaatggcaaattcctgaaggaccgatacccaatatcacataggcaaaaagtctgagacctcagacccaatttcctgacaccaactacttt

SEQ ID NO: 46786 - DNA, 626 bp, Homo sapiens
ctcaacagcaacatctgcaaagatccatgcatctgtaaacttctgttgctttttctgacaaggattcccaacttgtaagtgggttgatttcagtctctgcttgtacctctgtatcctccaacactgttctctccacttgccttctctccacctcaaggtctgtgttagcttttactgtcttgtgatttctgaagcctcaatgtgtctctagttcctgctcacttaagtttccctccaaattcccaagggagatctgctttacggttagtcaacatccaatattgaccattcttgctgggcagagttcagttacacttcatgggctgatagcgaggcttttagctatctctgtctcaaaggttaatccttgaactaagtcattgctggtccagaaaagcagaagtcacatgatgtaaagcataagggccctaggagcagagaaacactcagctgtctttcatagaagaggtctttggacatggaaggacaatgagcatgggttgacgcacagagcaacttggtctcctctccagtataagtcttcttttaaggaatcaatgatatgaaagtttatttttaaaaattacaaaacaacaacactggtttcatcctccaccccaaaattc

SEQ ID NO: 46787 - DNA, 1570 bp, Homo sapiens
agccaataaaagtttttcagttgaactataaacccacaaggctaacacaatttgggcatttattatgtgctaggtgcaattctaaaattacactaaagccagtattggctctggggcttctttcttggaaccataaagtgcaatgaacgcagtttaaaacctgctccttggaaattgttaagctattcaaggacaagaacctatgacatgtgttttaaccaagtatttagtatggtattgggcacttaataggtgttgaaacaattttggtggacttgagtagcacagaaaaagctcatgaaatcttaatgaccccacatgctggtaaatggttgctgcctcatgctccaaacataccacttcctcaggtcaaaaccagtttttttccaattcctaagcaacgaggtttggcataaagctaggccagaaatgtcagtacaggctatttcttggggatatttagagacacctactgagttagtaggaaatgtaaattgtgcctaaatttatcaggattatttctcagacacacaactacagttcatctcatctccaaagtagcctcaggactccagaaatactccaagggcctcttcctaaaattgactagaaattttgccagctctctaaagaataatattgactgtcccaaagatctcttggtcaaagtctatattcgtgatttggaattttcccaagcaccaggaattacgctgtgagctaacatttacgcagacattctcccagttactttcagttttcggttttgttagttatcaagtaaaggggatagcaggtaaggagaaagtaggcaagggcatcagagataagttacactaggacatagccttggcttgtgtgtcatcttctttctacatgccatatctcctccattactgaattttaagatctgtccttgaagacagagacttgatctatagttctattgcgctgctcacactattaatggtaataataataaaattaatttttattgaggccttatgaagtgcttaatattgtgctaaggccaggcatggtggctacacctgtaatccgagtactttgggaggccgagaagggaggatcctttgagcccaggagtttgagctaaccaagacaacatggtcagactctgagtctacaaaaaataaaaaatattagctggatgtggtggtgtgcacctgtagtcccagctactcaggatgttgaagcacaagaatcccttgggcccaggctgaggttggttggggctgcactgagtcatgatggtccccctgcactccagcctgggtgacagagtgagaccctgtctcaaaaaagaaaaaaaattgtgctaaaatacttaagcactatcaaatgtgcaagtattcaatgaacatttcgcaattaaaaactctaaaataaaatatcttatgtagaaatatttctgggtaagcaaacaaaacaagtagaaataaaatgagtttttatttcttcttatactaaaggtaaagagaaaaacttaaaatagtgaattttcaggattgtttttagagacttgaaatgagggcaggtcgggcaaagtggc

SEQ ID NO: 46788 - DNA, 527 bp, Homo sapiens
caggactcaaggggaaatacagtgatgacatccctggattttctttttgtctcatgtattccagatttagagctgaagaagtcagtaactgggaaacaccaaagtgtatagactaaaaagcccccacaaaagccagctacttctagccaaaaaaccaggaaaggggcagcctagcagggcagaaaccttatagacaatagctactctaaacaaacccacagaaaaagctgtgccccacccccaccgtgccagcaaagaaaactagacttccctcttcacagcatgaggggaactttgactcccagcctagcagtaatgaagcaaccttcctttccccactggggtggtgccagaggatgcccagcagagtgtcagggctttcactatcacccataggtaatgaggccacccttgccatggtgtcagtagaagtgaggagcactgacttcttcagcaataaatctgggatacatgagacaaaaagaaaatccagggatcttatcactgtattttccttgagtcctgag

SEQ ID NO: 46789 - DNA, 2281 bp, Homo sapiens
aagctcaacaagaatcactttagcattggatagcagttaacagcaaaacaagtttgttggttcgttttggaaatcttgctaaactaatgcagactctgctgtcggtgtgcttaatgatagcagcctttctgtttttataaacagttgtggaatggaatatctgctaaatgtgagggctggcatgtctctacctcaataaagttctggcttttttgacatctattgtgaccactcaggggcctttttaatttatgtttggagtcacagctgcatgtttaggttgggttgccagaagtctgactgccaaataagcagtgttgctatatttagaaatgaaatagtagtctacaaaatagaatatctggtgttgctaccttacttggctctatgttactgggattaacttgggatttttaaaagttagtaatatgtatatgaaataactattttgaatatcttagtaaagatgaaaagttatgtctagcaagatttactgtccaggtaaatacaatctttatagtgttcttaaatctatttccctgttaatctatcctaatgactataaggagtcaaaataactgttagcatcctattcatttttcagaatattcttgtcacaatcttggaatttctattactttggaaactataaatataataaatattacaataacttttatgtcaaaatctttcatttatttgtgcctctaacctttgggcagtcttcatgaaactccctatttgagttagtttgtagatgctaatttcaggtatggaatgctatgaaacatgttattgataattaaatgatggcacttctccataactcaaagtaggaaatccaataagttgtccaacaaaatttagatgccatcctacaagaaactcaaagagcctagtgaattatatttgtcagcaatactcatctgattctcatagttccataaaagaatgattctttcattaaaatattattttgtatagttgtgcctcataaaataataatatttcatctcagaatgaggtgcttttaaattaagaacaaaacaatctctccttcaagttacaaagtacttggcaaaccttctggataaaagacaccatgctaatatagaacattactatctcactatgttattttacaatgtcctaagtaaatttttgtgatacgaggaaaatataaaacaaaaaaggctcaccatgtacaaaaaggacaactggacatcttatacttttatatcagagaatcagctattcagattggtttgaaaagctaaaatttagcttatgcctaaatctcccatgagttcatccttatttactaaacgtcatatgaaaggttaagtattttaagcatgagtcatagggacaactttctagggcatttcaaacgaaatctatgaaaaattaacaagctatcacggagggtgtctcagggatcctactctgcccctccctgtctctggaaagggaggtagggagagaagacaggcaggcccaacccctaagtattatacaccctcgatcattaaaaaaaaaaagttaacaaatttggtccagttacatggcatattaaatccacatttttttattttttgttattgttgtttttgtagttttcttcttattctttttgtttcttttttcttcttttttttcatttttgttaaaattcacatttttatcttgacttctaccccaaatagagtctgccttctgtgtcatggatttcacatttgcagattcaaccaatcatggaccaaaaatactcagaaaaaaaataaataactcagaggttaaaagtgtgtttaacaagataaaatagaagagaaaaaataacaacataacaacaaaaaatacaaatttttaagtacagtataacaactatttgtatagcattttacactgtatttgatattataagtaatttagagatgagttaaagtatattggaaggatgtaactgggttacatgcaaatactacgccattttatataaggaacttgagttctggggattttggtatctgccagcggcaggattgcggataggtcctggaaccaatgccctgcagacacagagagacaactgtacctataaaatgacagttatgaaattttaaataaataaacccaccaggacagcagagaaagagagagccaacataaaagcaaaggaggaaaagcataaaagaaaagaaaaagacaggctgggcgcggtggctcctgcactttgggaggccgaggcgggcggatcacaaggtcaagagatcaagaccat

SEQ ID NO: 46790 - DNA, 3149 bp, Homo sapiens
tgagaacacatggaaacacagaggggaacaacacaaactggggcctattagagggtggagggtaggaggagggagaggatcaggaaaaataactaatgggtacaaggcttaataactgggtgatgaaataatctgtacaacaaacccccatgacacaagtttacctatgtaacaaacctgcatatgtacctctgaatgtaaaataaaaattaattaaaaaaaaagaaaaaagtaacataaaaaatgcatacatatatcttatgcatcaattgagatggtcacacaatttttcgtctgttgatgtgtattattttgatggatttaaaatttttaaactaaatttaaattcctagaataaactcacttggacatgatctattactttttatatatcactgaatttaattctgtaatagtttggattccattgattagaaggaaaaaaatactctgttaagaatttttgcatctttgtttatgagaaatattagaattttgttttcttgtcttttttttttttttttaaggtcttcattagagtaatgctggtcccataaagtgagttgggacatgatctctccttttttattttccggaagagtttgtggagaattagtattttttctttaaatcaaatgtttggtaggtttcaccaaactgtctgagcctggagttttctttgttggtttttcgtttgtttgtttattattctttattttagagacaggattgtcctctgtcacctagactggagtacagtggcgcaatcatagctcactgcaacctcaagctcgtgggctgaagcaatactcctgcctcagcctctggagttgctgggattacaggcatgagccaccacacccagcaacctggggtttctttgcagaaaaatttttcactgtgacttttatggattttattaggctattcagattttctgtctcttcttgagtaaactctggtagtttgtgacttcaaaggaatttgcaaagctcatctgttttcaaatatattgaaaaaaattcataatatatttattttttttaagtatttgtaggaaatgtaatgatgtccccgattttattcctaatattggtatgttatctttctctctctctctctctctctctgtctctctcttttctgtcagtctggctacaagtttatcagttgtattgatctttgcaaagaagtagtgttgcattccattttttttcttcttttttctgctttctatcttattgatttcatctcttatttttattactttcttctttatgcctactttagccttaatttgcccctttttttctagtatgttaagattgaagcttggatcattaatgtgagaactttcttctttttgaatatatgcatttaatgttataactttccaaccaagtgctgtttgggtcacactaacaaatcctaataggttttgttttcatttggtttcattcaaaatattttataattttaactatggtatcttctttgactcgtattttattaaaagcatagtgtttagttttttaatatttggagatttttaatatatctttctgtaattaatttctatttctattttcttttggccagagaacatacattgtattattttatctcaattcagttaagtttaatgagatttgtatggcctggaatatggtctatcttggtgaatgttacatttgcacttgaaaagaatatgtactctgctgctgttacatggagttttctataaataaacagatcatgttggttgtcttctatgtcctttctaattttctctctatgtgttctattagttactaaaaaaaagagttgatatatacaactacaattgtagatttatatatttctcctttcagttctctaagtgttttacttcaggtatttaggagctctgtttttagtgcatatacacttaggattgccaggtcttcttcaactgatccctttattgtaatgtaatgttcttcattacccctggtaatattttttatcataatgtcaactctgattttaatagaaccaccctgcttttttttttgtttgcatggtatattgttttctgttcttttactttgaacaaacatctgtcattataattttttctttttttgagacagagtctcgctctgttgcccaggctggagtgcagtggcgggatctcggctcactgcaagctccgcctcccgggttcacaccattctcctgcctcagcctcccaagtagctggaactacaggcgcccgccaccacgcccggctaattttttgtattttgtttagtagagacagggtttcactgtgtcagccaagatggtctcggtctcctgacctcgtgatccacctgcctcggcctcccaaagtgctaggattacaggcgtgagccaccgcgcccggccgtcattataattaatcctcaaaacaattcaataaactaggtacagttattatccccaatttacatgtaggaaaactgatacagagcattcaatactgccccttgctgcctctccattcagcctgtttccagagcttttagtgttctcctgatgctacttctcaaatatgttcagattttaatatttttagtgtcttttttattcatttaccatctaatgtaaattaaatactcaaaataatgtgtgttttttcctgtcaccgttatgggaccacagtaaggctattagcattttgcatgagggaagtttaaatacagattgaaacacttttaatttccttggataggtactggagaaaaaataaattcttaccacatttctatggacatcaatattaaaccccagttcttttttgattcccagttgactaatttcagcttaagtaaactagtaatttagtcgttaacagataagaggcttgaggccagctctatactagaagtttttacattttcttttttttttttttttttttgagacagagtcctgttctgtcacaagggctggagtgcagtggcgtgatctcagctcactgcaacctccgcctcccgggttcaagcagttctctgcctcagcttcccaagtagctgagattacaggcgcccgccaccatccccggctaatttttgtattttcagtagagatggggtttcaccattttggccaagctgttcttgaac

SEQ ID NO: 46791 - DNA, 3161 bp, Homo sapiens
tggcaatccaataatccaggtatttttctatctggaatttaggtttttaaattcaaatcaggccgggcatggtggcttacgcctgtaattccagaactttgggaggccgaggcaggcagattacttgaagtcaggagtccaagaccagcgtggccaatgtggtgaaagcccgtctctcctaaaaatacaaaaaattagccagacatggtagtgggtgcctgtaatcccagttactcaggaggctgaggcaggagaatcacttgaagccaagaggcacaggttgcagtgagctgagattgcaccactgcactcgagcctgggctacaaagtgagactccatttcaaataaataaattaattaattaattaaaataaattcaaatcagatttaactaatactttcacatatttaccatctacaaggcactaggttggaaacctttatttaatgtcatagtagcacaaggtcaagctattattttcacaattctttctccagtgattataatttcatttatttttatttttatttatttatttatttatttttagacagagtttccctcttgttacccaggctggagtgcaatggcactatctcagctcactgcagcctccacctctggggttcaagcgattctcctgcctcagcctcccgagtagctgggattacaggcatgtgcccccacgcccggctaattttgtatttttagtatagacggggtctctccatgttagtcaggctggtctcgaattcccgacctcaggtgatccacccacctcggcctcccaaagtgctggaattgcaggcataagccatcgggcccggctagcctttcattttataaagtgaccatatatattagcgttggaaacaaatgctgtgcctataattttctagatttttttcacttcagtttctacaactatgacattgttaccgtgtttatatataccttccttcagaacaaagggtaaacagtaattctgcacttatgttaaaaaaagaactgagttgaaagcctgaagatctcggtcctaggacccagctaaggttggaggactgtgtgaaagttacccaaacattctcggtcttggtttcattgcctatgacattaaaagattagactgggttctcgctagggacctctctaattctaggagtctgaaaagccttcagagagagaatgtactttggaaacaactaaccaggtgtatgtttttcgaagtgttaatgattgctaggttgtgacactgaaatcagtaaaacacgaatcaaatatttacacataccttccatgcagtgtattttccatcatgggaaggtattgggcaatggaaaatttctcaaatacttttactggaagagacaaattaggctcagttttttgttaccattatgtaaagtttgtaataatgctatgtgaaaccctttgtttattcatagatgaaaataccatgtcgagaattattcagcaagttgctctcagactaagatgcttatgacttgctttagagtgttttcctttacataagattttacctgaaagaccaagtctattgttgtattattaacaattataattcaaaatgtcaacaatgtttccattaattataggcattgttccttaaagctggcctaaaatggaagtcagaaatcagggtttgaaggtaaaatgtcaaaccattttggttctctcaaaagattttttttatgccgtttaactgaatactccaattctgtctatgaactaggagagaccatattaatggttttccatgcattaatacaaaaagctttggaaaatacgccacaagcttacatgtctactgaagtatattataaattaattattgtacttttttgaattttaaattttctgtttaaattttcaatctattcattataggatctcactatgttgactaagttggtcttgaactcctgccctcaagcaatcctccaacctccgcctcccaaaatgctagaattaaaggtgtgagccaccatacccacccccgccgcccccaacaaatctattcattctttcaggatgaagtctatatgtatattgcccatgttttgaagtagaacttcctttcacttattcagtagtaatcttttttaagctttactggaggcctaggcaggcagatcactggaggtcaggagttcgagaacagcctgaccaacatgatgaaaccctgtctctactaaaaatacaaaaattagccaggcgtggttgtgggttcctgtaattccagctactcaggaggctgaggaaggagaatcgcttgaacccaggaggtgcatcatgccattacactccagcctgggtgacaagagcaaaactccatctcaaaaaataaaaataaattttaaaaagaaccttttctgatcacctaataatgctaaagtttcctaggaatttgatgaccaacttcacgtgctccatgtccacacccttcattgtgcaacaaactttgctcatatctccttctgggccttttccacatcaaaatcctagtctttcaaatctgccttaaatggaagatttcattccctttttttttttttttttttttttttttttttgtatttttagtagagacggagtttcaacatgctggccagcctggtctcgaactcctgacctcgtgattcacctgcctcagcctcccaaagtcctgggattacaggcatgagccaccacacccggccccattccctagcttttattacccttctacttctgaccttcattcacttatttttagctttattgtcttccttgagtgtgatgcccaaaaacacaccacagttttctgagtgaaagataactgtgctttctttcatgagtctaataactttcctaacagtagccaatatttcacttgtcttgtactaaattaatacattgaaaaactaaaagaaaatttctatctttgaatttaaattgacgtcctttactcttttaccttgaaatcatactttctatcattcataactggatgctgaccactgcatttgcccatgctgaatattatttgccacttccttgttcatttctattattaggaggaattttcttagttccttccctcctactattacttaagtgaaaactatgtttcccagaacaaaccagcccaggggaaaa

SEQ ID NO: 46792 - DNA, 2603 bp, Homo sapiens
tattcaagtcctatctatctgtatggtggaaatactatataatggtgtgctactactgcgcgtctatttccttttcgttgttgttgctctttgtttgttttgagatggagtttcgctcttgttgcccaagccagagtgcaatggctccatctcggctcgctgcaacctccacctcccgggttcaagtgattctcctgtctcagcctcctcggtagctgggattacaggcacccaccaccacacccagctaaatctttgtatttttagtagagatggagtttcgccatgttgaccaggctggtctcgaactcctgacctcaagtgatacgcccaccctggcctcccaaaatgctgggattacaggcatgagccaccatgctcagcctgcacatctatttccaactccaccttcagtgacatcattttagtagcttgaaggtggccatggtgagagtattttctactaggaaattcagtgaatacaaaaatccggccttagtttattgtttactgatggtcaatttgaacttaaggaactgatgaataaaatgccaacaatggagattaaatttaagtttgtgttacaatgtatatactagcatattttttttcagagaacccattattaaactttcaccagcacaccacaggataaacctctttcataaagttatattgattagtaaactgaaaaagagactcaaaggagagagtgaatttgtggatattctggagaagaagagattctgttccacccagaagaaacagcaagcagcaagcactctggccagtgtggctggaaacaagtgaaaaatgagaaatgatttgggtcacaagctagatcatattgtgcctatgaatcattatcgggattgccttgtttgtttgtctgtgacaatgtctcactttgttgcccaggctggagtgccgtagcaccatcatagtttactgccaactcaaattcctgggcttaagcaattctcccacctctgcctcccttgctagattgcccaggctagtcttgaactcctggcctcaagagatccttctgccttggcctcccaaagcactggaattacaggcattagccaccatgcccagccaagactgcctcttaatcatctgagagagatggggaaacccctagagagtttttatttttatttttacttttatttgtagagacagggtctcactttgtcactcaagctggaatgcagtggtgcaatcgtaactcactgtaacttccaacacctgggctcaagtcatcctcctgcctcagcctcccaagtagctaggactacaggtgtatgccaccatgcctggggattttgaacagaaaagtgatctgaatgacttacattttaatggatgctctggctactgtggagaataggctgcaggggagaaacacagcaccagaaaaaccatttagtcagcaataatccaagagttgtgatgatagtggcttccacctttgtggtaaggaaaatgttaaaaattgtcaatttttaagtatattttgttggaagagccagcagggcctgttgacagagtggaaattggagataagagaaagtaaagtcaagtatgactccaaagttttggacccaagcaactggaaggatagagttagtatctaccaagctggaaaagaccaagatggcatttaccaagactatgggaagagtagaataggagagaagaatttggagttcagacatgtaaagtatgagatgtctattagacatccaatgaggatattgaattgacagttggatattggtatgaggagttcaggggaaaggtttgggtttcatatatacatacaaaacttaagaacttaagaaaatgatgaataaaataatatataaatcagcatatataaaaccagtgtttaaagccatgagactggctgagtctcactgaggagtaagttgacatagaaaaaaattcaggtcggaggactgagccctgcagcactccaccattaaagggtccaggaaatgaaagagatcagcaaaaaggagactgagaagatgtgcctataaaagataagaatttgtacgtatcaggaattcatttgaattgttctttatttctttgtaatctgtttcttccctacaaagactttgaggcagtaaacaataaaaaagaaagtaagttaataaaagtgaaatacaaaaaaaaaatctgagtcacagaagactaaaaatatggtaactataagatcaacatggttactataaacttcacgtttgcctctgagtttcctagaactcagagcaaaaataaaacacaatcagtgtatttgctagtgctgcaataacaaaataccacagtctgggtggcttaaaaaaacagatgtattttctcacagttctaggggccagaatttcaagatcaaggtgtcaccaggtttggtttctcctaaggcctgtctccttggcttaccaatggggcaccttctccctgtgactgcacatggacgtttctctgtgtgaacaagcctggtgtctcttcctcttcttataaggacagcaggataccagtcctattggattaggactctaaccctgtggtctcatttaatctttttgttt

SEQ ID NO: 46793 - DNA, 1712 bp, Homo sapiens
taacaccccatgccaaccccattggcatgctgttgcagtgacttttgggtttgcaacttctgctttaaatgaatagatctgccaaaaaaaaaaaaaaaaaaaagacacccaattgccctctattaccacccatagagacccaacatacttgacatccaaagatatcataccaacccaacatggtatgtttctggttaatagttattacaaatcctggggaagtgatatgtgtgtactttgagatgattaataaaattcagtgacctaatggtgaaacaaagaatgaggcatttatacaattgaatatttcaaacaggttggtataaattttgtctcttatcctaggccattaaagaggtattcgaaataaggcttgaaatatgcttcaaacttcatatagagtatgccagatagtgggcagggactgactgatataccaaaaacacgtttctaatatctgggctaatagtagttaacaaccccaagcactaagtttaaaaaagaagaagcagcacatcaacaacaactgttgttgctaaagtaagaaaatgttttgggcagatcagaatttagtcacacaccagttttgatgccagcaggtcatgctcagaacagtctgccctggaacctactgggactgctgaaattctggcaggcccaaggagtgctaaaatcaaaggcagcccttcagaggaagagggaaaaggcagggtgtctagtagcaaagttcaagcaggcagagtactgaccccttctgtctaatgtcattcagatcaagagccgagtggagataaaggacattattatgtagattttttgttttattttggtttggtttttttgtttgtttgttttgttttgttttttggttttttttactgatagatgtaatgaagccataagagagaggcttaaggagattcttcactaagcaacaaaatcattaaaagttcaccttggtgagatagtgctacctcataattacatgacttgtttattgcaagttttcagattgtgttctcctatccttgcaaatctaacaacctcagcatacaaagcttgatgtgacagaagttagagcagttgaaaaaaccaggactgttcgattaactcttgtggcataacaaattaccccaaaatttaatagcttaaaacaaccatttcattttgcttacaatgtgaggtgttagtagttcaggaagagctcaattgagcaattctctttagagttccccctacagttgcagttagatattggctggaactgcgatcatttgaaggctcagctggactggatgtcaaagatacaaggcagtcggtgctggctttcagctgggagctcaactggagctattaactcaagcacctacatgctgtttctccatgtggctgggtcttctcactcagcagctgctagactccaaaacatagtatctcaagaggggagagtctaaagagcacaggaagcaaacattctaagagaccaagaataagctgcaaggagacccagccttggaagtcactcagtgatattggcactgaactttattcatcaaggaaatcgctatgactagcctagattcaatgaagagaaattagatccaatcgtctaggaaagaagtcttataaaatttgccattgtttttaattcatcataaacactttttcatcattctgctgcttctacctttcttatgttactcttcccatct

SEQ ID NO: 46794 - DNA, 1435 bp, Homo sapiens
cttaaactttacaaagtaaaaggatgttcttatatttcccaaaatgatgaaattgctgtatcttcttttctcgtggctaataaagcatttaaagttcacatatccaaatcagatcgtttattgaaaggaaatagggtttaacatagaaatggagagtttctttgaaatatgccatgggggtctcgtcctagtctacgaagcttcaaaaatgtttttcgtcacataaatcacgtaagatccagttttggttttcatcctttttttttttctttttctttttcttcttcttcttctttttttctttttttttttttttttttttttttttgtagagatggggtctcactctgttggccagactagtctcaaactcctggcctcaagaaatcctccttccttggcctttcaaagtgctgggattacagattacaggtatgagtcatcacacccagccttcatccctttttgtttgcagaggaggagggtaatgttttctagaatccaacagtggctgtttctttggtttcatcaataaaattttcctttctctgtgatactgtcatattcctcctcctccccctactcatcttcttctttttctcctcatcctcctcctacttctcatattctttttccttctttagtattctgtattcttgaactgaacttatatcaagggaaaaaacaaaataaaagaagaataactgaacataaagttttatatatcttatactgtaaagatttatggagtcaaatacatagctattcactgaacctacctaaatttgaagagttccagtttagttgactgtctaatttaagttaaaccaaaaaggctattagagcaaagagggaggattttaagaggttagtaaattattaagccaaaaaatgtttaaaatgtataaatgggtaatagacaaatccacagtgacagaaagtacgttagtggttgccaaggactgggggaagcacagtgcggagtgactgctaatggatacatggtttctttttgggggtgatgaaaatgttctggtaactaagtacaactcttcatgtattgctttccctaatactcctgtgggccctaggacgttctgaaaaaaaaaaatctaaatttccatcatccaccctaaataagttgagttacatcacccaggtggggttgtgagaggtaagctgaaaagaagtattctgaggaacaaagagccaaaaataatccctagctgaaaatgctgcctcaccacccccatgtacggctcattctaatcatatagacgatcatcagttcatcctactctaaagattcaagaatttaaacttatttcctcaaagaaaactgcaaatatcaaagacaagcttgagtaaataattaaggtgtttattggtttatgaactagaaattcaaaaggtagggtgtgctttaaggttggtt

SEQ ID NO: 46795 - DNA, 1087 bp, Homo sapiens
gagtagctgggattacaggcgtgcaccaccatgcccgtctaattttttgaatttttaatagagacagggttttgccacgttgctgaggctgatctcaaattcctgtcctcatgtgatccacccacctcggtgtcccaaagtgctgggattacaggtgtgagccaccacactcagctgaaaatcattttttatgaccattctgaaaacccaagaagctccttatcaatgcttgataattgcagtcactgaaatacagaaaggactaagtggattttattcaagctgagagttcagagtagtgaaaagctcttagtggttctttaagaattttctccccatttctgagtggcaataccatcagctggcctgatgagaaagtggtttgtcacacattcttttgagtcatagtgaaaggcatgatggtgtcacctaaaattagtagattagctatgcttcatttctcatctacaccaggaactggtaaggttatcaccatgaccatggcattccttttcttctttattgtcctatattggctagaaagcccacctcatcctacattttgaccttccctctgcttcctcattcctgttagtaacttgctttttttttttttaacgttattgatatctcctcatccacccccattttctatcaagcattataaagtgaagccaaggaattatatgcttttcctcatctctttagttaagaaattctaaagtaaagccgggcgtagtgtctcacatctgtaatcccagcactttgggaggctgaggtgggtggatcaccttgaggtcaggagttcaaggccagcctggtcaacatagtgaaaccccgtctctactaaaaatacaaaaattagccaggtgtggcggcacatacctgtagtcccagctactcgggaggatgaggcaggaaaatttcttgaacccaggaggtggaggttgcagtgagccaagagcaggacagagcaagaatctgtcaaaaaaaaaaaaaaagaaagaaagaaagaaagaaagaaagaaagaaagaaagaaagaaagaaagaaagaaagaaagaaagaaattctggcattcttttttg

SEQ ID NO: 46796 - DNA, 1934 bp, Homo sapiens
ctgacctcaggtgatccgcctgccttggcctctcaaagtgctaggattacaggcatgagccaccacgcctggccaaaaatactattttttaaggattttttttaataaaatgggaaaatgttcacaatacaaaattcaatgaaatcgaggatacaaagctctctatgcagtataatctcaattaggtgtgcgcatgttgtatatttgtagaaatcgacattaaaataaatatatcaaatattaattataccttttagtttttgtattattttatatagctgccatagtttcttaaatgtatgatataataatgtgtaagatgaaaatttcgttataaaggatgaagtgataaacctagcttatagagtaaatattaaaccttaaccgtttcagttcctataaacataggcatttaatacgttataacagtaaaattttagagctaggggaaatcataagagattgtcttcacacatgcctctgttttacaaatgcagaaactaaacagtagataggctagctgacttggccaaggccccgggttagtcgcagacctgggatggggccaggtttagcacagtgttttgcccttcctcccacactgatagtgccttgtatggaggtagaacagaaagccctgctctttagggaaagtttcactaacttttcaaaacatgagtatgtgataattataattaaggactatcacaaatgaagtgtaaatttataaatgtaaccatctaataaagcttcggttaaaattaatattggggcaagtttatttttgaattttttaaagatagaaagaaacaacaacaaacccttgagtttccagaagaactgcctgtattcattcatttaacatactaaaagcagcttgtgactgccataaagtatgtcattgccgccttcagtactaaaaaagtggtccagtatatgaggcaactgctctaaatcatgcttgtttggacaggctgtttcttagttccacctcatctgcactttagccccactctgtgctgtgtagacccaagcgatttgcacaaacaccacatgatcccaaaggtactttcccagggagaaggaaaaaaaacataaaagttaaactaacccttgtaagttctagttaccacttaatctttctatggtttgactacctttctttttttttttttttttttagttttttaaacacttcaagtcataactcctcagtatttaatatttagatttttttccccttattctattcccccagagttaatctcttctccccactttcgttcaatatctattatgtgccaggcaccatcttcagtgtcaggaatacagaaataagcaaaacatgttctcttccttcaagaagcgaattttttttttttttttttttttttttttgttgagacagagtctcgctctgtcacccaggctggagtgcagtgacacaatctcggctcactgtaacctctgcctcctggattcaagtgattctcctgcctcagcctcctgagtagctgggacaacaggcgcatgtcaccatacctggctaatttttgtattttcagtggagacaggatttcactatgttggccagggctggtcttaaactcttgacctcaggtgatcatcctgcctctgcctctcaaagtgctggaattacaggcatgagccaccgctcccggtcaagatgcgaattatttagaggagcagctagacagataagctaatgatggcaataaaatgtgcttggtagaataaggagatcaatggtgctatgctcatggcacctattactctaggagtaacaatcagggcacttaacacaagtgcctggttctacattcccacctcttcctgcaacacgctatatctataagatgataagatgagcccaatggaagccctacaaatcctgatccctactctaggtcaag

SEQ ID NO: 46797 - DNA, 5635 bp, Homo sapiens
gcctctcatacccaggcataagtcattcattgtgcaaagggtatgagactaccatgattagcttagatcaattaagataggcttttatgagactgcagaggggtctatcttccctcagataacatgttgaaggataaacatatctgagattttgttagtatggaaaaagcagtgtaaggcaaatagtttcagggaaattatactcaaactaaaaattcagtgtaaaataaatacaacaactttactacccacaagttttggtatgatgcttagaatctgatctaaaatccactcactctattctttcagcaaacattctttgatcacttattacacgttgggcactgttctccgtactaaagcagagaacaagacagatacgtatttgtattgggaatgctttcagcagcaactgacagaataggaaattaaaagtggccaaaccatagggacattcagtgtttgcccagagaaatttagagggaggcaatccctagtccatctcctctgaaatataaccaagagtccaggttctttcttctctgggtccttaacgtgctgacttttgtctttattcttttcacttcattgttccatagctgtcatagttctaaatacctcatctactttcaaacgagaaagaaatggtaaaggacacttttttcttattattgtcccttttgcaaagatttaaaaacctccagaagcctcctatgcagattgccatgaaatctcattggcaggattgtgtgccacactggtcttctcaaaagcaaaggagtctaggaaggtaattatccaacaaagtgttatggagccacacacactgctgccccagataaaatggggatttttttttttataaggggagccatggataatggttacccaattacaatgtttgccgtagtccccttttcctggaattaattctctggccacttcttggaaaagtaataataaattaggagtacttttcatactctagttttaaaattatgtgtgaggaatttgtagtggttcttaatgttgtttttgcacattcaactagaaaagcaattggccaggtgtggtagctcacacctgtaatcccagcactttgagaggccaaggcaggtggatcatctgaggtcaggaattggagaccagcctgaccaagatggtgaaaccccgtctctactaaaaatacaaaaattagctgggtgtggaggcgggtgcctgtaatcccagctgctcgcggggctgaggcaggagaattgcttaaacctaggaggcagaggtgtccgtgagctgagatcctaccattgcactccagcctgggcaacagagcgagacttcatctcaaaaaaaaaaaaaaaaaaaaaaaaaacactggaaaacagacattttgcctttattccaatgtggctttagaatttttcataaggaatatgtattaagatattacttatataaatacaaatgaataatatataaaataattagcgaaaaatctgttaaagactaataatctgtgttcttctgcccacatcatttggtccctggtcctgttcttgctcaatgtttgcaaagaaccaaaggcacactacaaataagtagaaatctctgttgtgctctgacccttgatctgttctgtgatcactgttccctttggcttttttttgttttgttttgttttgaaacacagactcactttgtcactcaggctggaatacagtggcacaatctcggctcactgcaacctctgcctcccgggttcaagtgatcctcctgcctcagatccctgaacagctgggactacagccatgcaccaccatgccaagctaatttttgtatttttagtggagatggggtttcaccatgttggtcaggctggtcttgaactcctgaccccaagtgtccgcccacctcggcctcccgaagtgctggaattacgggcatgagccaccgcacccagccctctttgacgttttatcatatattttttcatttggaagtgacttttctgtaagttgtcacaacaatgaaatgtctattgacttctaagcaaaccctcaaatcattaaaccttgtcattaaccactctatgtccccagtgttgttgtggtttgttaagtaaagaacttctgttgaacaagtgctttttgtttgtttgtttgtctgggtcttgctcagtcacctagagtacagtggtgcaatcacagctcactacagcctcaacctcctgggctccagtgatcctcccacttcagccttcctagtagctgggaccccaggcaccaggcaccacaccaagctaattttttttttattttatgtagtgacagggtctcaccatgttgcccaggctggtctcaaactcctggatgaaagggtacctcctaccttgacctcccaaagtgctagaattacaggcatgagccactgtgccgagccttgcttgtttgttttttgagacaaggtattactctgtcaccaaggctggagtacagtggcatgatcatagcttactgcaaccttgaactcctgccctcaaaccatcctcctgcctcagcctcctgagtagccaggactacaggcaagcatcaccatgcctggcttgagcaactgatatatatcatttatcttaatcacctttctaaaaagtttttttgtttgtttgtttgtttgtttgtttgttttgagacagaatttcgctttgtcacccaggctagcgtgcaatggtgagatctcagctcactgcaacctccgcctcccaggctcaagcaattctcctgcctcagcttcccgtgtagctgggattacaggcacccaccaccatgtccaactaattttgtatttttagtagggatggggtttcaccatgttggccagattggtctcaaacttctgacctcaggagacctgcctgcctcagcctcccaaagtgctgagattataggcgtgagccaccccacctggcctctaaaaaatattgataaatttacagaagttatttaaaatgttgaaaattgtaagcaacatagcaatcttgagttgacatgtataaagcatggtatttacttttttattgatttattaattcatattctcattttctccctcggtgctagaaagcaaagagctagtcaggcatgagaatgattaaaaacccttgtgagctaggaagagagaagaatctaaacaaaaacgaacctaaggaaaagaacaacaaattaggctttgtgaaatggaaggaagaaaggaaagggaaaggaagggaggcctagttcataatgtgttatatgatttagatttttacacaagtaagatattaaagaattacaagttaaccatctaaatgtaatactttccaaataacttagaagtaacatagtctgatttattctaagatgtgctatcatttatcttgaaaaattttcagtagaaaaatgatcataatttactggatttttcctacagtaaatcatttatttttatttattcttattggctctattgaaaactgtgtccctttattaccttgttgaaaatctaaaccatcaatagaacagcaaagcatattttaatgaagttaaaacctgttgcaaccctaagcaagtagaagattgaaaataagactttaatctgtacaccaggcaattctctaaacctgtcactaaattttttgaatccacctatccaaaaggtcagcaaaagtaaaggcttcattgcacaagttgataccagtactgtgccctttgccaagaatgcttgggaaaataaaggattccattgtttcaacagattgacctggcaacttagtccagaaatgttttctttagactaatttagcagaagagatgaataaagtcaaacaactgttttacggtagaagcacttcaaagtagtgcttgagagctctgaagtttgaatgatctagctttgaatcttgactccaccagctgtgagctcttagtaagtccatttaacttcttatgactcaatttttccatttgtaagttgggcatgagggcactcaaacatggcatactgctggctgtctcttaatactcattcttctcatctttcaaagcaacagaatcttagttcttagcaggacacacaggtgagtggaaaaaaatctcttttacaactaggtgtggccatctgagttttgggatatatgtggcaatggcatgtgctacttctgggaagtattcttaaagaaaggggtaggacttcctcttccttcttcctacagctagaatatggacatgaaggcagaagctccaacagtttcctctgtggatgaggtgaccttggaattggaagctatatgtgccagaggtattagacagaaagagattgagtctctgccaccgtatcatatcaaccccaaactgactcttctggatttcttgaataggcaagagaaataaaccattgaccgaagccattgttttgggatatttatttctctgtctgccaaacctaattctaattaataatactaccacaaagaaaggttttaagaattaaatgagattatgtgctagctacatagtaagtgtgcaatacatcatgcttattattactattatattattattaaacaaggataatattatggtctaactattcagaaaaataaaatatatctggaaagtcttacctttcagaccagtggcattaaagaactataagggtgcctatcaaagaatagagtttctcctgagaagcaatttttgatgtattagaataaattacctgcaataaagaaaagaggtcaaacagacctggaatagctcctaatccccatggtaaccacatattttcttacaccaagtgttgcctaatgttcttagtctgaaggactctgaattttaaaaagaaatttaaaatggaaaataaaggtatgcacacatgatgccccgtaaagtgaaaccatttaaatggtgaaagatctcctgatgataacctcaattaacaacaatagcactatgaacaaaagaaacaattttgtaaagggaaatacactctaaaaactcaaaacaaggaccttcactatctatcaacacacacacacatgcacacacacaatcacatacacacacatatatatgacttttatatcagaaattgtcaataatgatctataattccacaatatgtatcacagacactgatggagaattaaaaattaaggagcagccttcctctgcttccaaacacagactatgtccaaaatcatgtcaaaaatgtctctactagcgcaacccaatagtttttaaaagaatccattgacacataaaatctcagtagggccaagcttggtggctcacgcctgcaatcccaacactttgggagtccaggcaagtggatcacctgaggtcaggagttcaagacgagcctggccagcatggtgaaaccccatctctactaaaaatacaaaattagccaggtgtggtggcaggcgcctgtaatcccagctactcaggaagctaaggcaagagaattgcttaaacccgggaggcggaggttgctgtgagcccagatagtaccatatcgcactccagcctgggcaacacagtgagactccgtctccaaaaaaaaaaaaaaaaaaaatctcagtaggtttctagactatcccttt

SEQ ID NO: 46798 - DNA, 1809 bp, Homo sapiens
aaaggcaagaataaattttataattgattaactaaaaaattatcattttggacatccccagggcaaacaaaggagtagcaatggaatccaacagaggtaaaggataacaaccatagtccacctaatcagaattccttctttgaggttgagactgaaaaagagggtgggggcaatgtaggtatcagtcagtattttacagaaaaagaaatgtaatgctcagtgatgttaaataggttgtccaaggtcacacagcccaaccaggatttaactctaggtctctttacagctaaggttctttctagcaagccattcagccttcacagtgtactaacaacagagaggacaaaagcagaattttgcctttaatacttgcaataataatgcaataatcataaatgtacctgggaagttgctgaaaagatagaaaataactcagtattgaaaaatgcacattaggagatttatattcaaagaaaaggtaactcttgaagactgttttggaagtcagtatctttcagattttagaaaaaaaagcaggatacatatgccatatattatactttcagcaggatctgggtagcaccctcttaaccatattaatatcactgtagtaaagcatgtgcatattcacactaagtgagataaataaagactacaggccgggcacagtggctcacgcctgtaatcccaacactttgagaggccaaggcgggcagatcgcctgaagttcaagaccagcctggccaacatggtgaaaccccatctctactaaaatacaaaaattagctgggcatgatggtgggtgcctgtaatcccagctactcagaaggctgtggcgggagaatcactgaaacctgggaggcagaggttgcagtgagccgagatcacaccattgcactccagcctgggtgacaaaggcgaaactctgtctcaaaaaaaaaaagactacaaaggtgcatatcagttcagtacagtttcagtgctaaatgagttcaggtcaagtcaggtcaggttttgaattttgaaaacacttcctcttttcatagctttttggatttcataatttcaggtaagggatgtgaaactgtactatgtcctgtcttaccaggtgagggaaatactaatgataaactgactgattgatttaccagaactgactttccactaataagggtaaagacaccacatatgccaagtttgttccatatacttggcacaagcttatttcctgttttgtgactcaattacagcccattatgtgactcaattgaattaaaaagtaggacatgaaaatgaaatacaggtcagtctactaaaatccagaaaaggtattaagcaattcatgtgtgacagttctaattcaatgttaaaactatagttaacttcctactattacacttgacttgcaaataaaccaataagaaaattagaaagcaatatagaattttagctcctgaaattcaatcatcaatttatcaataaaaaccattctgttcagattaaagacatttgctaccaccatactttattttgacaaatggacttgaaatagacattcaacacattaaaattcagtagataataatttttaccctgtaactgtataaacctgtagactgatttaatgtatcatctacctataatttttcgaggagcctcaatgcctgaatccaacatattttaaaactacacataaatttgcgagaacataattatcaaacaaaaactaaccactggatctcttgcatattacacactgctgttgcattgatacttttctctcctctgtatgcatcctttttttaactt

SEQ ID NO: 46799 - DNA, 2036 bp, Homo sapiens
cctgcactttctgaccctcccaggacttgagttgccttgtctggtatccttatgcagaatgaactgaaataatcatcaatctgaaaagctactcttaaacaggtaattctaacttaatctacttgtatattttatggaacacctagggacagactgttagaacaatgggaatcttataaaaatatattaatctaattctcttattttacaaatggaataattcatagagagttctgatctgttcaagggcacacactcatttagtggcagagcccagactagaacccaagtaatctgtctccctctccagtgctttttcccacaggctttgccagatactgtttcatgtcttggattacattggtagaaccttttgttaatacataggtgaatccttgtcttccagattaggctcttgaatttccttatcccaactctatatttatgttttctgattttatggaatgtcatattcctttttctccaaagtattttaagggctacaatatatggcaaattttaactgttgtttctgttacttatttgaatttagatgaattatttgtatagttataaagataagatgtccagaaaccatattcatgatgtaaatgagatcaccttgtatctgctaaaaacattctagttaaacagaagataaacaataaataagtagtccctgcaggagataatttcatcaggggaccctagttacaattcaggtgaaacagaccaaatgccagagctctttatcaccctcgccaagactgtatccatgacaagctttagtaagcaaagagagcaataggaagcactttctttttgaggtagaaaagggctctataagttgaatattccccaaattacattatttgtattagttaaaagaacacaatagtgtagcagccagaaaacaaatatttgctcataagtttttatcatttttttccaactggacctggggattcctattgctcatatgtttactcacagctgatactctttcaacaataggggagataccatattactgttttctaccatggaagattcagtgcaatgggttcattttaattaccatgtaaagtgactcagactttgaggtcgtgaaatgatcccctttataagactaaatcacttttttttttttttttttttgagacagagtctcactctgtcaaccaggctggagtgcagcagcacgatctcagctaactgcaacctctgcctcccaggttcaagcgattctcctgccacagcctccggagtagctgggactacaggcatgtgccaccacgctgatctaatttttgtatttttagcagacatggggtttcaccttttttggccaggctggtctcaaactcctgacctcaagtgacctgcccacctcagcctcctaaagtgttgaaattacaggcacgagccatagtacccagccgaatcactcttttatttttttttacatcactcttacgagtcatcaaaaacaactataaagtaagtgtctaggatgtttatttcactattatgtactttctcaggcattatacacaatatgatgtctataaatgaaggcgggcagatcacttgaggtcaggagttcgagactagcctggccaacatggcaaaaccctgtctctactagaaaacacaaaaattagccaggcatgatggggcatgcctgtagtcccagctactcgggaggtttgaacccgggaggttgcagtgagccatgatcgtgccactgcactctagcctgggcaacagagtgagactccatctcaaaaataaataaataaataaataaataaaagaaattctgcaaggtggtaagttattgcagaaaaataaaaccagttccatgtcaatctactataagcccactcagatctaagacatcttatttgcctagagcaagcttatccatgcatgtggcccaggacactttcaatatggcccaacacaaattcataaactcttttaaaattataagactttttttgcgatttttttaagctcatcagctatcgtta

SEQ ID NO: 46800 - DNA, 1939 bp, Homo sapiens
atgtaagggcatccatgatgttatgcacttcttcaaaatgatttcaagtttatctttctttattagggcactgcttccacatgagctcattgttgttccctgctgcaccttatatatgtatttctaccttcatgtcttgactcaggcagtttcttttatctgagagtccttattgaatatacaaatacctgagcagtcctcataatggatactcaacacatgttggaactggcttggattgcctttcttctacagtgagtcttcctcagaattagtctgctttgaagtgctatagcagttactttatgtgcacattttaaacagagcacatgttctcttctgaattgcttgtgtctatgttcaatctttcctcctagatttataaactctttaaagacatgccatatatcttacagattctcgtatcaccacagtaacccacagaccttgcatagaatattgaccaataagtgccgagtgaataaggacctaacaaatagtcatctactatttgatgggtctttcctttctcctcttcttatgttgtagatatctcaaaagcttttcaaaatgtagagggtataaataatatctaatgtgctttatactgtgtccacagtattataaaataatattttcacttttctagatctgcatgatacttcccatacattaactatttaagtttcggtgacaactcttccattttaaccaagaaaactgagactctgagaacttaagtaaccatgtccaaggtcacgtaatgagacagtgatgtttctggaattcgaaaagggctctttcacatacattgcatggtctcttgggaagttagagcttagacagtgacgataacagtgatgagctcacctgacagattgctctttttcctctgcagagacttgcttcaacaccaggaagaacatgaaagggtgactcataattcccagcagcagtgccagttcatgtgctgggattctgaccacaagcctaacaatcaggtcagggagtcagatttctgttggatttagaaaagcatctatgtgtttatgaaagaaacccactggatttttaatagttctgcagctcttggaggctctacatctaccctttctccccagccaagagcatggctatgggagaaggaaggcaggcagcaggcaggtaagtgtgacttcctcacttcccctaccttctcatcttaaagccatagagtggttgctgggtaacccactcctacatatattggttcataaagcctagtgagccactgaaattcttactgatctgtaaaatttcaaacacactagtaacacagacagccatggtgtagatgacttgagcacacatagtatattttctgctcccattgggctgtttgaagaatagcattggctgggcacagtggtgtgaacctgcagtcccagctactctggaggctgaggtgggagaatcgcttgagcccagcaattagaaatcagcctgggagacacagtgaatctctgtctttttttttttttaaggccgggtacagtggttcatgcctataatcctaatactttgggaggccaaggtggacagatcgcctgagcccaggtgttcaaggccagcctgggcaacatggtgaaacctcatctctacaaaaaatataacaaaacaaattagccagccatgaaaaactagccaggcatggcggcatgcatggtggtgtgcgcctgtcatcccagctactcaggaggctgaagtgggaggattacctgagcacgggggaggtcaaggctgcagtgagccaagattgcaccactgtactccagcctgggggacagagtgagaccctgtctcaaaaaaaagcaaggtttaatatcaactttggtggcaccctccacagagtatttatactatagaatatgttttataaaaatatttgggaggccgaggc

SEQ ID NO: 46801 - DNA, 1309 bp, Homo sapiens
acacttcaactgggtaacatgtcaaatgaattagagaaagtgggaaaagagagaataagagtagtgatggggaattaaggttaaatagttttaaaattaaaattaaatatttgttaaattaaaattaaattaaatatttttagaaactaaagtgaaaggggcttccatggattcatgatgataaagtgaatgaattagaataatgttcttaaccattcttaagtttacaagtatttttaagagggtggggacagtagaagtatttcctggtcgaggcaaatgtggttcctggaccaatagcatcaacgtcccctgggaattgttagaatgcaaatcatcaggccctattccagacctagtgaaccagaaactgtgcagtggagccaggaatcctgatttaacaagctctacaggtgattctaaagcaggataaagaggaaaaaccatattagtaacacctgggagatttcaacaccaatgcccaggcccaggctcagatcaattaaatcagaatttctggaaacagggttttggcatcaatatggttctcaacgctcccagtagagaaccattgccttagagcgtaccttttcaccccagagaaaaaagccaactggctgagtgccaaaactaaccctcactcaatgaattagttgaattctgcatttgtttgttttacttctttttacaatgaaagtttttcctaaaagaagtgtgaaaccacaagctgagtacaatcagtcaaggttgattaattccacttaaaccattaacacccttgtcagcagatcagaaccctgaggaaatagggaccctacagtttaatttgtgtttacatggcaagggggaaggagggtgactatcctaacccgtagggcacaatgaggacacctcaaccgccaagaatctggcgaaagggccacggccgtagtgagagagaagttggggagaatcctaccaatggaatacaggcaggcccagacaggagtttaaaagaacagaaaagaggatgtagtgtcacagacaaatttcacttgcatcagtcagagtttacctgaggccagtcttgtatagccaaatggagattagtaagaaagaaagataaattatctctgaaattattttgcaaaatagtgggaaaattttttaaatttgctgacattaaatgtacatgcaaatttttagcaaggttgtgcctaatcaccaccatgaaaacttctttggaatatgagccttggtgtttaccagtagggaaatgacaggttgttcaaaaggaaatgtttcccaagttctggttggaagctggcat

SEQ ID NO: 46802 - DNA, 1258 bp, Homo sapiens
gccacaaagcctaatttttgaaattaagttcaatagaaataaagttaccctgtcaaatcgctgtaaaagtttttaaatgcttgctctcagtttctatgcttatctcctctcagaccagtaacagttcatagattggcaccagttcacagactacacttagagtagcattagtctggggaacaacatctcttgaagtagccatcagaatgaaaaggaagggcagattttcagtaaagtattgcataatcatattttatgattcacttttactaaactcatggaaggatgaaatataagcccaaatgccagtgcctttgtaatggaataattcctttacaggatcagaacacgtaggaagccaaattaataattgaaagcttgtttgtttagcaaagaaccagagcataagaaagtaaataaccttaagggatatttcaaggccatgagtacagcctaacagagtgatggaagcagggactcttgcagttaagccactggaatttgaattccagctgcatcacataatacttgtatgaccctaagctttctgaggctgcatgtcctgatttttataatgggagtaatatcaatctggagagatttatgaaaggtttaatatagtgcttaatacccaacacatagtaagcactcaataaatgtcagtcaatgttattaatactatcctataataaggtatatttctacaacaaccagcacattcagtacagattcaatgcctcttccctagacagtgcctgataaacactgacaaccttcatatctttagacctttctattctgtgtacccagtcatcatcttccttctgttctcacaatcttcctctgggcagataaaataaaattgattttgtttccgcttacaatcacattccagggcacttacaatcacaacccaggtgacttaggttatacccaagtcaccttgggttttagatgtttccaaacgtttagaggtgatttcttggtttatagccacaaacatgatacataaacaactttaatttcccagggagcttctcactggttgggcattatattctcacatttgatggcaaacaaatacacattgaaagtaaattataatcagatcaactatccaagaacatggaatcagaacgaaagtgattataaagtttttgacagctgctgtcaggttaggataacctggtgcttctatctctgctgcagagagtacaataaggctacagacctatcggtgcaacctctttgagcattt

SEQ ID NO: 46803 - DNA, 2976 bp, Homo sapiens
ctgcaaagaaaacttagaaaaactgggaataggatgccctaatagaattttatgtgggaaagtaatatgatagtatgcaaataaatagtggttgagtatttactatgtgcattaatatgtctgaggattaaagaaatacattataggacaactatatttaatggtggctcacgcctgtaatcccagcactttgggaggccaaggcaggcggatcatttgaggtcaggagttcgagaccagcctggccaacatgcagaaaccccatctctactaaaaatacaaaaattagccgggtgtggtggcaggtgcctggtaatcctagctgcttgggaggctgaggcaggagaatcacttgaacccgggagacggaggttgcagttaaccaagattgcaccattgcactccagcctgggtgacagagcgagactctgtctcaaaaaaaaaaaaaaagagagaaatttcaaaaggcttctatactcattttctcttatgttcagtatcttccagccatgaatggaactatagaaatacacgaagatagcaacgtttgttgaacatccctagttaaaaagcaactgtgttaggataagaaaaaagcatgactgttgtagcttttgttaaataaatgttattatgcttgcaggaaattgttcaacaacatttctccttatgtaaggcctgccccagtaatgctgcttaggtcactgtctgtctggattatctgcagcctaaatgccaactctgtaaattaaacctgtcaagtgacagctttgccatagcatgcatatccaacctttaaaatttatttatactccattccctttctctagccagattaaattctcctttcctaagctatttttgcctcagttcagactgtggcataattcaacatgttctaaacaatcacatggagactgtggccttcctgattttcaattcccaaatgatttttattcaggctatagaacagcaacagaaatttcaccaaatttgctaaaataagaagagtcttctcaaactagattcctccaggtaccagtaggcaaaacagtcatgagttatggatagattcataataagtcctttattcagtgccccaaggaaatggtgcctttcagcatgcaaatgaaaagtattctcttactaatcaatctgtccatcatttcttttttgtttttccttgagagagagggtctttggtctgttgccccagatggagtgcagtggcatgatcacagctcactgcagccctaacaactcctgggctcaagcaatcctcccacctcaacctccgagggagctacaactacaggaatgcaccatcatgcccagataatttttttttttttgtagagacagggtctgactgtgttgcccaggcggtatctgtcacatcttaatacacacactaagctcctacagaagtaaatactatattaagcggcagagttactaatgtgaatacacattctcatttgatttggagactacctagacaactttcaggtttatatttaaattgattacaattagacatgaaaaagggacagagaatgggcataatagagatcgattcaagagaattgtttcttaaaatagactttaaaaaaaaaagttgttcaaaactgccttaatcaattttacagagaaaatattacctcaaatggtttgatatgatgacttgataagatgttacttctgatccagcaggattcatttattaatataaatatttacatctgtagtaccctcctaggtgggtgactgtttctatatgtctgactcaacaaaacacagtagcccacaggcagctattggcctttggactttgtccttaggccagattccttaaaaggcttgttgtgacaagcttatttgctcattggaaatttctgtgtctaaatttcccacagaaattaggatgtagctctgctacagcattttgattattcatcaaaacttactcaaaagacttttgataaatctttaaatcaatgtcttaaggaagaaaattaagtcactttttaatatagagcatgttttagttttgaacaatatttaagcactgcaaattatatgttcatagagatttaagcataggcataccttggagatattgcaagttcagctccagaccaccacaataaaacaggtattacaataaaggaagccacatgcattttttggtttcccatttacactacattgttgtctgttaaatgtgcatagcactatgtctaaaaaatgtacatacctgttttgtcccactgaacccatagctggagttgccttaaaagcagcagcaggagaattcgtacaacagagtaccccaaaccatttgaagacagggctggtttgagatttcaaagaaagcagctctaaatgccagagtgatcagtccaaaacatttattaaaggaacttgcagggtgttgcaatgtattattgtgatggacagcaagagaaaagggatgttttacccacattagtctgtagccagggggtgaggggatggagtttacatgaaaatttaaggaattcggctcagggtcggggtcagtttctttccagtaaaccaagacattattatcagtgcctgggaatgttcaagctggtttgggttcaagccagctgaggaaaacctatggctacagctggctgggtcactgtgattttggtcaagacacagaaaggaagtggggaaaacgggtaccctagaataccttaatttaaaaatacttttgctaaaaaatgctaacagtcatctgagccttcagcaagtcataatctttgctgttggagaatcctgcctcagtgatgatggcagctgactgatcagggaggtagttgctgaaggttaaggtggctgtggcaatttcttgaaataagacaatggagtttgctgcattgatgactccacaaaaaatttctctgtagcaggcagtgctgtttgatagtattttacacacaagag

SEQ ID NO: 46804 - DNA, 6263 bp, Homo sapiens
ccatctcaaataaatacataaaataaaatgcatcgtttctctcaacagcaaaagccttattttttcatcctttaaatatgttactttcatagtaggataagatggtaccttgtctgagaggctaagacccccaggccacttgagaatttgagagcttttagaacttgatgagcatagctgactggatacttcgtgtcagcactgcttgtggtaattacaggatctgtggatcacaaggctcacaacttgtatcacaagttctacaagaaaattggctaacacatatttggctctgttaatcatttgctgagtttatatcttgtcccaccaaatgtattttttgaaatgccattacatgaaaaagtttcactattccaattatctgtgtttaccaacttgtggagtaagagtggctgactgaatatgtgctttttaactacactattatatacattggccaagctttttatattaaccctacccatgaagtatcaccaatatttcccccagtgtgaaattgacatttgtcaaaagccttttgccatataaaagtttttagttcttatatatgaaatctgtccctttttttcgacatgagttccccagcctgcttagctttgcccctaccacccaagatttttaagctttctatattttcttagaatttaagattttaaagtctttacttttttaaatcatttatttgtaaagggacatatttctcaagtgtgctagttttccttgattttaatggattaaaatgtgtcgtaggtgagccattttcttccaaatgacgaagagtttttgttcctttgaaagtctggcccaggattttgtttgtttttgtttttttaaagttcttattttacttacagagttaagaaagttgaataactatacaaccagtctctaaatagaagttctaataaatcctaagatgttgcagggcactgaaagaggacaaaatttgatccctaaagccctctccaatctcatactcggtgaaaataacaaacaaaaggcttcagtgttagtggaaaactgagttcttaaaaagcaggtaaaggtcctgtttggtccttctccagagctgaggagaaagggttttcagattataaataacagaggtgcccttgtatggcacagaattgcgataagactttacttcttaggggcttaaataatgaagtcagtaaaagaggactgaaaacgaacataaagaagagctttagctttgacgcaaagaattacatcagtgcttgacaaaaccgaggattcttaatttctaaaaacgctttctttaagcacttcctaacctttcattatctgagacaacatatcaagtgagcagcagtacaaaggatgcatgtgatttcgaaatgccacaattgagccaactgcagttgcacgcgtacgtagtatagagaggtgtgatcaaaaaaagaatatagggagcatagggcttcgtctgcatcaaaagatactctccccatcttctatagccttaagttttgcgaaggtaagtttctccccgcttgaaagcgcccccagggacaagaattcatcttgaccaagcctaaggccgtggcatgcaaggtgttgagtcaccgggtacagcggtcttgcgacataaatattatttgatgacgaaggtactcggggcccaggtgccaaggtaaaccactggcaaagatgaccgtggttaaggcagtagaaagcaggctcgacactgagacgcggttccagccctagaaggattgcattttacgattcaggcaaacttcgagtctcctcatgtgacatgtgtgcactcctggaccgttttaattatgagaaacgtggtttgcagcatgattccttccagtcgataaatcggaatctctctcgctcccaccccttcttaacttcaggcttcctgcatcccggagcactcccggcagccccttccctcccccgccccggggatgctccgactcggcgcttagccattcatcaaccggttcacaccggcggcggccgccgcggagtgacgtccggagggggcgggcctccgcccccgcctgtcggctcctggcccgcggttccaggccgcgattggtggctggagggttgcacgtcgcgccggctataaaggggagggcttgtgacgcaagggcgcctcggcgcgtgtattggctccttcggctgcgggccggctcggctacgcgctctgctccgagccgctcactgcatggtagagtctggtgcccccgccgccgcctgcatcgccgccaccgccgctccgccacgaccaccgccgcctcctgccctgcagccaccgccaccgcctgtgtcgccgccgcctcgggaccggctgtatgattaggccacaatcttcaatgagtaaacatattcctgtgagtagccgtcgcatcgtcgcctctcgggctgggaatccacgaccggccccccatccccgctgtcgcctttgttcggagcccggcgtctcctccaggttgccccgggttgcggttccggtgggtcccgggtgggagcgggcgggttatggccctgtggccggccgattgcggccggctgtgcggaggcagatgccgggcccctcggggctgcggggtggcggttggccgccggaggcaccggcttttgagtccctcccgagcccggagcgacgggggcggcgcggtccggcttctgcggcggccgggggcagtttcggcttccgcagcgggccgggtgggtggcacaaaagccgctttgtgaccgccgcctccgcccttggccctttggtctggcgcgacccgtccgggcatggcaggctccgcggcgtcccggggcctctttgttcggccggaggagagtggctgcactgggagcgggagacgtggcccggggtggggcgagggctgcgcgtgtcactgcggagccggatacggggagggcgcggcggtggcgggttcgcctccagatccgggcgggcgtggggtaggccggacagccaggcacgggtggtaacgatctggttccagagcttctcggagctccggggtgggcgcgggacagccactgggtgcagctacactcttgtgctcgacggccgggacccgagcctcagacaaaatggcctcggcgcccgcgcctgactgaaggcgcggcgcgaacccgtgattgcggcgcggagagggggcgcagcgggcgtgctcgggcgcacacagccgcgtgcgcggggcggcggccctctggggcattccgcgagctgcacccctgcccgggccagagtggggttctgctaggtgagaacttcggccgtccgccccgccctcctcccaggctccacctggtaattcgagctgttccggatttatcgccccacctcgggctcgtgataatgggaacaagtctagtcttgtcctttctctgggccagtcgtcgagaaatggcctggttcggagcgtcttggaaactgacagggctactgttagttacactgacgcgaaggacttcccgtccgggcaccagcatacatttcccctgccaattttggaagggccctggatggcgccttttaatcggggactgtttagaactatccctgagctctgtggtgtaatatgttgttgcctcctgttggtttgtggcagcagtagccaaccagagacggaattctgagggttttttatcttctgtccgcggagccccctaccagtccacgagtattaagttatttacactacgattggaactgttgacctgcccgacatctagatcctgaggcagtgcttcctgttactcagtcagttgaaaactagaaaactaaatcattcccaagagtgagcagcattttacacatgctttcttaggtgccctaagacctaaatagatgtggaacagactatacaacgaattgtttgtgacaaaggagttacacacattaattggcttgactctgcagtataataatgatttaagcttctgcacagagattactctttcctcctctcccttcttgtatatgattgtgattataatgcaactgataggtgggagggaaaaaatccccattatggatagtttttcctgtgggtaggagattgggaatggaggagtgtcttgggcggaacagaaatctatcggtggccaccactgctttaacagacgagtccccccatccactaggtggctccactcagtaaaaataaccatttcaggaagggaattcttaatatagttctttctctgcttcctgatgaaagtgcttacttacatgaagggatatggccagactaggttgtagccgacaggagttttagctattaaatatggaaatagtggtgtgaaatactgcctcaaattagcttttaattgaaaaaaaggtaatacctagaaattagaatactgtgatgagtcattataaagcttttaaagatcattgtatgtcattgggaaagtgtcagaatacactttttattctacggaggttgtatttagaatttggggtgaaagtataatgaaattattttcagattactacaatctgtattcactgtaactgtgatggctttgtaatttagacacttaattttttaacccagctgaccaactaggtgaagtaacctctgagggcttgtttgaacaaacttgtgataatgaaagttaccttttttatgggaccttttgataaatgattgttaatgctagttgtatgttttaccagaaaagtagactgggtttttgacttgatgttttctgcagtaatcatcataagaattattcttcaaaatttagcaaagttctagaaactataactagcatgggactatttaaaggtgtaaaatggaaatgggagcagatcgtttgaattttaattttaagacttcaaatgcttaaatttaagcatggaaactaatggaaccttttgttaaaacactttggtaatgagagtacacatgaagtgcttgaggcagtgactatgaattactgctcttgttaacctgttattaatactttccttagtgccctctttactcccgagtacacaagtaccttataaactatttggaagaagactgattattaacatcagtgtcttccatgtacatattttaaaaatatgctgtgactattggtttaatgtttgatattggcataaaaatggtttagttcttaagggggaacttagagaaaatataaatacattcatatttgtttatatttattggttacagtagttaccttgcttttgagacctgccacttccaccttcaacatccctttgtccgccttctctgagttggatttcagttttgagttgtatatgtgaaattttggttttaaaatacaaaagaacattattaaaattatgaatattttctttacagttataaatgagagttgtttcctttttagattcataagcatacattcttatgatatttcacataacaagttgattttcagagactcattttcctcgtcttcagtttaatgggaatgataacagattgttaaggataaagtgagattctaaatataggacttaaatcagtctaagaaaaggatataaaagcataaagttggaaaagaacttagatgtttcagtttatgagttaagtaaattatgcaagactaataacttcagagttatctggagtttgtattaatgtgtaaaaatgtttttgttagttggaaaaatcaacataaagtgtatgtaattacaatgtaaagaaaacaactatcgaaagggataattattagaatcatataattatatattatatatagatagtatatatacagagaatataactagatagaatatatatgaatatatatatgaatttcacaaaaatgtaacaatgggtttggtttttttttctgaggaatcttggtaatagatcatggatttcagtttaatctatctgactgcttgttttatgctgattgatttaatctgtactcaccccttgagttttgcaattcaagtaaaagtcgatgaagcggctcaggccctgctttagaaaaatagttgtgtacttaaatagtgtaaaaccctaatgtatttcttttgaattggaaaataacttattctctctttctgtctttttcttttaaacagcaattctgtggtgttcttggtcacacatttatggagtttctgaagggcagtggagattactgccaggcacagcacgacctctatgcagacaagtgaactgtagaaactgattactgctccaccaagaagcccccataagagtggttatcct

SEQ ID NO: 46805 - DNA, 826 bp, Homo sapiens
atacagcatccatataaattttcatttgtttccatttttaattgacttaactctgctagatccttatctgacaataacttttgttattatttgagcagttctcaaacatcactttcattgactttgtcagtctaaacaacagagagaggctctctaaaagaaaaggtacttatttgggaatagggcattgcagtgagattattcatgccagagtaaactatgtgcatattcagggaggtaaaggaacacaaaggtttttaagaaaagaatgaggatgacataattgttttcaaataattatctttggctgcaaagatcaataacaagggtgacgtcagtccaggattggatagtcagttgctgggcagatgtccttgcaaaagaatttgttgtgtaaggttgcaatggcctttgtgcaaggttggtttttgtagtctttgtgatagtctttgttatcaagcataaaagcatgagaaccctctcttcatggcctttcctggctctagagttttgttgctgtttttgttgttctgacgttaatgattgcattttgattctgacaactttcacaacttcataaaattcagcaacttaaattccagtttcacttgtttacattgtgttattggctacattcattggcaagaagaccaataaataggtttggatatactggacactactagtgctaaaataaagaccattttacaagtggacgtgcactagaacttcattaacataggaactcaaaacaatgaatatacagctaaaagcccctagattgaaggaataagcaacagagttcaactagatcaaatgggacttg

SEQ ID NO: 46806 - DNA, 1454 bp, Homo sapiens
ccagtaactaaggaatagagaatagctgttgtattattattcctagatttagtcaaataacttgtttaaactctggtaactcttagtgatgttagatgatgaaaatcaagtgggaaatttagtcatatttccatctattccatcggtcatgcttgaatgagataatttggatgaataaatcttgattgccaatccctcagcatttctaccttcttccttatacagaacactgatttgctcaggcactgtgaaatattaagagaatgaatcatgtttgatccaagcagtggttctcaaccctggctgcacattataatctctgcgaaagcattttacaaatattgagccacagcaccaccccaaaacaattcgatcagaatcgttgcaagttgggtgcgggtgcaaatacgttttaaaatgttccctgttgtgcagccaaggacaggaccacaagtctgagccaatcatggcaatttagctcctttatcagtgaccaggggaagatgcctgatctgacctaggagacttagaggggaattctgttagaggcttctggtaaaaacaacattctttcctgaaacaagagaagattgtatggagaaagacttgtaagtacccgtgcgcttgcttgctgcttggagcaacgtcaggtgagtagggaacgctcggttgtggtggccatttgcaactatcagggaagacacctgaagcaataaagacagccgagcacgaagatcgaagagttccaagagacactgtaatgataatgagaataactaatttactataggaattaggacttacacgaatatgaaaagagttgcaaaagtgaaggtctggaagggagagtcagagaatcagagaaataggctgaagagtccactgaagcactgatgtgagtaacaaactgcagctggccgagaaatccaggaaatcaagcgtgaccagttgccaaagtgggactgcaaagagcgtattcatggagggtctcgaaattgccatctctggggaaaggttcgtctttgtgtagctatcgcctacaccctgggtcaggggctgttattgatcagccgaaccagcaggtggcaagagaggcaagacacagaatggagaacagcaggacaagctgggactcgcagcatctgtctctacctgtcgcccggtttcacagcaatgaccttttgagcacagtcgcttcagtttcattcacttttcaaatctcatacacattcctcttttgttcaattctaacctagaaccatatagggaagaggattctgggaaatgtagttcccatccttagccaagaaatgggataaacaagcaagttataatccttatggaaagtctaaatttcgtggttaaaaatcatcaataaagtcaagtttgagataataccagctgagtacttctcagaaccttgccgtctccattatttataaatgcaaatcaat

SEQ ID NO: 46807 - DNA, 2106 bp, Homo sapiens
taataaaaagtacctggggttggggagctgcgcatcaatattatattaactgtgaagccttagtgcttactacggtcgagaaaaagcgctcctctgattcgcccctcccggcggcgcggaggtgtgagctagaagcccgcaggcggtgccgcgtcctccgaagacagggaggggcgcggcaacgccgggaagcgctgcagcccggggccccacggaggcgcggcgctcgaggccctaaagcgcgcaggcgcggcagcgacgcaggccgcggcccccggaacggtaaacagtggggtcacgtgacacggcccctctccagctcccgcgccgccgccgcacgccgatggctgcggggtctcgcgccgtcgcaccgtccccacgcggcaagcgaccttcgggctcagggcggcggcggctgcaacgaggattaggagggcggcgcggaagccaagaatagtgtcgtcagcagcagccatttggtcccaggaggaaaagaggctgtggcagcgacgccgacgtcctgcgcgtaccccctctccgcggcacccaccgggccccctcctcctcctcttcggcggcggcagcgtccaccatcttcctcttgctgccagtggtagcgctcgtctggcggagctgggtgagttgcggctgtggccgcggccagggagacgggcaatcctcccctcccccatccccttccacacgcacagcgcctccgcgggcctctccgcccctcccgcggcggactctccgcgcttttctcccgcgcagccgagagatcgcctctcgggcctcttgcgcaacgtcctcggcctacctgggccgcgccgctggcgcctgtggaccatttggaccgcgggctggggagggagtcgcagcgacgcggtcgccaggcggagggtcgggaccacggcctctctcccgaccactggtacccagccgtctgctgcgagggcgccccgccgccgctgaggcgcgggcgcgcaggcccgaggcacggcgggcgctgcctggaaggcccgtctcgcaggcccccggatccggccgttggggcctcttccttctcagggagccccagcatggagctttgggccttggtttcgggaaactgggactggccctggctgctaggctgctccctgctgctgctttttggagatgagagttgctcttccatttatcctccagttaccgcgcgcttttgtgcccgggactcaaactgtggactccttttgcttagtttgaaatgagaagcctagactcttgccttccgataatacatgtaatttaatgaaccacttgtcgatacgtacgtgttaatggtgctaaataactgatcacctgacacggggggcgggggcggtgcggagagtagaaaggaagagaatgttgatatcgcgcacggagtcctgtgtccctcctttccctcaggatgtgttgccgggttaggtgacctttttccatctttgggcttttaaatgccaattcctagagactagattggggtggttattagtgctttccagtagtcacgcgtagaatatgttcatggattaatgttaagtggcaacactgctttaatattctagtcctaatctgcattacatgtagcgatatttaatttaaaaagaataatcgattattgaggcttctctaaatactaactttactatcttattttaagctaaatttaaaaaccaatgcagtaaactctgtagggagtacttaaacagtacgttgttgtatttagttactattttggggtcgaacttgtcttccctttgacaaaatgattgttaaaggcctaacaaaactacgcctccattattcatttttcgattcctgaatgaagtgtttggaactgtgaaaatatttgtagaaaaagatgtatgtttgtgttagagcgacatgttgagtcaaagcaccagaaacttttctattgtagcatacttatgtttttgaatttatagctcccttccacagcacaaaaaggtgttgtgtaaagattattgttattttaaatagtaattttaaagtttagttatcacttagaccttttccccactaatttttctcttcattcatctgtttactggctatatatta

SEQ ID NO: 46808 - DNA, 1334 bp, Homo sapiens
agttcttgcccagattgttgtttctggcacaatgggcttttactagctgttttcattgaagctaagcagggaaataatcctatatgtattccttagaccaatgaaagctatagactgtggctattttgtaaccttagtgctaaaattagctaccaaaataattgctacatcatcttttctgttatgatgaaccaggctggtttcggaccagtatttttgttgttgacatagtgatttggattgtatttcagctgtctcaaaaaatcatagttttagaaaattataaaaataagaaacatagaagattacgtttagtgctctgttggatacacaaaagttgggatgccagttgttttattttgagagaaagcagccagctttcttctttgaatgcttttgactgtgtcaagtattacttcatctaattgtagtgtttgcatatggtttttagatgtgcccattaatatatttttttaacctctagcaagtaagcaaaagagtattttcccaagtaacaggtttgagatagtgaatatactgtttatatataccacttgaggagtgtattcaaaatcactgaaatggtgtttactggcagtatcagtgttatgaagaaatgtttattttatctctcattttacaaacaaatgtgttccctttttacattgacagctaagctatgattcataagtgtggaacaatcttgtgtttacaatccatttcttaatatggtatattgaaaataaatgttcagtggctgtaagttgatatctttagtttttacaatatagttcaacattgttttaagaccaacaaaacagacatactgtagaaacatgagcctttcattcagatagcactcttatctgctactgtaggttactacttgcagctactgcatccttcagtgaaaccaagatgtcctttcaaggctgcattatggctagcaaaatcatcattcacttaattaaaaaaaaattctctagtatggtttttggaggttaagcaaattaaaaagtcattgaactcttacaggtatcccaaatatttgggaagagttgattcatattgtgtaattgagtattttttcaagtaaaggaaaacacctgcttacatcacatgttgctttcctatcataaatgacattgatattatatgacatcaagcagtgttgttcgatagaatttttacttgcactgctttcaagcaaagtgttgtaatacttgtaatatatgttaagactagttttacaattagtaaaactatcagtaatagtgtgatttagtcccttttttggcatatgaattttaaactttagtcatacctagtttgag

SEQ ID NO: 46809 - DNA, 825 bp, Homo sapiens
aaagctggctacctagatttctccaaatcatagacctagacctccttagcctccctggctgtccatttctcatttcctcagcctcctgtctgaccccagaaacactttctgtactccagactttatattattttcctagtctctgttgccatcatggatttgcttcccataggttgtaatttactgagtcatcatcttgactcagaatttttggccttggttttagttaggattacactcagctaacagtgatagaaaactccagataacagtggtataaagaaagaaattgcagtagctcagaaggaagtgactgagagctagtatggagtcgcacagtgccagggacccaagctccttctaccttgcgctattatgtgtgatgactaatttcacctttattgcataatttgagatggccccttcagctattagatattgattccactcaataaaaaaggggagggaaaggtaatatctccttcatttaaaattgtatcttgaaagttgtatgttcatttctactcacatcccattggccacaccttagtaacctcatctatcagtaaggtagattgaaaagtgtcattttttttatgggtaaccatgtacccagctaaaaaataggaattccagtaaatgagggagaatggctgaatggttattgggcaacagctagcagtttcaagtacaatttctatagttcagtctgtgaggaatctgagatcagtaccttttcctagttcattggtcatcctgggacccaggtttgactactaggctttttttcagagcacatcctgcctcacttgtcaaagacttcta

SEQ ID NO: 46810 - DNA, 1178 bp, Homo sapiens
actcgatgtagtgtatcatacctcagcctctttttggagtgaatctgttactcattcatgaaggaaagaactcttaccaacgggtggtcaagtagagactggtgatctcctgcgatgttagaggggtaaggtgtaggggctctgttaagaggaggtgttcacatattttcttactatacttaacacagcccctataaagtagatatctattctttattgttgtgatactgcacagatatgttcttttccccctcaagtctggtacttactgccaactttgtaatagaggaaataaccgacgtagaagtataatagttgagctaagtttgacctttgtgctgcctgcataattaacgcattccaaatgtgaagagtccctcctgttactgatttgtaattctccccctttgtatggtattaaagtgatttaaacaaatctctattgttgagcagtgcaataaatttaactctgaatggtttttattctctttatctcatttgtcccctttccaaaaagataggtttaaattacatagtctggagttaaaatagtatcaaggtcaggaggacttcacttaagcaagtttaattagggcaatttggggttgggatgggaggaatttgaatgtgatgtaaaatcaggctcgaagagatttctgagtatgatcatggattttatgccaaaatttcagaaccatttggggttaaatttattccatttctcaacagtagggattggtttaaatcactttaataccacacaaaaaggaaaattacaaggcaggactagtagggagtttttcacatttgttatgtgatgattatgctggcagcacaaaggtcaaactcagcttaactacttctagatcagttatttcctctgttataaagttggcattaagtttcagacttgggggtaaaaatgagaatggcacctagtacctagttctggaatataggtgggaagaaaaaacatactggaggtgcttctgttgttggggctcttgaatgttcagcatgagagctctggaaactctgaaggcaatgtagagcttgatttaatgtagaaatggatttttgagttgaaggaagtgtgttgtcaggaggagcaggagttcaaaaaaagatgcatgcttggaaatcttacctttgagaaacatctcaaatgcagtcttagt

SEQ ID NO: 46811 - DNA, 1129 bp, Homo sapiens
tggtcagatgtgtgatacattttgaagataaagctagcaggatatgccgatagcttggatgtgtcagatatggggagaggagctaaggacagttctagagttttagaattgaactaggtgatttggaggttccatttactctgaataccttgggaggaacagttttttgagggggagggaggattggtagaatcagtgtttatttttggtatgttaactttgaggtacttattagacaacttaatgaagatgtcagattacactcttctgaaggtctcatgagcttcgggctggagaagatacctatgggaatcattagagtatagatgggcctggataagatcaccttagggataagtgagtgtgaagggatgagtgagtatgagtgtagataaagaagaaagatggggggactgaactgttgtatccttcagtatgtagatgtctgcaggaagagaaggctttatcaaaggctgttgacaagtggctagggaaatgggaggatgtggtatcccagaagtgaagtgaaaaaaaaggagattcagaaagtggagaggaatcagctgtgtcagatgctgctaggaaatggaataatttaaaacctgataattgacctttggatttggcttgcgaaatcctgttgattctgctttgtaatacagctctaaaattcattacatgacttcactccctgtcaacaaacactattcatcaggctttccttctggtctgtttttctattttggatggttctttttttctcctgtttacattgtagaatacatgctcattatagaaaacttggaaaagtcagagaaagtataatgaaggttaaaaaacaacagcaatggcaaaattccttacaactaaatcactgattgaacagtctgttgtgtttttcctattaatgtttcttatgcatctttgtaatgcatatactatatatatatgcttttctacagaattaatgaaaagtagtcttaaaatttatgtatttaaaggagcatagtagacctgtaatctaatgtcaaaacttttttgaggctgggtgcagtggttcacacctgtaatcccagcactttgggaggccaaggcagacggatcacctgaggtcaggagttcgagacca

SEQ ID NO: 46812 - DNA, 3378 bp, Homo sapiens
ctcaggtgatccacccaccttggcctcccaaagtgctgggattacaggcgtgagtcaccgcgcctggccgagtccaacaatattttaagagcttcccatgtattaagttcgttattcctcacaacgctgtaaggaaatacactgttactatactcatttgataggttagaaaatagaggcacaaagacattaagtaacttgacacataatttgcacatggtggagactgattcatgtctacatcaccagtctctagagcctgctcccttgaccactatgatagctatttcctgtcaaggctgaggaaaaagcatgcaccaaacctctgagacaggaaagcacttggtggttaaggcactggaagaagagctgtaggagaaaagcacagagatagtgagagtggcctggttgtgttcagagatgcagactgggatctgatcctgaaggccctttgagaacatgataaggaggtttggattgcattctaagtgcagtaaaaagccacagatgggttttaaacaaggttcagacatgatctaataaaccttttaagaggctaactcttattacaatgtggataattaattgcaggcaggaaatcagtagggagaccagtcaggaagaggtcatgaggtttcagcatagggatggggaagagattcaaacaaattttggaggtagaatgaatagtactttacatgatagagtaccccatcctagcagacatggtgggagtctgaaataccacatttcatttggggtgtaggctcctttcagacatatgctgatacagaaaagagtgtttggtattaagagacagtcactgattgagttgaaaaaaacagaatatgttatttaccctagcaccgtagaaccactgacagctgagagaaaggtctttttctgttacaatatgttgatctcacagatgaaaacactgaactcagagaagttaggtgattaattgcttaactgttgattgcagacttaaaagtaaaacataggtaattttccttgacttagcacatgcataactagtttctacttaagagagacaaatgtaagttataagttgatttcccaccaattccagggcactagagtactttgttacaggctgagtactttcttaatttcttgctcctttaatttagaatggttttctttgagggcaacaaccatttccattttataacacatggaaaaatgagaatttcccttctctcttcagacatggaaacagaaagaaacagaggaaaggacaaatcaataaacttacttcccatgtgacttggtcaccttccctgtcctcatgtttgcctgtaggaattttttcttttgattatgaaaggtagctgatatggttaggttttgtgttcccacgcaaacctcatcttgaattgtaatccccataatccccaggtgtcaagggagagaccaggtggaggtaattaaatcatgggggtggttttcctcatgcgttctcgtgatagtgagtgagttctcaggagatctgatggttttataaggagaaattctcccctttactaggcacgtcttcctgctgccttgtgaagaaagtactctgcttcctcttccccttccaccatgcttgtaaatttccggaggcctccccagccatgctgaacagtgagtcaattaaacttctttcctttgtaaattacccagtctctggcagttctttacagcagcatgaaaactgactaatacagtagccctgatgcaaagtagagcttcagaaaggatcagggaactgctaagtactttggactacagcgaacatgctcaaggcagaaaacaggaggaggctgcatctaggcaaaggtcttttttttaccacagccaattagagtgtccctgaggaatctctaaagtattcttaaaggagcgaggcaagtcctagagggttcagttaatcttaccatggcctttctgtccagtaaaaaatatcaagttattttgcagtgctgagtggttgtttgccagctgaaacttcaggtggaattcataatggaagctgatgtctgagatccgtgaataagccaggaatgaggtgtatccaaaggcatctgtgccactgaaccttggctgagtaatattaatagctgtgaaaaaacccaaaccaaacagttaaaataaacctgtacatgtatttgtaaagtgagggttacgttttgctgatgcatctggccagatagtctgtttactattacattaattatactttagtgcccttcagcattgagcaactaagtgactcaacaggaaatttcaaaaccagaacaaaggaaatgcagtgttttgagatcttctatataatcctttcactagcatactctttctacataatggataatttacttaaaaagcaaacccctatattttgaaacttaattttagaaatagaaaagattactggcagccaaacaaagtatttactcaggtgcctcgtaaacatgatttggcatccaaaacctggatatgacttagagaggagctcacacctttgaacaaactgtgcttttctaatcctgcacctttatctgagccaaagccccaggtcagggctaggaaagtcaagaaataggaaggaaatcggtcagttttctatcatcattggtgagtgaccagagcttttctttaagtaaaaataattgtctaaaagaaatgttcattatttctttgctgagatgcttcttaagtaataaaaacatggaattcaattggtgtgaaagtgtagggagatttattaaaaacaggaaatggtaaaattagatgaagttcaagggccagtgtgaacaaaatagaatttaactgagggttgcttcttgtatcgaactcttctctttcattgtactgtttccttcataagtctccactggttttttaaatctccttacccaaagaggacaacagaaaatagaaaggggattttgacaccccattcctgtcttttatggatgatgtcaccagattaagggatgttcctaggatctatttttattggttggggacagctcggttgaggaaataagagcttatgttgtttccttctcaagagatgttggaactccagggaagctgtaaaattagaatttttacaagccttaagaaatatactcactctggtatgtaacacttaaaagagcttcttatgtctgtttataattgtgtatacagcaaataatttaggaaaaatgatgcttattatcaaaggcttgtatatctttgttttatatgactattaaactaagatatttgtgtgaataaactgaatactttgttttgatattttattaaaatcttatcagtttattatgactattaaactaagatatttgtgtgaagctgaatact

SEQ ID NO: 46813 - DNA, 672 bp, Homo sapiens
ccatagccctttgacattaaacctagaccccttctgggatgagagtctattatgggctgaattggaacctggatcctgattgctggcggataggtatcctggctatacaaatgccaatttacatgtatttaaaaattcacttgtctcagaattccatattctattctctattacatgtataggaatctctgctagcctgatattgattacatccctggatcatcattgttcatatttccctatagcctttacatatagtgttctactctttatatgcactttccccagaatcagaagtttagtctcccctaaagcccccagcttactgtgcatagtctgtttccatggctctgcttatcctacacatgactgctgtttagcaggcaatgtccaggcatgacctgtgatagtcaatccttagatttctgttaatgattcacccatttattcacacatgcattcacttatttgttcttctgtttatccatctaactgggagctttttatatgccaggtataacacagatcaaggtcagtttcttgatttgatactaaaaacatcaacaagcttttaatgctactaacaatctacaaaaatattcctaaattaacctacactaaaatgtaatttgaaaacatatcactgatgagattcaggtatctttctgcgtg

SEQ ID NO: 46814 - DNA, 362 bp, Homo sapiens
tccttatagtgacacataaagtaacggtgcaccttacaatcggtagcatatattcagtgaaatatgctatcacataggctgagaaatttgacttttaaagggaatttctttctctaaatattattgagaaccactgctgtgattcataaggtgttgtaacatgaactgaatgtttgttttcccctaaaattcgtatgttgaaatctaatccccagtgtgatatttgtaggtggagttttcaagagataactgagtcatgagggtgaatcccttataaataagattaatgcccttataagaagggtcacaatagagcttgcttcctctctctccctgctctttatcatatgagcatagaatga

SEQ ID NO: 46815 - DNA, 1400 bp, Homo sapiens
tatttctttcttcccccttctttcttgcctactaaactccctgctccttaaaactactccatgtgtgtccatgtcatttttttctaattcgacccaagaggaagaacctggggttctccactcatcggagtcgtatcagtattttggttagcagtccaaatagggaaagaaactgaaagatacttactatagtaaccgtataatacagtgtcctcaatctgtctgctgacattagcattagcccagtcctaggataaaaggaaacaatagaaatattaatgaaacacccatttgcctaacaattaaaagtcaagttttaatacgactgaatatcacttccaaaatctatccacccacataaaaacaatctatgtcttcaataagtgagagacagacaatagacaaatttcagtatgtaaatgctgagataagacaacacagttctgggaaaacacagacaaaaggcacctaactcagactgaagatgaggaatggcttctcaaaaatgactaaactgagacctgaaaggagggagaatgatctcagggaaacagaaaatagtaggaaggaaagagggagtaaagaacatacacagaacgtttgaaaaaagcttcaagaagctaaatatagattaaattgagcttttggaaaggtaagagaaaccaggtggagagagggaagagaaggacacatatgtcaggggcttgtgagtcatgctgagtactttggactttgtcctaagggcaatggaaaatagtgatgaattttatgcagagagcaacaaacctgattagtacttcagaaagaacatatttgagcatattatacatttttttaaaaacctacaggaaaaatcagtctaatctcctttgcattcatcccacacaagggttgttcgaattactaagcttagaaaatataattcaaattaatcttttccaatagaaaaaaaatctataccctattctgtcagaactaaggtacaatgtcaagcctttttggcctatactctaaattctgtgcatgtgaaaaattaaacgtggagaatctaaaggacttatcactgctattaagtataaagcaaaatttagaatccaggtcagtgttttataaacacttaaagagctcaagtcagtgtcaacattctatgagtgctcttaaaaaagggcatcaatatttaattctcttaagataattaaggatttttcttttctcttttttttgcccataaacacctctagcaatgagtagctataaatttgctgataaatgcctaaaatataaaaaaagtagaaaatccaaacttacttctacaaaggcaaaaccttgatatccaaagcacaataaaaacaatatgttcccaatagtaataaggaatagtaacaaacccttaataggcc

SEQ ID NO: 46816 - DNA, 1622 bp, Homo sapiens
ctttttttagtctctactgcaaaaatctactagaacatactacataggtaccagacaccaactggatctgacaattaaagtaaaaccaaacaagcctgatttccagaactggaggtttttgttttgcaatgcaaaaaggtcaaaatacgtgagaacagaaagtaactacagcctcggacgatgagaaaagagaagatttgagaaggtagagaagttatgaaaggaaataaattgaactcccaaataaaccaaagggttttaatatgaacagggaagtaatagccaggccactctgagacatttctatctacactttgctcactgaatatgcagaaataagatcgttggaaaagaaagcacctgaggtcagacaggtagtagtatatactccgatactggtaataaagagggctacagctccgccctccacaggtatctacaccaatcaaaaaaagattagaagagaatgtgacacctggaagtcagaacgagcaactcacgtcatcaaggcagaatcacacaatgggcacagaggttggagactcactagccccaagggtagggaaaatgagggaaaaaacatacagagaaggtgacaagtaaacaacgccagcgcctacttaacttgcaaagatccagcgctgccgccccacaccgtgtgacaatgttttacaggggacgaaaggccaccacatacttctcaaccccgagggtctcttccgcccccaaaccccaccggccccattgcccaagtcagcgatgacggcaagagcttccaaaaaggaccctgcaaccctagacgtcatcggtgaaatgacagcaaaagagaccggaaatcgacacccccctgcccccgccgcccgcccaagcccccaacactaaggagccctccacagtccaagctaaaagcggggcggggcgaagagggtctccggggcccggagaggccaactgcagggcctgcccctcccttcctcccccagtccaaacatggggaaaactccaagcgcctcccctaccagtagtaagaggccgaatatgcaccagccgatcaccagctccgccgaggccgcgccagaagtcgccatcttcgcttccggtccagaccaacctgagcgcccggggtggggaaaggggagggggaaaggggagagagcgcgagatatactgcacccgcgcaccctaaaggttaaaggggcggagggggaggagcaagtggttgccaaggagactggacccactagcgtcccctggcggcgagccgagcgggggcggggcagcaaggactgctcaggggcggggcgcgtgcggacgcagtgacatcaccacgctgccctcgctggcttccctgcaagctgagatgtgggagggctgcagagcagggtgttggctcatagctgggcaacctattgagatatttgactcagcctaagttgatagactagaacagcaagggaactccacaaagaatgggctaggtggacctggagatccaagtcaattttagaggtttatacttcttcaccaaaaggaagtttggccctcgtgtacaaggtggaatgtgtgtgattagcagaactccttaccaggttgcaagaatggctgatgtcaggcctctgagc

SEQ ID NO: 46817 - DNA, 760 bp, Homo sapiens
aatctaaaactggcagagccacaaaggcataaacaatatctataattatagagtctctctcaaattgttgtaatatgtgggtaaaataaaaataaaaataagaatacggaaggtttaaagaatgcagttaatgcctaaaggacatatatgaaacacgacagaatatgacaaccaataaatgcagaatataccttctaacttttcattcatctcaagaatgttcagctttacctcaaggaggatggttaaaattgttagtgtaaagttttacctgataattctaacatctgtatcatcttggagtttccatttgttggttactttttctcttgaaaattcattgtattttttgtatgctgagtcattttgcattgtatcctggatattttagatgttatgttgtgaaactctggatcctgttgaaatcctctggagagtgttttttttctttgtgtgcacaggcaaagttctggcttatctcttgtatgcaatgttgggttagtagcaaacttttgctgtgctctttgtgtctgccccttggctaagccactcagaagtcagtgtaggtcttgtacagcgggttatctcacaattttgttctcaaagcctttgctatgcttttttgactgtgattcagggcattcagctagggagtgagcagattctacaggtcagagttagtgcaactgaaaaagtggcggttaccatatattgggttccagaaattatccctttctaacaatgccatttgctcaaacag

SEQ ID NO: 46818 - DNA, 1083 bp, Homo sapiens
gcggtgccgcagccctgtccggactccactgcgcctctgaggggctcaaatacgaattcaaggtaagctgcgcggctttgcgaccggctctgcacttgccctctcacacatgcccgggctatgtcatctgctcgtgttcctagttatctgtgtgcatctgcttttcaagaaaatgtaaaaactgtgctacacatggaaatatgtttaggtggataaataatgcacacctgcatacgtttccataggggccttaaggatgggaccaaaaacgtttggcaggagacggccactctcatgtggtacataccatgtagttcgtgttcctatgttcacatgatgcaggcttcatgcgttacacctaagttctaggtggtttttctggctatgtgtgtctgtgaagcggaactatggagcactgctgatgcgggtagggacagacatcaaatacattacaaaaaaaatggggggttaaaggagtaaaacaaactcactatcaattcatgccgttagagcgctttttttttttttttttgacggtgttagccctggaagcgaggcagccagttaagcggcgtaagctaagagacgcggggttccggtgcggtgccctccggcccggggttacctactccacatgtgggtgtttttcccaagtgcggcttctggggggcggcgcgggcgcgggcggggattcccggactccagccccaccacgttccggagcgtccggccctgttccttaattaccctgcagcatgcgcagcgcggtcggccacagcgccgccgccgtccccgcagtcctccctgcagccaccgccgccgccgccggaacgtcccagtcgcggcgcgaggaagacgcggccccagcctctgccgcctccgctgtcagagtcccgaggccaccgccgagagcgcgccggcgccgcagccacagcggccgagaaccaggaggcggcgccgggcggcccagctagggcgctgcagggtcgcgaggaagtttgttggcccggaaccaagcacgccgtcgggcacgctagctccccgagagcaggcgggcgcgtaagcgaacccccttagaggtta

SEQ ID NO: 46819 - DNA, 2154 bp, Homo sapiens
caacttacctaagaaaagttagtaattacttaagaaaagtactatacaatgtgaggatcataacaattaacaccaattattgaacattgtacaggtactttatgtctggttaagctaatggcctagagtggcaaaattagtatgctgtggaacctgtgctgaaacccagatctgactccaaaaacaatgttgctggcctctttattgtgtcatccgaagacagtatggattgtgttaaattcccctatgaagacctaacacaggtgtctctagataagtagacaggatttgtatttataatggtaacactgaggaggttcaggggcgcataagatcccccatttcaaaatgtgttccccacccaatatattactacaaatgtacacacaactgtaaacagcataacagaatgtgaagcatgacagcattcatcatttgttcttttattcattcattcagcaaatatttagagtgctggttatgaactagacattatcctaggcattggagattcatcaataaacaagacaatgttcttgcaatcatggaccttcttgagagtgaatagactgagataagaaatacaggtatctaaaaatagaataagatcatttttggtggtgaaaaagctatgaagaaaattcaaaaggatgattaaataaagagttatgagaggggaagggctactttggctcagagagtcagcaaaggtctctgtgaaagtaatatttggacccataccaaaaacatgaaaaggagtgagctatgtgaagatctgggaaaaaggagttctaggtagagggaacagcaagtgaaaacacatggaggtgagaatgagcctagctgttggaggaagagatagagataggtgatggaacatagtagatgagggtgagagtggtggagatgaagtctggacaataggcttcacataagctcttgtccatcacaataaggagtttggttattaatctaatcattttgggtaaacattagagaattttaagcaaaaaataatattgccagtgaatatggtgagaagtaattcaagatatattttacaggtagaaccaggagagcttgttgaagtatcatatatacaggtgagaaagagaaagagttagattcatgaagccaggtacttacactgtaaaacataattcatacttctatttttgcaaaatagaaattgcaaatttcctaacattattgaaattaaaagaaaaactgtgcttcctctcttcctcgtcttctgcatctcatccccacagagaattgtatcatcatcacatcagtttctgcattccaataattttagtcacaccatgcctgtgctgtgaatgacacatagtttattgtaccaatgtgctatgcacaggaggaaagacagagttattctttccaagaaaacaaaaatcaactatcttgccatattcaccaaagtgcttttcccttaaataattgagtgtgtccctagtggtaaacgcgtctgggattacttgccccatccatagccccttctctgaaaactactgataaggtttggctctgtgtcccatcccccacaactcactttggattgtaataatccccacgtgtgatgggagagacccggtgggaggtaattgtatcttgggggcgagtttttcccatgctgttctcgtgatagtgaataagtctcatgagatctgatggttttataaaggggagttcccctacagaagctctcttgtctgccagcatgtaagacgtccctttcctcttcctttgtcttccaccatgattgtgaggcctccccagccatgtggaactgtgagtccattaaacctctttcctttataaattacgtggtctcgggtatgtctttattagcaacatgagaagagattaatacaactacctttacctataatctcacccaaggaaccagcccagacatccatgtttgtaccatgtaatttcattccctacccccaacacatacgcgattggatcaggattgccggctagtttattagtagataaaagcgttgataaagcaaagacaaagagagcccactagtgttaggttctggaactgacaagtcacggagagagaacttgaaaccataccaaggtgagacaaagccaagtacatgctgcagttatggggaa

SEQ ID NO: 46820 - DNA, 3427 bp, Homo sapiens
tgagagtgctaaaaatctgtgatatgtttgaaaacctagcaaatgggtgactcatactttcattaccttacttgctgcctagtaaactaaactgggtgcctaaaattccctttgtttattttcaacttcaattatatatgcacagtattttaattacttagcatctattgttccaggtgcttagatttttccacatcaaaattctccagtttccattgtgttatttcctgttataagattattcaaagtagtttttttctttattgttgtttttcaaagggaggcagactgaccagtcgtgtttggggttatttcacaatgctagttccttcctgtatacaaattcacacacgcacccatattcatacaaatgctggccttgggtaaaaaaaataaggttgccaaacatttgaagtcttcagaccattctttctttgttcctcctttggggagcaccacctccccttcaattattctgcatcctgcattttctcctcttccttacaaagagcctggtatcagtcacagctcctggcactcctgagttacatggcctacttctgaggcacgcaaagatttggtagcaaagcaaagggaagggaagtggcagacctgtctctcagctgccagctgcaatctttctcgcacaccagtgcctctccttcttacaagttacgtcctgtcggtagacggactggcccaacaacaaggttatatctattgaggttaaacttgccccaaacagtgtttgttggagcagagaggcagaaagcgtacaaaataggaaggtgagttctcgaaagagttaaaatccagccttaaaaattccacatatgctcagtcaggtaaatcatcatgaattttttactgatattttgtcctagaagatagtgatattaacatattctagaaaagaaaaaccttgattcagtaaaaacctccttaagtgagagatacatgattaaatgttgatgacaaaatatattttgaggttatctcaaagtttaatgaagttctaaatatatagaatgattgaatatacactttaagaaaacatgcaataggtgactggatagagctgaaaaagaggcatccatatattttagattgttcatttcttgtatatttgattttatgtatgagagtgtttgttatcctgatttagaatgaaatgactttgagtggtatttgtggattcaatttttttctagcctgaggaataatctattgtagaaaagttgaaaagttgctctaattcgctaatatttcaaagcatcatttattttctcagggaaaggaccagaaaactcggatccaaacttaaaatgtcaatactcatagtttagcatttcaaaatgaataactacatggagttaccagtgatacttttaaaatttatatttttgctatgtgtactgtttcaacaaagtcatgagtataccaaagcgagctaacagtcttcattccaaaatgttgccccaaaataatttctgaaccacatgacagatgtttgatacagatgactaaatttcctgtcatgtttgtttattgttaatagtaaaaccaacagagagtgctagactttagacactaatatcttcaaaatatggacttacatgaaactagacagcaatatcatcttaaagtacttttttctcttaaacaaacaaatcgaaaaaagcaaagatcagagatgaaaggaagaaaagtatatcgagtgacaccatgtgtcagccagacactgggatagatgcttcatataccttaggtcatttaacgttatagttaagtagaaaatgttttaaaattgtggaggtgtttaactagtttttcattttctaagccagcacagctgttgactcacctgttcataatgcagagattatttgttctgccctacgtttctgttgcacaacattttccctctcttaaaagtcatttattgaatcatcatctgtctcaggcttgatacggtatagcctctgaaagactggtttagtacttaaacccacctttcaaaatatttccagtgcaggccattcagtgttccaggtacctaatgagtcattttcttcttcccagtctaccaagcaggatctcaaagcctcctttatctttctgggtgtatacagagtcattaagctcaaatatgtcctttgccaatggacttgagggttgggtttagttattaacttggtgagtctccacccagctaactattctaggaaatcatttggtgagtcaggcattcttgtattcacattgcagcggccagtcatctgccctaagtgctgccgccgaagactgaatgtcctggaaagtttgctgtcacatctccattatgacaaaagcattgtgccgaacagatgaaaaaatgcattgtcaacggaatcttttatgtttgtttgtcttcctttaagcaacattgccttacttgttataaaagataaataaatatttgttcatttcaattctgatgagtctgtgagctgttaccatcaagcacagagcagcaacctactttgggattgagaaagtgggaaatctgaagtgaaagtctatggtgattaaacaaaactgaaaactaagccactcctcttccatctggtagagaaattgtgaccatatgcccttctctccactaagaggaaagaccagactcactggttcactggtatgttttccttatagtagactgtggtatgacaatgccaagtgataaaacttctatgacacccctctctccagttgatccaaagaacttggaggggaggaagaggggagagatgtgaggagacacagcaagttaggcacctctgctttttcgcaggagcaaaaataataggttcttatctacttggaaggtgaggatactactaattcataaaacaacatgaacacagttaattttctaaatgccaagacataaaaaaaaaataatcttctttaggaaaaaattgtttctaaaataaaataataaatttgtattgaattcttactatgtaataggtgctaaaccaagcaccttacatgcttttgctcacaacaactccataatgttgctgttatttcaccattttactgatttattagcccattttcatactgctgataaagacatacccaagagggggtaatttatacaggaaaaagggtttagtggacttacagttccacatggctggggaggcctcacaatcatggcagaaggcaaggaggagcaagtcacatcttacatgaatggcagcaggcaaaaagagaaagctggctgggcacagtggctcacacctgtaatcccagcactttgggaggctgaggcaggtggatcatgaggtcaggagtttgagaccagcctgaccaacatggtgaaaccctgtttctactaaaaatacaaaaattagctgggcgtggtgacaggctcctataa

SEQ ID NO: 46821 - DNA, 2144 bp, Homo sapiens
taccattttaaccatttttaagtgcacagttcagtagcattatgtccattcattgttgtgcaaccaacaccactatccatcctagattcatttttaaaacaagagtcgcagctgaaattttcctttcattaactcagctttagcaacatactgaactttatgcaccacaaaagtttttgccagataaggttcagaaacagggaagagtgaaataaatcaatgatccttcgtgggcttctgttaacggaatgtattagcgaaaggcttcacttcatcagccccctcccgccctttttggcgtcataaaccaagaaacaaccagatcagcacccacatctcccaagatgcaaacactgggtcccgaaaggcatctgtcctgccccggcgcagatcccctgcagcctcctttcctactgcacaaatcgactagcgcagggaccgggctctctacccgggactgcacggaggagctaaagagagaaaaggagaaacaacattgtgagaaaaacggctaaagttctcgaactccgtgtttttgccctcttcttgttcactactcttcaaccacctccaagttccatcccttaaacccacaagcgagccccttttcttgacgcgcgccttttattgacgcaaacctcccgttctcgcgggaacttgggaacgggagcctggtagggaggacaaatctctcgaaatctcagttggcgctggagctggaggggcagttgaagctcctgaagggcggggcacggagcttgaaggggcggggcctagcctcagagaggggagggaagaggcgggaggaggaggtgagagaggccgggggcggggccgtgcggccggggacctgttgatcgcaggtatagccggctggcccgggctccctcgggactggggcgactgcgcatgctcgctggccgcgctgggccagtagccgagccgcggtgacgaaccggctccgcggttgcggtgtttgcggttgctgtgatggcgatgtgagggggcccggggcgggatggtgctgacccgggtcgggccgtcttcttgcagctggacaacgagctcctccgttcgacaggcgggggaagaggccgagccgggcgagaggtaacccccttactgtcccctctggctcccccggctcccgacacccacgacccctccctccgtccctcttgcccaggggccaggaaggaagcggcctcctcttcgtccgccgttcgcccgccgcggcccctcacccgactgctggcggtcggagcctggccccggccccgttgaaggtcggtggggacggcggtgcggagcgctctgagggaggcgaggggccgcggcgcgctgctctcccggtgcccgcggccgcccctgcccctgcgcgcgtccctcgacccgttcttcctgaacctcgcgcctagcgtgtttgcccttcacccctgctccatcttcgtcgctctgtccctcctttacccgctttcgtggttctgctttttcatcccgcgcctcccacgtgtctttttgcccgggtggtccctccttgggaagcagcgtatctctgtgcttccatcccttgcctggctcttccctgtccggagctccttaccctggccgaccaggtttctcactcttgttacctccataatttcttccttggttttattttcctctcatccacctcctttcggtacttcctcctggttccctttttgttagttgccgattgtgttttgctttagcatcgctttgcattggagttcattccatgccccatcttagcttcggaaaccctcactgccttctctttcctctggtaccctgcttcatcgctttctgtctaatggcccctatcctcacgtccttttccattctgcacccagtgagtctctaatcttaattttttcccctccaaaactcttccaccctcccccccccatttgtataagtcaagcctcttaacttcattccatttgttttactttttattaaatctctgaagacttctttgtgacatacccttctagtccttgctgctttctgcctaagctaggtatccactcaatgtttctagttcatcttccagtttaataacatttcttctttctttaccggttggtggaagtatcatcaaaagagtgacagtagca

SEQ ID NO: 46822 - DNA, 1088 bp, Homo sapiens
ggaacggaattattccctcttctaactgcagccacgatttggcgttttaacaccgggctcaaggtagcctgggtctctcttggccaaagagcccagggatgcctctaactccttttctaaagccggccacggaggccccgccctctgcagggaggctccggatcatgccccctgctcctcccactactgctttgcgcctgcgcggaggctcggggagtcggcgccatgaccccatcgaggcttccctggttgcttagctgggtctcggccacggcgtggagagcggcaagtaagcacctggcctcggggccacggtcgcgggaggggtcgtgaaggcccaggcgcagagagaagcgcctcccgcggaggaagccgcgtgtgtcctggccgttcggtgttgccaggggctgcccagcttctcccgcccagccgcccacccggtggcctgggcaggttcctgcagcgccccgggtctcgggtgggactagagcgagaaaatcgctaaggccctttcagcccccgggacgtccgcttcctaccgagcacgcggtggcccaacaggaccacaaacgttccgggttgttcctgtgggagctcgcagggcacaccgcacttcgatgccccagagaaaaatggaaaagaaggccctttgggaatgggagtcattgatttacttatttatttacatcattatttacaggaatccgcgctcctggtccaggctccagcagaaaaggatttgtggcagtttacagtttatcttttaaaaatgggaaaagtgcagaagtgagccaaaggcaaataagtataacgtaaattagatgaagccaggaattgtcagtacagaaaaagcattcatgctttcagtaaaaccaacatttttaaacccattgttgttggaaatttttctcaagataatacagttagcagcccagactatgcaaaacataattttatttatttatttatttatttgtttatttattttgagatggagtctcgctctgtccctcaggctggagtgcagtggcgcaatctcggctcactgcaagctctgcctcccaggttcacgccattctcctgcctca

SEQ ID NO: 46823 - DNA, 2139 bp, Homo sapiens
aactcctctatgcctcactttcctcccctgtgtaatgaggataacaatatcataaggttggggaaagggttaaatgagctaacagttcgtttaacagagtaatcactcaatgaaatgttatcccctaatacatgtcactactagattatttctcgcccttaaaatgtaagagaccgtttttcctcttttcttccatccgtgtctccagcttctaaactgcaggcgaataaacctcgaatgagtaaatgaacccacccagtcgctagttatttctgcatttccaatgttgtgccagcaagagcaaaggcaaatgggcaagtcaaagtaggcttcttgtaaaaggtcttccattactgggttttactagaggcccttgcggaccatcacatctcaaaaggggggaaagctcgtatgaggcagtgccagctacctttcgggaatcaccttgggcagaaggcctttttgcaaaaagactcggcagcccgggccccgtaggttcggcgcatgcgcagcgcgctcggcgcccgggttccttcctccgcgccacccggaagcctcggcgcgacccagtccccctccccctcccctcgccggctagggtggtgcgtgccggcaggccggtcaaggaggcgggacacgtcggcgctaccaccgccaccgccgccgccgcccctcctcccgttccagctgccgctgccgcttcctgggctgagtccgcccgcggtcccggcggcgccaggtgcgttcactctgcccggctccagccagcgtccgccgccgccgtagctgccccaggctccccgccccgctgccgagatggcgacgcgctcctgtcgggagaaggctcagaagctgaacgagcagcaccagctcatcctatccaagcttctgagggaggaggacaacaagtactgcgccgactgcgaggccaaaggtagcttggacgtcgtcgctgcccacggtcggggcctcttgcgaccggtgaccttcccgccgctgcggcgctcggggcccgagcggacgcctcggcttcgctggccggctcctgccctgactggagggcgggtggctgagcgggcgggcgcggggctcctgtcgaccctcaagtccgccagaggcggcggcgaggtcaggcccgcaggccctgtcagtggccccagcctcccctcctcccagacacgggtttgagcaggtgccagggtagcgatgctcggaccctccacagggctgggggtaggagcgaggctgggagcgcggaaccgggcacgggtctgggcagagcttagggttagagagttgccctcctagctctgctcatagctatctctgtgggtggggccgcgcttaggtctggatcccctcctctaccctccggtgtgaccacgtcctcccactccgggctcggattcttggtctcctagatggagccctacctgcctgcccacctgacagcttttgtacaaggcttttatctctgcttcctgaaaaagagtatggtggtctttttcggtgggtttgagttttacggaataaattaattggagaaaggtctttattagtagtagtattgttttttagtctggttattagccagaatgaagaggaatttcattacatgagtctcttggaggacggtgggtttgtatttctgaagattttagtaattaggttttctctgaccagctagtttgggagaatatgtggacactgatttgtgtacctcataaatgctgaaggttcattttaaagatctagagatggaaaaaacctaattttagttttttcggttggagggcttctgcctcagcctttgaaacagatatactatttttagctgctatgttttgtgtttggagatctgatttatgtttaatgtcttgtaagtaatctcaagggaaatatttcttttttttttaaagaaatgtcttgtgtagttaagaaaagatcgtgtatatttttaattggtttatttcgttattgggtgagaaatagggtagttctctaaagcaggagacagtctctttggggaatgtcctttaagatttctgtgttatttgacttagacttttcctgaagctttactgttctatctcaatactatataaatgagtcacatttcagtaggctgataatatttga

SEQ ID NO: 46824 - DNA, 636 bp, Homo sapiens
cccaagtagctgggactacagacgcctgccacatgctcagctaatttttgtatttttagtagagaaggggtttcatcatgttggccaggctggtcttgaactcctgacctcaggtgatccgcctgcctcggcctcccagagtgctgggattacaggcgtgagccactgcacccggtcaagataggaaatgttctgtgaacttatttttttgagtgatcacaatcacttgccttccattaatgcttcattttaggaaatgattaattaaatagtatgtggaaactttcttctaatcagcaatagtatgtggaaactttcttctaaactcttttgaagtttataaaggttttgcaggaagtctagttgtaaaatgttatacctacatgtcatcttttagcattgccgaggcttctttacaggaaaacatgaacgtgacacagataaccacaggtgactaggtcatagcaaaatatgttagtagctttaagattacttaaaaaggaatattttaaagaacttttttcttaataaaatattatataatgaaatatgtttaatattaagaaactcccaaacattctattgagtgtatttgctaggagaaaccttttggaaatgtaaaataacttttgtcca

SEQ ID NO: 46825 - DNA, 1792 bp, Homo sapiens
tctgggtatctggatctgtaagcaagagtattctgagaagaacacagcagatgcaaaggctcttcagtaggagcctacttgaagtgtgcaaggaccagcaaggatgacagtgtggctaaagtggaatgatctaggggagagtagtaacagaggagacaaggaaggagggggtagggagggggcaagctgagtataacaggactttggctttaactctgagtgacctggaaagacactggaggaatttgctgaaaagaaataatctgacttttgtatttgaagaattattgtggcggttgtgctgagactagattatagtagggcaaggtggacaggaaagggtttttttaaggatgacattacaagatgtttagtgttagaaatgagcttgtagagaggtaaatctgatactttcaggacaaggaaaaattgctctagcagtgtccttgaatagcccggagtggatgggatctagttgacaaacggtatgagtggcctttcagatactccattattgttggaataatactgcatagtaaataagcctcaggtttcaacagcttacaacattaaacatctgtttctctttctgtgggtcagctagggcagctctactgtaacttcatttgatacattttctaccttcctgattattgcagggcactttttaccagccatttcactattgcaatatgtgtctccattttaagttccaacagtgtttccttatcttctaccaccttgtctcaaagtcattgcacagattttagggtttggttgtggcagcacccttcttgtatcagtttctaaagtagtcagctcttgctgtgtgtgttacatagcaaacaactccaaaatttcagtggcttacatcaactaacatttatttctgtcactcatgggcctgtaggtctgctgggatgtcactcttttggacagtggaacattttcaggacagtgtctttaagggagaaccaaagttcatttagcaggagaagttagggaatgtttgtgaaaaaaggttaagaatataagggggattttgcaatgactcacagtgggtcattagatcatttggcagaagagttccaaagataggaggagtgggagatggggttagaaagagggctgtcttgctgtgagggagttgtagcagcagggaagaggaagtgtcttacccagagcacatacagctcttcacatctgctggttatcaatttcctaaactcttaaaaaatattttcagactttttttttaaaaaagctatgtttcagcataaaatcgatgaattcatgaaagtccaggagactacagagaatcaaaggtctctttcagctcaaaacaaacagtggttctaaatctggattgatgattggtgtccaccttgggcctcaggctatttatctgctcagaagcatgccgctctcctccaatgggaccctggttttcccctgtaaattgaaacacagcggggattgggggcgtaggtgccttgaagtatgatttatggtcatgcaaagatgacagcatatctccgtatgagtgagactagaacagacattaacttaaaacatttccagaaaatatagagagaacttgtatagcgatagttcagttaacacagctatggatccttgggactcacggccttctttatcactcttaacagtttcataatagcctaatacttaagactagtttttgatctttcctttatatgggactttaatgaacttactttcttttgtgtaacccagtaactcaggtaaaacctttcttaagctcaccttt

SEQ ID NO: 46826 - DNA, 1338 bp, Homo sapiens
tagagaaaaatcttggtgaggcctggcagaaagttccttacctcaggtttttgggggggtatgaaaaagtcttccttaatcaattgaaaacagtgtcagccttgccacaaagattgctgtccctaagcaggtgcttcctctgtctcattctaaaaaggattctgaagtccctcagacttactttgtgaattgacttcatgacagctccattaaccatggtggctggttacagagagatcacaactttgttgtttgtgtgaaatgccagaaatttcaagaggctaattttaatatagtaataataataaaaaaaacacatggaaagagaatatggacttgtttatagtgcagtggtaaaaacagaattcaagttatgttgcagtgaagggacatgagctgtgtagactttatttagaggaatgttctgcttttatggtgaaaatctggaaactacctaaattctcttgagtcacacattgaataaataaattattataggcacatgcagtatcacagaatgcaaatcccctacctacacatacataattttatataaagaagactatttttgtatgatcctatatacattgtttttaaacttgtggtaaaacacacataaaatttaccattttaaatattttacaatgtataatcagtgacattaagtacactcacattgcacaactgtcaccaccatctatggtgggtacttttagtttcttcatttttgcatggtttgaatcttttacaagaatgtgttgcttttacagtaaacattgaataagattacaatctaagactttgctcctgctctgtgacactggacaagttattagtcacatatgtgatactaaagggggttaaaggtaaaataagacttcagaaaccaagtaatatgctgtgtgttgttttacggattagaaaatgtattgctagataccaaatgtggtttagatttgaaagtataagtaaatattctgagaggagtctaaggtactaagtagaacagacttaaaatttcggaaagctgtacagtttataaaagtaataagacatagcattggtttttagtggatgcgctttgtgattctcactaaatgcatcctgggcacactggtgttctgtgaactagactgacatgtgctgtggtaaaaagcaattgatagtattttctcagtttgccaaaaaatcaacgggattttctcatgttaaatttttttttccataaatttgtctgattttgttaactactacttaataaagtaaaaacaactataacggaaaaactggaaatagttgcttatattcagcttgtcaccgttttttttccttttattt

SEQ ID NO: 46827 - DNA, 1658 bp, Homo sapiens
tttttgcctacacggagcaccaatttgtagtgggtgtaaggttacccgcaaatcaatgtgatggtccagttgttactgttccttttgtttcacgagcgattgctcattagatgaggtgactgatagctctgactttttctagaccacaaggactctaggtggctgccctaagtacagttgtggcagctgggatttcctgtttatatggtgcccggcaccatcagcttttgtcctctgctgcagctaaagtgtcttcctcctggaccagggagagggggagggggtgtggacaggacccgcctgctgacggtgacacctcttcgacaccacgtccacgccagtcctcagctccaggagctgggcgggatccctcatcccgctcagctgggagatgccccgggagggcgtcccccggctccgggcggcgagggtagtagccgaccccaatccactccgggggccgccgggggccgcgtgaaggcaggtgttccggggagaaacgtggaagggaggcgcggcctggggccggtggcgctcggctgggggccgcagttggctcccctgggggctctgggcggcggcagctcccgcctgtggggaggagaaggagccggatgggcgggttcaggcgcgcgcggcggcggtcccggggccgccggctcctccccgcgagggtgcctgtccgccgctcgccgcgctgaggcagtgcggggcgggcgcgcctaggctgccgcccagcgccctcgccgcggccatgcccgggccctagagcgcctgccgcagcttgcgccccgcagccccgcagccccgcgcccgccgccgcctcttcaatgggcaacctgctcggcggggtcagcttccgcgagcccaccaccgtggaggactgcgactccacctggcagaccgactcggagcccgagcccgaagaaccagggccgggcggcggcagcgagggcccggggcaggagtccgagcagcccgcgcagcccccggagcaagccggcgggcggcccggcgccagccccgcgccggacgaggacgccgaggcggcgggcgccgagcaggtacgcggcccagcggtggcctcgggtcgggctggggcgccccgacaccccagaggggcaagtgccaagccgccctcgcgctcggaggccaggggcgccaggtggctgctcgccgctgcgacccgacccctccgcgccgcggctgacctgtctcccggtggagcccgggggcctgcaggagcccaaagcgccggaccctcccactgccggcctggggcctggccgagggcacggcgaggaagtccctcaaggcagaacccaacttgaatgggtgttttctttgcctctgcagagcagctggattatgcgaaggtggggtgggaggaacctgtctaaaaatagaggattttgacaacccctctagtgtgtgttattggtaaaaaaaaaaaaaaaaaaaaaaaaaaaaaaaattactcagaataaggtggggctacaagtgcaagcagccagcgctctcccctacagtggggtctaagccgtcagaagtgtaggccctcatctgaagttcatacgtcactgttctgcccaactcaggcctttcaacctaggattcagggcattcttcacgaatcttatttcaccagaagacttgtt

SEQ ID NO: 46828 - DNA, 1204 bp, Homo sapiens
gcattttaccctctgggcttcacagttgaatgttaagacaataattttttagtaaacatccagaaagatgaagatgatgaactgttgggcttagcttttccagtgtttggttagtatgaatcattaaggtttttgttttgtccaaagaaactttctcattgaaacataagaccatggaaccatactctgccatcccttaattcatcaacatctttctccctgcttcccaagtaatttgctaattatttcaaagtaaaatcttcaagcatttttggaagctaggacaggtatatataatgtttgcagaaagttccatgtctgagatataaaacaggctttaggaagttagaaataagtgatggttattgttatgtggcaatattgggtaaataaatacctgggctgttgacaacacctatgattaatacatgtggctgatgattcttttggaatttgaccaggcatgtgtaataaagcaaagattgagctgagtgagtttggggagttacattatgaattgtgacaaaatagatttggaaaacattcatccagtaatggcattagttttgtgatagagaggaaagatgttagtgtaatctgggggaaaatgtacccttggaatcaagaccattagaaataagatttaaaattatcagatagggaaagaggaggaaagaatgaccagagattgaagaaaattaggttaagttggataggtacaaatatggtggtccctaatctcgtatctttaaatgataatactaatagttttaaatagtatctagtacttatcgagttctatatacccagcatgtgtatcatctcatttgattcttacaacagtcctgtaagttgtgggcacttttccccattttacagatgaggatattgagacatagagaaacatagtttcacttagctgctaagttacagagccagggtgtgaactcaggtctgactccaaagcccatgctcttaactgttaaactaagctctgctaaataagtcagttttgtgtcctttgtcagaactgttttagcaaagtagagtagtttttgccgccatccttatgagttggcttacgtggtggattttgcttatcagctggcactataaattgtaccagtcagctgttagctaatgtgtttatgtttagcaatggttacctctgatgagtacagtacattgatgttggtgcaaataa

SEQ ID NO: 46829 - DNA, 2617 bp, Homo sapiens
ccttggccatcatcctatgtagcctcacaggaaggtgtcacagttctgctatttctaaatgtcacaggcccagcccacctgtctactgccatctttctactgtgaatgtcatgaaacgcctctgggagcataaataactttattactaagctgtaaagtagagcaagttattaatattgtatgaattgcattcaattcactttttacctctaatagggtgagatctcactatattctggaaagtatatccttcaaactgctgagtagcatgtattgaattaactgaattaggaagccccattgctgctggaaatttggactgcaagcttgttttaataagttcaagtttacttctgagatcatcattttctttaggaattcaattcaataaggctgcctaactctgacagtaagtacgagaaattagattttattgtgaagtataaacaggcctgcaattgatgatataagactctaaacatcatcaagaggcttgtggactgctttgctatgggaagtaattgacactgaaagcttttggaaactgaagtttatagcactgggcccaaatcaatgatattttattttattttatttgaggtatttgaatagggcattagttggcatgttctaataccatgtgatgaagcccaagtttgggcaaagtattaacctcctctacaacaaacagaagttagacaaggttttaaaattaccaccagatctttgaggaacagaggaagaaagtgttctagagataccacaaactgagcttcatttgatgtgggtttatttctcgtgggccactaataatcacatgttaaattttctcctccatatttaaagattgagagtccatcctaccctttattataagttgattaaaaaacaagactctctaaaaaactcaaaatactgggttctagtcctggattttccaccaggtcacaagattcttagcctttatgtgtccagtgacaagaaacatgactcgtaacctcggtttgcacaatcttctctcaggaacttcccagggaatgtgcaatttctggctcacaagcagggaataagctgattcattcttctgctcaagaatgaatcttggaatgcaaatgagcatgttataggaataatcaaaatgtgatctaatttctgaaaaaaagtaataattttcaactgttactcttttattatgagtaacaaactacttgtgacatattttcaagccatggtgacctactgtgaacacctggctgggaactgccacatttgcagtctggctgaccatgaatgaaccagttaattcctctgttcttcacactccttacatgtaggcatcttccagttctgaatttctacaagtactgtcacccagcagtaaccaatccacgtggggctactctctatatatttgtatcatgagaacataagaaattgccttgcttgttaagtcttacagttcctttaacaccaaattctgaatttgacaatggcacaggaatatgatttggagtatgtaattattttcactggcattcaaataaaggtttatggctactcccttgaaaatattcacatgttcttcaaggtccatgttggatctgtcaactattaacacataatgaatgcaataatattatgatacaaatattagtgtgatgtaaatacaaaatatatatctgcaatcctttccagcccttggggcactagcctgtaagttccaggagaacccggactgtctgatttgttcactgttccatcctcagagcctggcacagaagagatgtccagtaatattacatccagtaatatttttgggtcaattaaaagattccatagtaattccttaatatgtaaggtagaggttttaaaattattattacccggtcttgtttgtttacacatgaaacaaacccagctttaaagaactcaaataaaaaggaaaagatgctgtttgtgtgattaattctagaacaaaaggtgtgtgcctggtcttgggagcaactctcaggggtccaaatcagcaggctttctgtctccatctctcatacctcatttaccccagtgtcctccataaggtgactcatagtcacaggtagcatgtcagtcacatttcagtttccccatcagagaggggtttcctcctttccttagtttcagtttgactctgttatttttactcactcttagcagcaaaggttaggagacagggtaaagttcagtagaaggccttttgtcaaggatttgctagttcatgtttaaacatgggttaaagaaggttaaaagggatatttcttaaacatttttattatacctttaattgatttgccaatcttgtgatgtaaagccaggatcttttttttaaattattaaactgacactgttgtttggagctacagcttgttcttcttgataaaaactgacccatccatgcatcatacttttcaactgtgacttctttaaaatggagcaaagatttaatgatacttgcaatatatctgagtgaagaatccatctggatgtttaaaaatttcccttcaattgtgtataatggtatttcccataattaatttgtcaggatatttttgtttgttttgtgatttcctttatcaagttt

SEQ ID NO: 46830 - DNA, 729 bp, Homo sapiens
tacaattatccattgtcgacttgtgaaacagcaactgtctctatcttggtcattgtgttgccttataggtttacaaggtcataatgggcaaaaatcatgtttaccacattatactaccaactgcacactcctccatgtgggtaaggattatatgtacttggtgatgataacatgcttttatcacttagatttgcttcagaaaacacagctggtacaacatgtttacagctgtaattccatcagttactgttaaaactgaatattataaattctccaaatagttagaaaaagaaaatgtactaattaaaatgtaaaaatagttcttccattgaattacctgaataaaccacatgctaaaacagttctggattaatgattaatcaggctttcataatattaatagctaacatttttcagtgctttccatgttccaagcactgtgcaaagtgctaattatcctaacactgcaaataactccacacagaagaggaagctgacacttaaacttgctcaaactcacccaagagttagatctaaactcagatttactttttccagcatctatgtaaacatgcacaacatagagaaagtataaatgaaaggaagtacattttggttctaaaagcttgatattaacattgattgatattttaaaagtaggcaaggctcagatgtatctgactattccacagcctcttatgacttcatggggaattatataggatttca

SEQ ID NO: 46831 - DNA, 1286 bp, Homo sapiens
ccccccacttatcggagggagaaaaagaaaacttccttagatccattcaaatataaaaacagtctttactacattaaattttataaaatcccattgttaaatacttcctctcaaagtcctgccaaatgggaggatcactgttcaaacagacaaggaatatatgacctcctcccactgccctgatgaacatcagggttatactttggcacacatacagatctattttctacaaaggatgcagctttccagagatgtgaaggatctggaatgagaacaccagcactcatcaacccacttcctctattggaagggagtctcccaaataagtcctctgaaggaaatactgaaatgaagtcacccatgttttgtaaagtaacagtagcttgatgatgtgactgtgtcagaagtgacacaaggtatagcagttagaacaaaagttcactgggacttttaataaagcaaatttcgataaatatttacacagatgcacacacagttatttgttctgcttcaacaggactcatccaagtgctagttttaaaatataaacagtgggaaactgctgtagtaatgactagcaaaatactgcaattatttgcaagagctgaaaactgttcctttaataaaaagtaggaagctgtgtgggagaaaaaggagtgaaattctctagcaagtgaggccagttggaatttaataattcactttggcaatcatatttgtttagtcagcaggccaatgttcctactgtgctgcacaatgccagggacagtcttcatcttaaatgcccactgttaagagagcaaatgtttctagccaagctacataaatactattactgcagcagtccttgaatacataccatttattacatatctctgagaagatctgtgcagcacagtaaagactcttgttagttcagagattaatttgcctgagatggcaccagggtatttgaaaatgtgttattaagcaatatttcggaagtggcctatgtgtcagcagatagttatgctctagttacagaatataagatagtccccaaatgatatttttaacatctctttagtaatataaacagagaccaagacatggaaacctctcatggttttctctttttattgcagtgttttagtcttcaaggatattttcctcatcactgttcatcaaaattaacttcctcttcaaaagtcagatataaaagtgaagagattataaaagcatgcatatattgctatagttttaaaagcagatagatgtataattagatatatagataaatagataat

SEQ ID NO: 46832 - DNA, 3497 bp, Homo sapiens
ggatgtttacagtcgctcactgtcaacagcaatataccttctttagccttctgttgggttaacctgaagaagtaatcccagcaagtgtttccaagatgtgcaggcaacgattctgtaaagtactgaagcctcattcaaacagcaatattctagaaaatgtctcaaattcaaaacaaataagaaggctcatggatgtctattattcatcaccgagcttctagtttctataaaattttgtgatatactaaaacaacatatataaatggtttcattcattattgttagccacaagaagtaaataggcaagtggccaggttacttaatatgatttcaacatgcattatgtaattacaatcctttaagcaaaagtgaccaaacacagaaactaaattatcttaacagcgtaaagcgtacatttaacatcaaatactgcagttgagtgaacttagactaccgtgaaaatataaaaggtctacttggaaagttataaactctgacaaaaaaaaaaaagacttacatgctgcttttatagatcacttttgctctaaagtctgctcccagagaggacttgtacagtcagctgatttttgaaagagtaagcaacaatcaggagaaaaacagaaaagaataacgaggtataacacaggcatatatcagtatgtggatcaaagtttcccactggaaaaacacagaacctatcactcacaacagtgacgcacattaactccaaatttgaatgttttgaattccactcccattctcttatgaaaataaatgaggaaaactgaaggttaagctctatcagtcactactttcctgaagtaattcaaaaccattctgaatctagtgaaagattaagttgatacagaaaagtgggtgtgcctttccctgagatttgtttttagatgaagttaccgtaaggttcttaaattgtgtaagtcttagtagtttgtgatctcaaacccgaaacaaaaataaaatccacacaaaaagcatcatgtttactgaaactaacaaatatgaagaactccataaattactttctcaaagcaaagggtaactctatcccattaaggttaaaaaagttaatctttgagtcagcaggtgaaaacaagctgaattatgttgtggcctttttctttattaactaaggactttgaactattaaaacttcctagggaaccagttttctcaatgggtcaagtcacacaggggaacaaagcaaactttatcagtgctgtgcaattctacattccagaaattcttagtacttggcattcatataccactgctgactagagcttgagtcaatccaccaaactcagctatggctaccaaccttgtgaacttctcaccaagatacccacttcttttaagttagccacgactagacaggcagagtactctttaattaaaatagataaataccaaggcttacaccctggggggacattgtatatcagtgactctttacaaaaagaaaatatttttaccaccataaatttttctcaaagtgacaggtcccctacttgccttggaatcttaccacttttaaataactgtaaattattaaataacatgtaaaacagtgacaagtaaatactaagcaaacaacctcaaataacaaataattacttaaataattctattgccaccctctcactttgagaattgctgatccaagtgggacctatactactcagtaaccaaaaaaacaagcatgtagtttaagtaataatgagtctcagttaaactggtaaaattgtctggcatctgactggaataaatctgctttagctttcacatagacttcacctagctcatatcttgctaaaagaggagcccacatacatacaggcaataaagtgcttttccatttatgaagtattataactaagatcttatggtctttaattattttgtttagtgaaaatttgatgtttattcatgaagttctgagcaaaacgctgtgttttcaaagttatgttaaggaattcattggatcagcaattctccaagtgagagggtggcaacagaatgaccaggacagcttcttctaaccccacatacctgattgcctctgccacatccacattgcaattcttattcagctgatggggaggctgctgggtatgtaaattttgcaaaagctatcaaacaattttgctacaccttcagggcagagaaccattgatctagaaggactgagctaaataagtttaagactaaaaaatcttgccatgacctgagaaatatgaccagtaaatccatttaaaaatcgtgaattaaaaacaaatatggcagaataagatccaattgtgttcaatacatcagactctgatttgtcttatataaccctagaaatgcttacaaaaaacaatgtacctactttaaaaccataaggatactctttagccctgttagacaaggtctctaaagtcttcccaccctaaattgcaaatctggatgtctgtaccctggacaggttttattatcttcctcacatcagttttgttttaagtgcttgcaggattaattctttctggtggagggtttagaagcagcccgagataaagtgtaaaaattttttttagctaccctgaaccattcaatcctcttccacccttctcctctcatgtccacataaccttctcgctctctatccttggagtgtttgcagtgaaactctaagaatgaacatgttccatgtcagcactggacccagtgcccaggctctacatcctccaatcctccatctctttgggggcttagtgtccagggtagctgcattaatagttttggcattcatcttctgtcttgttcctttggtaaaacacacctaaaggcaagaaatctaggtggtctttgatatcttttctagaaagcatacatagaactgatctgaaattgaagtgacctaaatgtacaaacaaaattctgccctttaaaattaatctttaccttctctgattcattcttttacacatactccacactcttttagtccaattcaagggcttctaattcattatatttcctgctaacgatgataatgatgaaccttcccttgaatttctttgtaattaatacaaatacagacctacctactccttgcctcatgaaagtggacgaatgctgtaagcatttactgggagtgatttcccatggattgtgaaaatgtgaaagattgttaacgaattcaaattctaggaagaagagtattatcttggatagtatagagtttacagttataaggaataaaatctcttctactctagaaatgagtatcgcttaaatatcattctctgataaaatggtaatgaaaaataaattgagaattaagcaaaagtgtatgtactcaagtttaaagccttaattttaatacaacctcaactatgtatttgttgtatgacaaataatgcctgcacatgatctcatttcatccctgccacagcaagataaggcatctataatcattaccatcacagataaggaca

SEQ ID NO: 46833 - DNA, 1771 bp, Homo sapiens
agaattactaaggactgagaaagattccctaagaaaccgggttttatcttaaacttccatatttagtcaactttggtcctgaaacactaattattaaggaagaaacacatctatttgttttctgaaaccacattttataaagtggaaatatgagtctacccttagcatggaacatcctgtgtctgactattcagcattgcaagtcatttgcattctttaggtattatttagataatattatttaagacatttcactgtatattcttaaaaaagagtttgaggaactcttttttaagagttcaaacttactttcatttcgagtcagggctacaataaaatgaaaaggacggctatgatgaaaacagaaaaaaaaaaggggacaatattgaatgacagacaagaaaataatgccagcttcgtgacaatggggctatctactatgcttataatgcgtgaataagtaaatgatataatggcatcaaaacttactataaacagagatcagagtgttcttgaatatgggcctacctatctgggaagtataaaattacctcattaaagtgaaaactctgctttaaactttaatttccctatttcaaaattgcttttaaggtaaaaatgttctaaaaacatgcctggagtctcaagataaattaccagaaattaacaactatgtggttttttatttttctattaaaatttaggaataagtttaactattttttcctggtcattgaaatataaattgaaaaaattttaaattgaaatgtcaacttataaacctgtaacacagataactatattaaaaataacttctgaaagactgatttcacaaatttaaggcctagaaaattttaaacatgtaaacacctgttctctaagttatagtaatataatgttaagatttttaaaatatatttgactttttaaaaatattgtgtttacaacaaaattctactcatagcaattcaaggaatataattagaggttttatgaaaatagataaatccttatttaatagaaagtattagcattgatatttttaatctacacaaatggaatttaaaaatttccaaaagtttctgttaaagatatacagttttgaagtgttaagcttgtctaaaagagttctaacttctgcaggaagaaaagtgcacttcatttaagcaagaaatttccattacttctagattaagaagccacacctcatacaactactgacaggaaaacattttaattcaaacctctaccactacccagcctgaagcaaagtttaaaaaaagaaagaaagaaagaaagacacaaaaatacaagcacaactcacattttcaaataaaggaaactcttgctaaataagtagcaattatgctgaagaatttatatgctaaagcacgaatgaatataaaaacaccagagcagtcaaccatagctttagcactttgagtatgattaacagaatgaacttccaaaggtcaattaaatgtcgacacactttaaagagatattcttaagcctggtcaatgtataacagcacctcttaattcaggggtatccgtcttagtttaggcataacatgcatgggataaatgtacatatatatacagaattacaacatgtctccaaccagattactacagaaactcatgtatcacctaccctagagttttgactatgttagtattttccaagttatgaaatgattaaaagaaaacataaatatattactatgtaacactatccaatgaagatgaaatgcttgggactaaggttt

SEQ ID NO: 46834 - DNA, 2340 bp, Homo sapiens
tctttgtcccctcctccactgcccgcacccccccaaccaaaaaaagttttcagtataatacagaaaacaaaaacacaaacacctgccctgttcactctctcttatgcataataaatgctttgttctccccctcaactggatccggcagggatcgcccgggggcacctgccacttcaccctcagacttggctctctgtccccaccctggcccctaggattccaaatggtgcagcaaaatacgacaatcctaaggttcgtaaaataagcaatggatagtgaaggaaagcctttaaatgttagtgttttaaaacatcagacttaaaagttacttctgagtaggctgaaaggtgaatccaggcgcatgtaaacatatcctggcctatcgcttgataactcgcgcaccgtgttgaggccctaggaaaatctcaaaaacggagatgtagtctaaaaactggacgacagcatagaccacgttgctgtggccccacatattacccacgagaaaaatctaagtggtaaagtcactggtccaaggtcaagctgagccagtcgcaggcagggctagtccgcgaccttctaacctttccatctcccacccagccgcgcacaggcccttggtcgcgccggcacccgaagagttcccacggatacggttcccaagtcagtggcatgtcagtgcccttcaagctaccgcaattttatttgttctccccgccagctccataaagtattaaaggctctctccacgacttcttcccaagcccaggtgccctaaaccacttgagcccacggcgcctaaagccgactcacccgcagcccgaggtgcgggagccctcggacggactccggcccgccccgcagtccccaccggccgcgctgcggccccggctgacgacgagtcgagaaagtcacccgcgatgaccgcggacgcgaggggcgggccgcgtcgcgccgccccgcggaggcgccgcaaacttttcccggttcgcaagttgccgggatctgcggccgcggaccgacttccttcgccggccaccggagggagggggcgcccctaccccgggagggggctgggcgagccgggagacggtcaagttggggtcgggggagcgcgggcgctccgcactctggggcacgcggggacgagcccggccgcattgtctgcgcggcctcggaacaagcacggccggcggtggcaccggcgggcgcggggaggagttgccgtcccctttcgccgccgccgcccaccgcgttctttgtgtgtctctcgccgccctccagccgcttcgccgctcgcctgacagctgatgggctcaccgcgccgggtcccgcgtcctctcggccgcagccggcggagcccggcccggcaggaggaggaggggagaagaggagcgttgacagatgctgtcttggagcgggcaccgccgggggaaaagtctggactgcctcggcgagaagcggccggtaggcaaccggccccagcctcgcattcgcctcaaagaccccaattggctaggagcccttccctccgcagcggctcgcgcagctccgctcttgcgccccgcgcccggctcagcggacggactagcgcgcccggtcaagaatcctggggaacccgctccgccccctggctccagcgccctccaatgatgtcggcgtacagagggctgttccgcccaatcaggtgtcggaaagcccagccagtccccgggagtgtagccaatagaaggcgactccggcaacacacccgccctgatccactaggaacaaaccgctccgagcccgggtggtgggaccgatcctggagcccagatcaagccaagtccggccaaagctgtgtcgcaaagtaagaatctgaagacaggtccggtgcttaaatgactattattctaaagagttgaagatgggaacggtggacgcacaaaatctttaccctcggcttaaaacgccttttctggcaaaagtttgtgtatgaaagaaagctgaacaaacacgttgtagcactgtttaagtgaaggcctttccttttagaacactgctttacaatgcctaatcagccggcgctcaggttggtgcattcagagacccgagcgtttgtgttcctaataagtttgctagaatgtcaggtaactgaagcaggttagtttctatcctgccccaaaacacagactgtcactggcaccaccatgttgtggttttttccatgaatgaaaatataagagttctgtatgtaaatcatctttattgtgaactttatttctataataaagtcacacaaactatctttagtggaagttggatgaaataccggaaaagaagaatgtagagatagatgataga

SEQ ID NO: 46835 - DNA, 560 bp, Homo sapiens
cactagctatttttgctcaaaacattttatcaaagtatctttcatacctgtgtgtaggttgtataaaatcataattactattaaggtcatatcttctcatatatatcttagaatttaaagtgatattaataagctggataatttcctttaggtaataaatttaacttcaaagaacatttagtggcttcaaataagagtcttccttttaggacattgatttgtcactgttccaaagtatgtgatgttgactttgaaggcaattccaaaagaggagtttccaaaaatatttggacaatgataacatcaatcaaattaacccacagcctcccaagatgactacttagactgaaacaacattcatttaaatgcaaaactctggcatgtttgttaaaaattagtaacaatatataatcagactcgagagagagtgaaagaaaataattggaagtggctgggcattgtggctcataccggtaatactagcattttgggaggctgaggtgggaagaccactcgggcctaggagttcaaggttgcagggagctatgatggcactctgc

SEQ ID NO: 46836 - DNA, 802 bp, Homo sapiens
agcacatttagatcctctataaccttcagtttattattatataactagattatcattaacctgtaataatacttgttaacagagtgtcacaccatgatctttttaagttgcaacagctaccgtaaagctgtttcttatacctgttctgaatgttccatcctgactaactctccattttttggagttccgatcctatcacgtgtttcttccatttttacccttgcttttcacatgagactttgccctctgcattgcttttccagctacaacttttgtatcttaaccacattctttttaaaatgtggtctcatagaagattcagtttcctcctcttcttgctcaccttgggccttggacccagggaccatgctcctttgcgctcagtgaggcctcttattgctgagtcttctgctgtgtttattcaagccccgtggttcttcaatataaaaacctcagtgcagttggggagaaggttgtaacagcaatagattgcaaaaaacatcattgccttctttgccaaagttaggtttaataatcaaacttcataacactctggaaattccaggaatacttgaattatcaagcaattctcacaattattggcctcttcagaggacccagaatccccaggtaaatacagtctgaaaaatcttgttcatgagtttatcatttaacaaataggcacctttaaacttaccacacatagttttatagactcagccttgaagccactagctgatactctgagatcctgtaggaaattactacttcataaaggtactttttcccctagagaaccagg

SEQ ID NO: 46837 - DNA, 901 bp, Homo sapiens
taattcaattagtcttttgtggtgaacaggtatgagcaattggatctataacctcatagttaatgagattatataactatataccattgggcagaaaaaactgtgataatgctacctaccctgcttgcctaagagaaatgtctatcaaagtgtttttaaatatataaaaccctctaagaatgaaaggtgtgcttttctttctcgtccacttctgcagcacatacaggcgtgtgtgagtatgtgtaaacaacaaacactgaacctgatcccgtgcgactcaaagtccagtcctctgaccagtagcaccagcaacagctgggagcttgtcggaaatacagaccctcaggtcccgccccgaactgactgaatcagactctgctgtttaacaaaatccccgagtgattcatagagatactaaagtttgagaagccctgctctaaataatctcgtttggtaagttttattcactaaaatgggagtcctaaatatttttctcataattagctccataggaagcatcaggtgtgagcagtggttggcacagggagagaaagaaggcacttttacccagtatgtggtcctcctttgctgacaatccaccctccttccccagcaaaccagattatgaacctcaggagcagtgcctgacttagacatcagttgggttcaccttttatgactatgaaagatcaatggggctgccctgattgaggaagagtaagtactgtgatcttgactctggccttttaatgtggcattttccaagacaactgaaaaagtaactgcaagggcgtgccagaaacattggtttaaaaaaaaaaaaaggaaagggaaaatattaaaagataagaaagacaaaagagcccattggagaatcctttgatttttctcacccctgatt

SEQ ID NO: 46838 - DNA, 1206 bp, Homo sapiens
ttgtcgttttacttagactaggctaccgaaaaacatgcaaaagtctaagttacttccgaagggaagtgaggggcgcgacccggggaaggtagggactgcggattgcggaaggccgagcagcggggctcggcgggagggcgccaagcagctcaccttcacgtgctcatagtagctcccggtgttcagcagcccgacgcctctgaacgcggagtcgcacttcagtctgagcagcaggtggtccacaacccctttcaccatccccgccgccgtggagatatcatcgcggctgagcttcaacttctccaaaaccgcccggagcttcgaggccccaggcgccgcatccctccgtacgagaatgggggccgagaccggcaggccggggctgggcacgtcccagggcccgggcggaggtcttggcttcgtggagcagcgcgcgcccctctggcggcaagaaccagccctggaaagagccggctcccgagccgcaggaggctccagcccctctgccccaggggcgctggtggcgtcagacggctgcgtgtcctgggcgcgctgaggggcctttttggcgcgggccccagttgcgcggacgggcggcctctcctgggtgtccggggcgctctttttctgccgggatcccgacttcctggcggggccgaactttcccgccttaggcagggcggcctcgggggcagccggagactcggtgggatccatcggggcgcccctggcattccgtgcggaagccttgggggcagtggctccggcctcggaagctctctgcatggcctttccgtgccaaggctgcatggctggcgctttctgttccccgaaagaagaatccgtttcaggaaaaggccgcaagaggaagagccagcagcagctgttggaaaccaagcactactggcgggcacacaagagtctgcgacccgaaggggaaccccaggctgggaagtcgctgggagccacgcccatgccgcgaagaggctggccgcggcctttcctgaggctacaaaagtctcgaagtttctaactctccaggcaatccgtgcccctgtcttaagaagatgaggtagggccgggcgcggtggctcacgcctgtaacctcagcatccgagaggccgaggcaggcgggtcgcttgagctcaggagtttgagaccagcctgggcaacccagcaagacctggtctttcttataattaaata

SEQ ID NO: 46839 - DNA, 2134 bp, Homo sapiens
tgaccaggatggtctccatctcctgaccttgtgatccacctgcttcggcctcccagagtgctgggaatacaggcgtgagccaccgcgcccggcccgaatctattcttattttcagcccttagtttttatagacaaacagaaggtgacggtgtatcagattgtcagatcacaaagatctgataaggcaaagtgatcaaattcattgatcgtaggtggccacctggcgataaggactgcagggcctaagaaagtacaaaagatgacctttagtaggagctcccaacccagaaccacaggaaatcaaaaaaagcccgcacgggcggatcacgaggtcaggaaatcgagaacatcctggctaatacggtgaaacccagtctctactaaaaatacaaaaaattagccgggcgtagtggcgggcgcctgtagccccagctactcggaggctaaggcaggagaatggcgcgaacccgggagggggagcttgcagtgagccgaaatcgcgccactgcattccagcctgggcaacagagcgagactctgtctcaaaataaataaataaataaataaataaataaataaataaataaataaataaataaataaataaaaataaaaaataataataataaaaaaagcccgcacgaactaggaaagaaaatacacaaccggccctccgtgcgatcacccatctccctcaccaggaaagtagctccaaaccgccaatcagcggcgacgctggacgtagacgtcctaccccgtgatattaaagcaagatggccgcgccctgcagattgtctcttgttgcgtaagtttttttgaccgtcactcgtgtcagcttcaaagtcagatagatttttctcccagcatgttctacttccgaggctgtggccgttgggtcgcggtttccttcaccaagcagcaatttccgttggcacggttgagcagtgacagcgcggcgccccggactccgcacttcgacgtgatagtcattggtggaggacatgccgggactgaggcagccaccgccgccgctcggtgcggctctcggactctgctcctcactcaccgcgtggacacgatcggtgaggagcgcgggtgctgtggaacttggcgtaggacgcaggctgcttccttcccgcctcccccggtctgaagcgggggacctcttcctttcctcaaagctagtgagaatcctaccttctgtggttttagcctcgatcagtgtctcgcaaggatcaggcgggccaggccagaactctatattagtctattctgcgaaccatagattatgctgctgctgacagtcgtccgttgtaggaggttggggttcggggtcagtgccttgggaaagggagctaccaactactcgctggtagcttcttagttcattgctgcgtttaccttctactatgttactccagataaagggtgaattaacattattaacaatggtttatggccaggtgcagtggctcacttctttaatcccagcactttgggatgccaaggcaggtggatcacctgaggtcaggagtttgagaccagcttggccaacacggcgaaaccccgtctctactaaaaatacaaaaattagccgggcatggtggcgggcgcctataatcccagctactcgggagtctgaggcaggagaatcgcttgaacccgggggcagaggttgcagtgagccgagattgcgccacttcactccagcctgggcaaaagagcaaaactccgtctcaaaataatgataatattaataaaataaaaaaatcctttattaaacggttcttgtgtttttatttaaaaacatttttttagagacagggtctcgccatgttgcccaggctggagtgcagtgactactcataggcacgatcgttgcacattacaggctccgctttctggactcaagaacttttcctgcctctgcctaaccagtagctgggattgcaggtgctcagtactctgcccagcctgatctttgtgtttctgtcaagattttgtgatgccttttggaagaaccatgctaccttttttttttttttttcttttgagacagagtcttgcactgtcacacaggctcaagtgcagtggcgccatctcggctcactgcaagctccgccttccgggttaa

SEQ ID NO: 46840 - DNA, 980 bp, Homo sapiens
gcgagactctgtctcaagaaaataaatatatatgtatgtgtgtgtgtgtatgcatgtatataattatatatattatatgtaggagttggggagaatatgaaaacattgtgtgtgtgtatgcatatatatattacacacacaatgttgtcatattctcccctaactcctacttatccttcaggtctcagctattcctggcaaataccttctctggccagtctaaattatgtccctttcatttactcttctccctcatggtatatttctcttttccttcatagtaccatcacaactcaaaagtagctaattttatttattgaatctctatctcccccactaactataaactcaaaggtcaataaccatgtccattttgttcatagctctatccccaatgcctagaacggtgcctagaacatagtaagcacaatattttataaacaaattacttcactgacctgcaaaatatcagtttaacactcaggtagtctatttgtcttcctcaaaaaagttgatctcttaattactaaatggttcaaccactttggaaacaactcggcagtttcttaaaaagcatacgctttgccactcagcccagtaatcactttcctagctatttacacaagtaaaataaaaacattattacatacaaaactatatgtggacatttatagcagctttattaataattgccccaaactggaaacaactaaatgcccctcagctgggaatgaatacacaaactgtcatacacccattaaaaagtaagagattactgatatatacaggctcacgcctgtaaccccagcactttgggaggccaagacgggcagaccacctgaggtcaggagttggagaccagcctgaccaacatggtaaaacccggtctctactgaaaatacaaaaattaggcaggtgtggtggtgggcacctgtggtcctagctactcaggaggctgaggcagaattgcttgaacctag

SEQ ID NO: 46841 - DNA, 3128 bp, Homo sapiens
ggcatctttattttttgagacagtcttgccctgtcacccaggctggagtgccctggcaagatcttggctcaccgcaacccccaccttccaagctaaagggattctcctgcctcagcctcagttgggactataggcatgtgctaccacaccttgcttttcttttgtatttagcagatcttctcgcctcagcctcccaaagtgctaggattcgaggcactgcgcccagccttttgctttttttttttttttttttttgagatgaagtctttctctgtcgcccaggctggagtgcagtggtgtgatcttggctcagcctcgtaactataggcacctgccaccacacccagctaattttgtattttcagtagagatggggtttcagcatattagcaaggctggtctgaactcctgaccttgtgatctccccacctcagcctcccaaaatggtggaattacaggcgtgagccatgacctggcctgcttcattttctaatatcccttgcttagaattattgcaacattaacgtttatcttcattgtcattgtctcccatagaacccacaaaactaaaccttgagatccatgggcctgctaaaaacagtcccaaagtaaatgacaaaaatgtttaattgccaataattaggtaagagaaaaaggacagttaaatatcagggtagttctagctgaatgaaatcttttagaattacactaaaaagtaaatggtaagttactaagtttggaacttcatctcaaaagaaaaaaaaccatgaagataacacaatgctaaaatgtggcctgtcagtgtaaactgtcaacattctccactataaagaactgaaactgggttgaggttagtaggtctgaacaaatcgtgtcccactaagagcacatgggttcttccttgagtcactgccgaggccctggcacatctgagatttaaaagataaatatcagattaactgggaaagatacagtacaggcagatcacttgagcccaggagttgaccagccttggcaacatggcaaaatacaaaaattagccaggcgtggtggcaaaaacctgtggtccctgctattcagggaagatcacttaagcccagaagtcaggactgcagttagccgttaacttccactccaaccagggcaggagtaaaaccctgtctaaacaaaaaaagccaagcactaccttgaaatcaactgaagttagctctcacttttgaaatccactccaaaatttgtaaccaattccaacatagtaactgttaaaagaaatgccacttcatcttaaagcttaaaattcatttattgtagtgagcaagtttgtaatgaataccagcaggtggtgctcaagccacagttgtctaagacactgggtttcacaggaagttaatctcaatctcagtatatgcaagtaaactgactcattcctgcttccagtgggaacaatttttcagttaaatcttgcttccttgcatgtcaagaattctctactggtaaatcttacaggtgtcaactttcattatcagggcatctattggccatctattaaaggccttacctgttttttctgtcatccagcaaatcttagactatttacttgtgtaaacattagatagcaaagaaactaaggacaaaaatctctagttcaatttagacttgatacctcagagcactggctgatgggaaggcattttatctaattcagactcagatgagggaaaacgataacacttcattacagacttgtctatggccaattcaagtacctttgaatcttgagcaatacacattgccagtcactttaagaggccttatctcttgggctgctttaactcctgcttagcatgtccttaagaacacatgtcctggccaggcatggtggctcatgcctgtaattccagcactttaggaggccgaggcgatcacctaaggtcaggagtttgagaccagcctgaccaacatggaaaaacctcatctctattaaaaacaccaaattagcacatgcctgtaatcccagctacttgggaggctgaagtaggagaattgcttgaacccaggaggaggagattgcagtgagattttgccattgcattctagcctgggcaacaagaactccatcttaaaaaaaatttttaaaaaccatcacacaaacagaaagcatgtcctttaattttacctatccttcaaacttaagcaaaaattttccttttataaccaaaaaaaaacctttagacacttttacatatgggaggtcaggcacagtggctcatgcctgtaatcccagcaggaagatcgcgaaaagcatttttcaaatgcacaaatgcttaaagattcaggagtaagtgggctattacacctgttaagcctattaccatgtagtttcattcctagtgaccaagtagacaaactgctaattatcaaagcataaaaggtattagactctgcaggagaaaagcaatgtagattagtctaattttatagctacttcaaattgccatctttttctattagaaccttgttcctattctgaatagcactcaatagaacttgtgaaaccatcaaactggcataaagcttactccactgacttcaaaatggacccttccactcatagggtgtacactagccactacacttatttcttatgtcatggcaaatagtcaactttcactgcccagtcattttaacccacgtttcaacatgcacatcccagtaatttggaaacattttgtttccaaagattcacttaacattggtttagcaacatgaagctttctatgcaacacaaggactcagtttttggcctgttttagtgacaggcaatcagcaacatgctgcatttctctccagtgttgtaatcaaagcaaccctcccatagctttaaatgatattccttccccttccaattatgtggggggaaaacaaccctattctccacccagaagtgttaactcaagaattacattttcaagaagtttccagattcgtaaaaccagaattagatgtctttcacctaaatgtctcggtgttgaccaaaggaacacacaggtttctcatttaacttttttaatgggtctcaaaattctgtgacaaatttttggtcaagttgtttccattaaaaagtactg

SEQ ID NO: 46842 - DNA, 5708 bp, Homo sapiens
gccaattttcttaatgtaagtgctgacttccttaacaatttcctcatatctcttctggctgtagggtggctcagtggaatccattttgttaacaccgacaattagttgtttcacacccagtgtgtaagccagaagggcatgctctcgggtctgcccattcttggagataccagcttcaaattcaccaacaccagcagcaacaatcaggacagcacagtcagcctttaaagaaagcaaagacatatccctgtcaactctccaaatgacaaaaccagtgtacaaagcaagccttttgggataaagaaacctagaattattaatcccaccaacctgagatgtccctgtaatcatgtttttgataaagtctctgtgtcctggggcatcaatgatagtcacatagtacttgctggtctcaaatttccacaaggagatatcaatggtgataccacgttcacgctcagctttcagtttatccaagacccaggcatacttgaaggagccctttcccatctgtaaggattaagagtcgttacttggttactaaaacacaaactccagcttcaatttccttgtccccagcccttaattggcagtttccactttacaactccaagtccaaagtgattttagtcactttgggttacagaagcaaccaaaaatcaaacttttataagtcggatcttaactattaacatccaaatctactcactagcaatacgattacagaagtcaccaaaagcaaaattatttcataagtaaggtcttaactattagcattcagatctaaaccactcactagttctggggaaatcacctaatgattctgctggtaaaactcattttagttgatctttccctttctggtattaaacatacctcagcagcctccttctcaaatttttcaatggttcttttgtcgatgccaccgcatttatagatcagatggccagtagtggtggacttgcccgaatctacgtgtccaatgacgacaatgttgatatgagtcttttcctttcccattttggcttttaggggtagttttcacgacacctgaaatggaagaaaaaaactttgaaccactgtctgaggcttgagaatgaaccaagatccaaactcaaaaagggcaaattccaaggagaattacatcaagtgccaagctggcctaacttcagtctccacccactcagtgtggggaaactccatcgcataaaacccctccccccaacctaaagacgacgtactccaaaagctcgagaactaatcgaggtgcctggacggcgcccggtactccgtggagtcacatgaagcgacggctgaggacggaaaggcccttttcctttgtgtgggtgactcacccgcccgctctcccgagcgccgcgtcctccattttgagctccctgcagcagggccgggaagcggccatctttccgctcacgcaactggtgccgaccgggccagccttgccgcccagggcggggcgatacacggcggcgcgaggccaggcaccagagcaggccggccagcttgagactacccccgtccgattctcggtggccgcgctcgcaggccccgcctcgccgaacatgtgcgctgggacgcacgggccccgtcgccgcccgcggccccaaaaaccgaaataccagtgtgcagatcttggcccgcatttacaagactatcttgccagaaaaaaagcgtcgcagcaggtcatcaaaaattttaaatggctagagacttatcgaaagcagcgagacaggcgcgaaggtgccaccagattcgcacgcggcggccccagcgcccaagccaggcctcaactcaagcacgaggcgaaggggctccttaagcgcaaggcctcgaactctcccacccacttccaacccgaagctcgggatcaagaatcacgtactgcagccaggggcgtggaagtaattcaaggcacgcaagggccataacccgtaaagaggccaggcccgcgggaaccacacacggcacttacctgtgttctggcggcaaacccgttgcgaaaaagaacgttcacggcgactactgcacttatatacggttctcccccaccctcgggaaaaaggcggagccagtacacgacatcactttcccagtttaccccgcgccaccttctctaggcaccggttcaattgccgacccctccccccaacttctcggggactgtgggcgatgtgcgctctgcccactgacgggcaccggagcctcacgcatgctcttctccacctcagtgatgacgagagcgggcgggtgagggggcgggaacgcagcgatctctgggttctacgttagtgggagtttaacgacggtccctgggattccccaaggcaggggcgagtccttttgtatgaattactctcagctccggtcggggcgggttggggggggtggtgacggggaggccgcctggaagggacgtgcagaatcttccctctaccattgctggcttagctccaaaggttgtattgagattagggtgtaccttcgcctctcaatcagcctcccgtcctcagccttgccatctcgctagtccgggacaaatccctagagcgtcttcctctgcgggtctcagcccagcccggggttggctcctcctccgccccggcttccgcgcccctcccgtgtggcaaggagtaccaggcccggggaccccgaggggcttggggcgaagggtcgggactgggggcctccttaacggctcacggacttgcgagaggttcggctcgatggccgtgaaagcgacgaatccgctcctgtgctggcctcttggctccttccattcaaagccagctgcttttatggaagcccgtaacacgtcatctccccctggtactccagatgtccaggctttcagtttagaatagactcagtcctacagttagctttagatctaattctagttttgttacgccaaaaagttcctgcgagtgtgtgtgtgtgcctcatggtactttttaaattaaaaggtgtacagttatttgattgcaaacataaggaacctaaaatgctttcagattttccacatgatctcatgtagaggctaagatctacagcatcagcaagtttatccacccagtttcctaaccccaacacttgctatgaagtcacagcttctcctatttaaataagtgcctattatatttaaataagtgctgtcgttttctgtcatcctatcgattgtaactgcattttagcataaatctagggcaagattggatgagcttggcctttttggatggctatcaaggcaggccttgggaaatgctcctctgaggaaagaagaacgtttatttttaatgagctaattactagatcattatgtttcttcttccagctgtagaatatcattgcccagcttctcgaacaaacttatttattaacaagtatttgagaacctactatgtggccaacgctaagtactgtggagttccttctggagaggaaaccacaatcaaattggaagaggaaaacaagttgggaagcagttgaaggcaaacgctatggtgctttcttggtttctgtatctttgtagtgtagtttttctagtcctttcagttttcacagtccacttttttttctttctttcttttttttttttttttttgagacggagttctactctgttgcccaggctggagtgcagtggcgcgatctcggctcactgcaagctctgcctcccgagttcaagcgattcctcctgcctcagcctcccaagtagctgggactacaagcgcgccccacaaatttttgtatttttagaagagacgggggtttcaccatgttggccaggctggtctcgaactgctgacctcaagtgatccacccggctcggtctcccaaagtgctgggattacaggcgtgagccacggtgcccggccacagtcaaagtttttcctcaagcccctgtgattgcggataatagtaaacgctttataaataccttacacagaatgttttttaaaatatcacgcaaggaatgacaaaattacatgaatccttgatttatacctaagtaacatattgtgcaacacagactgggtgttctgaatgttgcgatagtggccgagactttcattaggtgaagggagatctcaattctcgcgtttaagaaccaacactggaccgggcgcggtggctcacgcctataataccagcaccttgggaggccgaggcggacgtataatttgaggccaggagttcgagaccagcctggccaacatggtgaaaccctgtctactgaaaatacaaaattagccgggcgtggtggcgcatgcctgtaatcccagctacttgggaggctgaggcaggagaatcgcttgagcccgggaagcggaggttgcagtgagtcaagatcacgcaattgcactccagcctgggcgaccgagtgagaccttgtctcaaaacaaaacaaaaaaccaatacctttgagcccatcggagccatattattgtgcgttaggggtagtcactggccacgagcattttctcagggcagagatcacatttctgctctcagtggggccggggtgggccggaagccggagagggactggaacgccggtccggggaagccccgcgcgcaccggggcgcaccctgcttcctagggagggaggctggggcggcaaggcgggcgcgggtggtccttgccccgcgccagctcgccaggccacgtcgctggcgtttttccagcgctgggtcacctgcgggccggcgggttcccgcggcgaacagctgggtggtatggatacgccgctcgagcctccgcagcgtcaggtcgccagggtccgccctgccactcgccccaccttgaggtaacttttcttccgccttctgactgcggaaggaagggcctgggaggaagcagaaaacctcacgtggctcggggtgagggtcggtttttgtcaccgtgagctggcctctaaaagactttttaagtcccaagtcttctttttcttcttattttaaatccctttttccccagaccctatgttttcaacataatcataacggattccccgcacccctacgcctttacagagatccagtatgctttttactgccttaaatgttaaagcggtaacagtaacgatgttgaggctcgtaaatgtgttttggggtcataatctaaggtagtatttgctgaagatttttcttaaacttgctcataaccatttagagtgacaaacttaaaatacattgtaagtaaaaatcaacatgaccccttttaggaagaaaaacaaagatttcagttatttacataggaataaggcaaacaagaatagttctttgaggtacttaattgtgattcaccaagctttcagtatagtctgaccactctgctattagtctaatttaaagcagccttaaatagttacattttaccatggcttgccacgtgaaaatgatttttaaatcttttcatctgctgtagctacctctgaagaaaagatgatggcccggtgcggtggctcacgcctgtaatcccagcactttgggaggccgagtcaggcggatcacctgaggtaagagttcgagaccagcctggccaacatggtgagactcccgtctctactaaagatataaaaattagccaggcttggtggtgtgcacctataatcacagctacttgggaggctgaggcaggagaattgcttgaacccgggaggaggaggttgcagtgagcagaaatc

SEQ ID NO: 46843 - DNA, 545 bp, Homo sapiens
aactacaaactctaccttaattaacagccttgctattcttttccaaagctctttttgaagttacgcacccaactggtcacatgtgaggcattttctcattctctgtacttcccaaatccaatccattcatagtttgtccttctcagtaacttaacttatgccttcatcagtattaaactattccagtccacgaaaagtagttttgtaaagacctaatgaaatagctagggttttattttttatttttattttttaagctaaaacattactcaatttgtgtggccatgttgcaactgtgagagttttggcgagtcaatattagctcacgggtaacattcattaaaattcaaaccagttgttaacttggaaaacagcaatgcaataatacagccacttggagtttactccctgttcagtgctgtcctgagttcccaggggatacaaaaggatcacactggccaggtgtggaggctcacacctgtaatcctagcactttggcaggccaaggtggatggatcaccctaggtcaggaattcaagaccagc

SEQ ID NO: 46844 - DNA, 2567 bp, Homo sapiens
ccagcctgggtgacagagcgagattccatcttaaaaaaaaaaaaaaaaaaaaaagcattgttaaaatactgtgctattttggctgaaaagttagagcaggacaagcctagaaactaggacactgggtagcttaagactaggagacagaggcggaagggacagggtccacaaacatttaaagaatgtctgccatttgagtgtgcacaggcagctacacattcctgccccaggcctctgggattcctgcatatttagtgtagagaataggaagccatatgcaagttaaaatacaaatctgtattccttattattaaagtgtgttttgccatggcattttgaaccaacgataatcaaatgagccactattcaacttcccacctccccaaaattggcctgaaggactgcttggagggaagttttaagagatagtagctcaaatattttgctaatgcagtttcgaaaatgctagagtagatgtgagtaagatgatgtagcctgcatcttccgtcaaaggtgccatttgatggttttctaatttctttcttttcagagtctcactctgttgcccaggctggagtacagtggtgcaatctcagctcactgcaacctccacctcctgggctcaagtgattctcccacctgtcccaagtagctgggaccacaggtgcacaccaccatgcctggctaattttttatagacatggggtttttccatgttgcccaggctggtcttgaactcctgagctcaagggatccacccaccttggcttcccaaagtgctgggattacagatgtgagcccccgtgcccagcttctagtttgctttttaatcattactcaaattcacggaagaatttactggctctccagtttgaaaccaccctggaatttacattcataacctcctattatatgccactaaacatcaaaaaaaaattttttttgatttcccattgttttgagggagccaggataacacatcctagctggtggccccacagttattcccgggaggtggggcttcctggtgagtttctggtgtattcttggtgtgttctcggctcacagggcggagtcaggttttcctcatgctcagccagcttggtgacaaattgaggttgcgtaagggagcggggtacaaagtacatgtgctgtgcttcagtttgcatccgcctggtctgttacacatattatctggaaaatactgtggggtaggtggtgtgagggcaaattgggaagaagaccaagtgaagcattaaggtgaagccgagcagaggtagggaagggtatgggactagcagccaaggatttaggatttagactgccaaagattgtgaactgaggtaggaaatgggttcttggagtgactatgattacagcaagccaactggggctgcctggttccagattccatgcaagccaggatgatgatgatctgcttgatgtctttactctggagctacggcagaaggcttcagcactttaaaataatgtttgtcatacctcacaatacacccaccacattacctggaggccaggtgaactgaaaacacagattggtaggcccagagtttctaattttgtaggtttgggtaggactcagtaatttcctttttttttttttgagacgaagtctcgctttgttgcccaggctggagtgcagtggactgcaacctctccctcctgggttcaaacgattctcctgcctcagcctcccgagtcactgggattacaggtgcccaccaccacacctggctaatttttgtatttttagtagagatggggtttggccatgttggccaggctggtttcaaactcctgacctcaagtgatcctcccgccttggcctcccaaagtgctgggattacaggcatgagccaccgtgcccagcaataatttgcattttaacaagtttaaaagtaatgcatattctttgaaactactggtccttatagtacactttaagaaccattgctttaatatgatgcctggttaagaaactctttgccttggccaggtgcggtggctcatgcctgtaatcccagcactttgggagaccgaggcgggcagatcatgaggtcaggagatcgagaccatcctggctaacacggtaaaaccccgtctctactaaaaaaaaaaaataccaaaaaattagccgggtgtgctagcaggcgcctgtggtcccaactactcgggaggctgaggcaggagaatggcatgaacctgggaggcggagcttgtagtgagccgagattgcgccactgcactccagcctgggtgacacagcgagactctgtctaaaaaaaaaagaaactctctgcctcagaaatcagactcagaaaccaagtggcttgctgggtggtcaagaagtgtgccccagggccagttctacaaatttccaagcttcttccttccccaaatcctgccagcctgcaagcatcaattcagaaatagttatttcccagtcattttgcccttgttacatatcttccagttagtttatgtgcatgttgaatgtaacagttgaacaagtatgtctttgaatataataatgtctttttttttat

SEQ ID NO: 46845 - DNA, 2620 bp, Homo sapiens
tgatgtcaacagaaattgttgcgtgcgtttacagataaatctccaagtatttaagaaaagtggagcaaaatacacttactaggtctaagcatttttaacaaaacaggatatttttcaaagtgtagtgctgaattaggctgtctttttttttttcctttttttttttttttgagacagagtcttgctctgtcacccaggctggagtgcaatggcgtggtgtcggctcactgcaacctttgcctccgggttcaagcaattcttctgcctcagcctccccagtagctgggattaaaggtgactgccaccacgcctggctaattttggaattcttagtagagatggggtttcaccatcttggccaggatggtcttgatctcttgacctcatgatccacccaccttggcatcctaaagtttaggattacaggcgtgagccactgcacctggcaggaaggaagatttagagggcaacttgtcaatttggatggcatcctgggctgtggggctggcaggaagctgtcctggacagggcacagagtggccaggacaatagggaggagaggcaccggctggggggatttgccagaggcggtgcctcccttccccagcagggcatgtgctccagatcttgtgccacttgacatgcagagcctgggtgcaacctgcagaaaccatgtgggctgtgccccagccttggggtgggtgtggacctggtctccctggggatactggaagggcctctgggagatatttagggcgcagcctggacatctataccatgcactggcaaacatacaaacaacaaaaaaacagggtattctatatattctattgatttttaaatgttggctgcagctgctacattcctcgagagtaactgagtcccacacaagaaaccctaagctcaacagattctctattagatgattgcattttttcagaaacaatctcctaaccaccaggcctctggccaatttcttttctgagttcctgttcctgccagaaagggcaaattcattatcctgtgaggtccaagctggcctcttggaggtacagcaaagacttttacccttggcctggaagcaaaggctagccatgtggcgcccttgggctttttttttttttttctagaaagttttctggtgagttaaaaaaacgtgctcagagtcctacccacccccacccccatccccagcccaggcgagttgatgtgtggattcctggcatttgttatttgctgcccaaatgaccctggcctctgggaatgaggccccggacctttgcttttatgtcccagagctcctgtgagttttacaaaattatcataattatatttcaatcttaagagctagttctgcattttaggctaaaaagcaagaaatgagggacaagaaagtcactttttgcctagtgtccctgctgcccccagcggtcagcagcctctgacgctgagggtgtagacccgggttctgaggccccagtgtgactttccattgttcgcgaggccctcacccgctgcgccgcccgggctgagtcattctaaattcctttctttgtgttttctctctgcagtcacgcagaaatagttgctccactagtcatcttctttccttaaaccaaaaagaaagaaaaaaaaatctagcctttgatagttcttattcacgaatcagctaaaatatgagtcaaacacaagtttcctgagagctataaatatttgctgcaccccaccctactgggaaatacccacagtccgtgtttcgccaccgagtggctcaaatctggaggatttctttggtgtccggggtaaaacgatccctgctgtgagtggtttttagggcagtgaatctgtaatgtattccaagcttctgaagacagggtgtgtgtgtgtgtgtgtgtgtgtgcgtgtgcgtgtgtgtttatgctgtaacaatcggttctttaaaacgtattttttaaaatacaaagtccttatggtgaaagttatggacattgacactgggataagagagtggagaaagtagtgagctgaatggcatccttcaggagtgtcagtgttttgttttttggtgtttttattggcaagtaaatatgggtcatttggcatggccagtgggctgacatgaatatcaacaagggccactttgtaggccacagaagccaccttatcatccagtctgaggtgtaaagtttgagggtggattggggagggtcactccagcctgaagcccaagagccagaaaccctagatttggggttctaaagtcaggcggaagttttggggctgaccttgagtttttgtatttgttttttacaatgcattctttttctgattgttattattatttttaatgacccaaagcaatctatagcaatgcaattgctataaaaataccaatgacattcttcacagaaatagaaaaaaaatccctaaaattaatatggaaccataaagaccccaactagccaaagctatactgagcaaaatgaacaaagctggaggtattacactacctgattcaaaatatactacaaagtgatagtaactgaaacagcatggtattggtataaaaacagacaccgaccaatggaacagaatagagaacccagaaataaatccatgc

SEQ ID NO: 46846 - DNA, 1704 bp, Homo sapiens
tcagactctttatcctttccagatcacttttaatatcaacaaaacttctggggaaagttcaagtttcagactgtagagtgaaggctataaaacgtgcttaacacaaggggctatttgtagtgctctaaagcatgattgggaccaggatgcacacttgatcggagaggtgataacactgttggacatgttagcgtatttcagttgtttctgacagtgagagtgcttaagaaaaagatttaatacaatatatatgtataatcctacccctctaccaaagtctagacgattatggactgagaatgtgtatgaggaaactgatagtttcaatagttttttagctcagttgggcaaaagtggcttctcactcaagcacaggactggcagtgatgtaacacttctaagtttccgcctcccccaacatcaagataaagtgaaagtaaacaggcacttggaaaattactagtgttcttcctcctccaggcacataagaaaagggggcagaaaattccttacatttcatttcttttcagtattgcttatgctcacagctttcctttgcacagctcctagaaataattttctatattatcctttgagagtaaaaacttttataattggcttttctgcttatggttgctctaaaaggcagaggcatctgaaaaggctttgtgatccatcttaatttacatgtctatgagaaagataatttattctttaactgaaattaaacatttaccccatgtctcttcttctgaggcagtaacatgcttttactgagaggaaccaggccatttcctatagtggtcttcctgccttcacatttaaatgttacatcagtctttttctgtttgggggaatttctctctctctcttttcttttttgtgagacagcgtctggctctgtcacccaggctggagggcagtggtatgatcttggctcactgaagccttgaccacttgggctcaagctatcctcccacctcaacctcctgagtagctgagaccacaggcatgcaccaccatggctggcttttttgtttgtttgttttgtttttgtgatagctttggtcccaatatttgggggaattttattttgaacatccagaggggagataagataatctactctgcaacaaagtctaaactcagatatctctatttctgatttcctgaaaacgaaacaaaggctgaagtaagaaagacattaccatggctaatacaaactgctgtcttcagcgtttgtctcaagttctttcataaactggactctcaaggtcagttggcacgcttcttccccattggatttgcttgttgggtggataataatgcttttacatgagaggttttgaaggctggagcttataaacaaaaacgcttgataaataaaaatgtgagctgcaggagaaaagggacttggcttatttctttttttttttccacttccatgtcgtcgtgcaaaaagcaatgcctggtacatagtggatgctcagtaaatacttgttgaataactgggagaagtattttgcatatacaaaactaagctactctcaaatactttcaaaactatttgctaataattaccatttataacttattttgatgttagcatatttattcattaaaagcttgcactactgttgacctggagccttattgaaaaaaaaaattgaaaagcagtcggcacatttatttaattttttgggt

SEQ ID NO: 46847 - DNA, 2714 bp, Homo sapiens
gcaaattactttagaactccataggtatcttgaggataactgaaccttttcctaacttaaatcatagactgccagacggaaaaaaaatgtcctcgatgtttttagtctcttactgcacaatgtcaagatatcagctgggttatacaatagttgccctctgcatactcacaaatgttaactccagtccttttttgtcttccctccccgcctaagaagctaccaggtcacatgctggcggatacgcagtggcggaaacctagcggtgacagggaaggacagccctctgcctactgatctgcaggtttctcctccagtttgctcttacaccggggtcctccgctcggaccttagcccattcatttgatgattctctcccagttcgttcttccactgggtcccttgctcagcactacccaaaataaccaccagctcagcgccggctgcaccgccgctcccccgcccccgcccccgcccccgcccccgcccggtggggctgcacctgccgaggccccggctcggctccgcgatcacggtcgcggcccccggggttcccgaggggcttctgcgcaccgaggcaggcgggactgagcggcactctgaacgggctcccctcttaatgtcccctcgcgcctgagcagctccggtcccgccggcgcagggtgcgggtacccgggccatgccggcccagagaccgccgcccccggtaccgctgcccactcgaagcccctggacgaccccgccgcttaccggcttcggcccgtggggcgcccggtagaagaggcgtgcggtccgtgctctcctcgccatcgttccgggccaggtctcgaaccggagacctcatgacgcctacgtgagcaggtgtactcgccacctggcagagaagggagcgccggcccgacagcccgaagcccccgggccgagctggctggaccgggcggggcgggggcgatgacaccgccccgcggccacgtctagtccccgcggtcccgcccagaggcggccgcgccgactccgcccccgccgccatcttaggtgtgggcaactctggcttgggttggactagggaagcggagttctgggagttctcgtaggattggcgcaaagtgagcccgctccgcccgccggtctacgcatgccggggagccggtgttcggacgaccgtctcccgctcctgcacccccttgtaaagtgcaggggccaccctgcccgcagcgaggatgagtgggggcttgcgggcgggcagtggggacttgaattgcacataattaaggggagggcttcgaccgaactagggaagtgggtggtgtgcatttcacaacttgacattcgcttgttagcggtcagttgccatactgttagcaacctttgtacgatctacctcgtgactgtggcggcatatttacctcgtgactgtggcggcatattgtccctaaaatagcttttttttttttttttttttctcccaggcagggtcttgctctgttgcccaagctggaatgcagtggcgcaatcgcagctcactgcaacctccaactcctggactcaagcgattctcttcagctcccccaagtagctgggactacaggagcatgccaccacatctggctaattttgtttctactttttatttttgtagaggcttggtcttattatattgcccaagctggtttcgaactcctgggctcaagcaatcctcctcggcctcccaaagtgctgggattacaggcgtgagccactgctcctggtcctaaaatagcttttaggcggaaaaacagcaatggaaatttgttgagtcctatgatgttgctggttttataggtaaaagtaatcaacataggtagtttcatatggttcgacctatggaatcctctgatgtatgtgtgcatgctttatctccacgatagaatttggatagattgtgctagcatttgcggactctgaaagtgaaactaggaaaacccagcttgccttggcagggcagatctggatccgccaataaaggctgtctctgtggaggtagaaaataagatgtagatgctctcggagagtttggtgtagacagggaagacccacaagccactaattcagtaaaccaggttagaagcttagtgaggttcacgtgagaacaaaggggagggtcctttacctagaagggagggcgaggatttctgtaggcatccctacctccagatcagtaaatgctagaaaagttctcaagttaaagcagcaaatcaagccttgtttctgagttactgaattaccatgtagatttttacactctctaagggttgtagaaaaatgcaattttcaaactggattatgcagagtcacctggcaaatccttttaaaatgtagattcagattcagcagatctggtgtgatggttaattttatgtgttaacttgctggttgtctttggatgaggttaacactaaaatcattgaactctgggtaaagatggctgccttccataatctgggtgggcttccttcaatcagttgaaggcctatctagaataaaaaatccgactcccccacttctcttgcccaagcaagggagacttctccagcagagtgtcctcagacttcatctgcaccacaggtcctcctgggtctccaggcatgtgcaccatcatctgttttgggtcgagttggccagcctatattgtgaaagccaaaactttattacccaaactacccaattggggctgtttc

SEQ ID NO: 46848 - DNA, 604 bp, Homo sapiens
aggctgcagtgagattgtaccagtgcactccagcctgggtgacagagcaagactccatctcaaaaaaaaaaaaaaaaagagaatctaacctttatgttccaccatgaccacaggtgattcttagtcacattagaatgagaacaactgccctttggtatctcacaaattgtactcgaccaaatactggaaagctcgagggtgagtagcatgcccctgcaagcctgtgatgattcatggcggcggagggaaggctcctcgtggactttcatgtttgcttttaagcaaccctcaaccctaagcgctggtgttcattttcagccgcagagaaacatgacttggggtttgattgtgaatcaacgattgggtgaagttaaaagtgaacacactgattctttaaactccaagttaaacatgtgctgctcctcttctagcactggatgagtcactgtcctagtgactcactgaaggattgtggtggaaatagaaaacagatcccataagaatttgggctgggttactgttgatcctttatgtcctgtgaagagggctttataatgctgaaactagttgtttccccacagacatttcttctcattaatgtatt

SEQ ID NO: 46849 - DNA, 852 bp, Homo sapiens
agctgatttggcagattctctgataatatctattggtgaaggctgagcataaggttccaatctgtgtaagtcctatgaccccttcctgaggggagaggactagcctcatggactagagaattactcttgatcctttctgctgcttgcctctattcagtgtttcactcttaaacccttggggaaaagagcaccagtaagagaaggtctcctgaggttatgattcaccagccctgagggtttggaggaggaggagaggaagagtgaatgcttgagggacatgggtctgtctgcatgttttcttcactttcccacactagaaaggcagaggtgctgacctggtattatcttttggatacttgcacaggccgtctgagctgctactgctgttgattttggcagtgaagttgccaggactgtgtgtcctgaggctaccccctggagggaaataagagcaaagtttaaaaacctctcctccagcctgttttctgactatgtctgctgctgtgtctagctgccttctgccttagactgaagcgatgcactttctcccaagaccaattcaagatgtccaccactcttcctggggttttctcactgtgcacgttaaagttttctgcttgcttttattgtttctccagttggttctggaggagggagtgaggatcctgtcatagtagactgttttggcttcttttttttttttgttaaatttatatgtgttgtcaatagcctcttgaatgccttggaataatttcagtatgtggatcttccaggaataatttttagacattagccttcttttcgttagcctatgctgcagctttgacagtgctttgtttattgagccagtga

SEQ ID NO: 46850 - DNA, 1404 bp, Homo sapiens
aggcctgatacactgggacgatttggaggacagtcgagggatccacaatgatgcatgctggtttaagatgaggaaggaaacctcacaggacactcccacaaggagacatacaagttctctccaggttgtgaatttctcccttacttttccatgggagcagagctggtggtttggattctcggtgttatctaagcctgctcaagaaattcactgcaaaactggtgattgtctgtggcctcttctctgggctggctgcctctagtggaagaatggtgctagttgttgatattaatggggaatgttggaggtcagccacctgaggggtaatttccataagcactgatctcatctccatgatctcatctctgaccagtttcacaatatctcatacttggaactgccgttgttgatgtgatctgggggtgtggaggcacatggtcctctccttgaggttggtctttctgtcacaaaagtacctcaaacttttgtgtagggattgagggcctcaaacctattttcttttttcttcttccctctcctctccttctcctctcttctttccttttcctcttttttcttaggttgaattcatagttaaactctggctatctggagaatttagtccttaattaaaaattgagggagaatgtcctggactctcttgctgatttcttttgtgaacattaattattttgcttctctgtgatccctggctgcctctgaaaaatgagataatatactgcatttttaaaggttatgtgaaaactaaaacatgataaaatgaactagagtagtgataatgcctatcatttaattttttccacttttgtttatgttttgaacatgtagaacattaacatgcttccaaaagacaaacttattttgagacatatattcaaaagagtgtctcttcttccccttttctttctccctacctctcattggtaactatatcaggcggttcttgcattactataaagaaatacccgagtctgggtaatttataaggaaagaggtttaattggctcatgattctgcaggctgtgcaggaagcatagcgccggcatttccccctaggaaggtctcaggaagcttacagttgtggcagaaggtgaactgggaacaggcacatcacatggtgaaaacaaggacaagagagacagtgttgtggggaggtgccacacacttttaaatgaccagatcttacagtaactcactcactatctcaaggacagcaccaagatccagtcacctcccactgggccttacctccaacattgaggattataattgaacatgagatttgtgtggggacaaatataccagtaacctacttcattagtttctagactatcttttctctctctccttttgcgaaaataaatgtatacatatatgttttct

SEQ ID NO: 46851 - DNA, 3915 bp, Homo sapiens
tttttattttattgcatctggtgcttagagagccttcctctacacctatattagagagtaatgcctattgtttgttgagagctttccatgtaaaaggtacttactgaagtcttttcttcttttatcatgtttaataattggaagagctctgtgatttactaggagacagtggccttggagccagtgagaagttggctaatgcccaacttcactccctgttagctgtgtgaccatgcacatggtatctgtatccgctgagtttcagtctcattatctgtgaaaaagggaataataatagcatctatgtcagagggtccttgtgagaattacctgagttaatcctgcaaaggactttgaacagttcctgacatctaatgagtgctgaatgaaagttggctaattactgcaccgtaataattcaattagaaacataaaggtataatctaatgttcccttcttcaaattaagcaaagttttgtcatcactttaaatgtttatatttcttttaccataagtcttaaatatcaccatgaaacagagtatcttgttttctttttttctttatgcattttgttttattgtaacttaaatcagatacttaaatctagggtttcttttggaaagactcagggagaagtttgggacttgaaggtgagaacacattaactgtaatttcaaaccattaatgcttatgtttagttagtcaaatatgaattttacttatagttctggatgcttctaaaatatggtatttataaagtcaaatttgtttattactgcagtttactggggaaggatttcaacatttcacaaatgagtatggttgccaagctttgccatgtctgtgctgcaaagctcaggctgtgtgcccttacctgctaatagtggaattgtgtaatttttagaaggatttttggctatcagagagtcattgataatgccttgagctggaaatgttcctgctaatggttgcttttttagtgataagttattgctatcttaactttatttttagcaagttagtttattgtgggttgtttggtgaatcctttagagtttggcctatgttttctcacactggactttgagatctgtatgcattgctttgcaaatatgaaacatctgctttttatttgcaatcatttatttgtaactatttgcaaatatgacacatttgcttttattaatgcagatacgtgagccttaaccccctacctaatttacttctgtaatgatacttcattgccaccactgagcatgtgtatatgtgtgtgtgtgtgtgtgtgtgtgtgtgtgtgtatatatatatatatatttttttttttttttttttttttagtggaaacatggaattggtgggtaggcaggcaagttggttttttggtttacctcagttggccatggccccaaaatttaagagccaccgttttagattattttgcatttcctcctctgtattgctggtctaagaatagaaaatacttttattttctactttggccttaaacttaaattaatgataccctacatagtatttttcttctgtagcaaacagtgctagatgactaagcattgaaacaattttgatgaacactagacagttaaataaaagtctgcctttaatttgcttgcttttgaatggctagaagcatcatctatgccatagtgatcttttaatttactttaatttgggatatcacaggcttttttttttttttttgagatggaattttatttgctcttgttgcctaggctggagtgcaatgacgcaaatctcggctcactgcaacctctgcttcctgggttcaagcgattctcctgcctcagcctcccgagtagctgggattacaggcatgtgccaccatgcccggctactttttgtatttttaatagagatggggtttcaccatgttggtcaagctggtctcgaagtcctgacttcaggcaatccacctgcttcggcctcccaaagcgctgggattataggtgtgagccactgcacccggctgggatatcacagtttttattttatgcattctgcttgaaaagtcctggcattttaaatttccaacagcacttaaaatagaaagtactcaatattagctcttggtttgatttcttctttccccctctctgcccatatttcctcaatatgaagtcataattagaaactttcatccattgcaagttaatgattactttgactatctgtctatttttgtgtctaggttaccagagagaacttctctatcagagggaagatggctctttcagtgcttttgggaattatgacccttctgggagcacttggtaagtgtttttgccaactgaacaaatccgtgtcatggaatgggctttcactaggtcacaatagccacgaaattgacagatatatctctatatattatagactgggaggttgctttttccttagtctggctttaaaaagagattttctttttaaagtattattttcaaacattaacaaatcaaatgtttttatttagaaaagataagttataaatcctcttttttgtgtgtgtgtgtgtgtggaagaaacagaaataaaaatactttatgatgatggtgcagctgataaaatcagttagaaatgccgggtgattgtgacacagcttttttcttaatcttccatgactaatacaagtgttgtgttactgcggtcaatgtagtttaagtttgtgtgtgtgtgtgtgtgtgtgtaaaaaacaaacactgatggaattaagtatgaacagccagtttcctccagactggaatctctatgtggctgattttggatgattaatctctcttcttgtacttatcttcaatttcctattttactcagaaaaagattgactcactgtatcaatcaggatagactaggagtgctgtggtaacaaccaacctactcaatctaagcaattaacaatgaagggatttcttgttcatgctgcctttccattgtggtcagcagggggctctgcagctgccaacgtgtccacgtctccaaaaggaggctccaggtttgccacagcccggaaagaggaggctggagtctatagcactggcaattagagacttcatcctgagtgtatcatttctactcattttatccttctcagagctggtcacatggctatgcctaacctcactggggcaggaaagtgaattcctctgtgtaaccaaagtaaaagagaactgtatattattgaatatcagtaatgtttaccacatgaaactttatataacatgaaacagatctgcttcaaattttctcttggccttggcctgactcaggatatagaaccataaatagaaagctttcagtgttgtattgcttgatgttctttttacctcagtatagtgttttgtagcagggactggcaaacttttctgtaaagggtcagattgtaagtatttcaggcattttgggccacgtagagtctccgttgcatgctcttccctcttcctccctctcctccctctttctttcctgtctttgtctttttcttttccttcttttaaaacccgctcttaggtggtggtgttggcaggtgggggctgggttggtgcacacataaacaggccctgggctgtatttggcttgagggccagatttgggccaggcagatttggcccacaggctgcagttggctaactcccattctataggagagaaaaatatcattttccccacctgaagtactacagtttgcttgtgaactatgtatgcattcttcacccacagctttggggctgactgaagcgtgttggagctcttctttggtaaatatctagaacagtccaaagatgaataaccttggacaatttatttaactctcttggactgtcagattctcagtctacaaaataatggagctggattcaacagacacattaaaaaatgctcat

SEQ ID NO: 46852 - DNA, 1290 bp, Homo sapiens
agtttaatgtctaattaaatgtctacattttttaatttaaataagggtgaagttctacttttgaatttccattccagaacatagagagttcttgactagaaattataaatctatagctctcaggtttttctttctgtttctttttccctctgtttgtaaattattatcttctctttttgtgttcctccttctactttatttctttaggataaacattcttcagtccactatcttcaggctataaccataccaactataatctcctatgtaatctttcttatgccctcaattcaaaatacatttcttttatttccttctctttcttttctttatccttcctatatggtaattattaaacttagaaattttccataaaacaaacattattgccagtaactgttattgactaaatggacaaaaggttaacacacgattattttaatgtctttgtttccaagaacatcctttatatgatttttaatttagtgaattctttttcttaaggaagtgtgttctcagtagtgttcagtaagatattatcaatcattaacacaccgcttatctgttacctaacacaaatgtgagggtattgattaattttggagagagaaaaattcagacattagagcatgtggcatcagagcaaatgtgatgaaggcaaagctggaagaaacattgaagtaagataaggacactaggaggatggaaaagtgagattacatttttatatgggaggattcttcagaatgaaatatcagaataaaacaaagtttagtgggagtaatgtgctgtctccaaattctgactcagcctgactcatactcaactttttgactcttaggacctgtcctttgaccagtaaccattcagctgagacataaagcagctggatcttatgtttggagtttggtggcctggaaattttaaatgataaacagccaaacggggtttagcacaaaataaataagatgcatcttaaattagacttgaaatatttaagtgaatggactctaataacctttctaattagccttgataaagtcttgggaaattgatttcagtccaacagagaaaaatactacaatgttggatcattcaaggctgtggtttactggtctacataattagtaaattttataaaaattgaatattgttttgatgactaaattgaaagatttataagacaatatcagtatttgcaaatatatgtaaaaatgctataagagcgaatagagcttgaagacttgatgtaatttatataattttattcttttttttttttttgagatg

SEQ ID NO: 46853 - DNA, 1947 bp, Homo sapiens
tccagtctatcattgttggacatttgggttggttccaagtctttgctattgtgaataatgccgcaataaacatacgtgtgcatgtgtctttacagcagcatgatttatagacatttgggtatatacccagtaatgggatggctggttcttcttaattatgacttttctaaacatattcatttttgcgctgcatagatagccactcgtttgcctgtgtgaagaaccaattctggccacaaacattaagagaaacactgaagcgcaacactgaaatggaggccctgtttttagtggcttccattgattgtgccagcccactattgacctttttcacttttggaaaaatttgatttactttctattttgattagacatggaggcctcaaggtccatcatgacaccagtataccatctagtcataggtataccatctaggtctttcatgattaagccccagtgaacctcatatgtgactagaattatgatatttttcatataactgtcagcttacaaggcaaacagaaatgaactacaaaaagtggtaggcccccaaacagcaaaatgaatgtacttgttcatacaaaattaatgtactatacatctttgcagtcagattcaaaccctaagatgtaacactgtttggagaaggggggatatctttatatataacagataacaagctataaaatttccactcaccattagaaaaaaatgtgtttatatataaacttatgtgtatggatggccttcagtgaaatctaaataatacaaatcttggacaccaagtatctagacgtgttataagatttgttgagtgtgggagaaagtgagagtgttttaagtgtgtatgttttatatttttaatcccaaacataaagttccttttttaccccaagagaagcctaggaataatagccagacatctgggctttccttttagtcatacaatacatgcagctaggtctgggttaattttcgtatagcatggaatgaataccaccacacattctcaagttcccttgagttcaaagtccatgtaaacaccagctatgtaaacaggaggctcagtcacaatggcatttgtggactcatgtcctcagagggtcagtgttagcaaaactataattttagcttgtaaagacccaagcccccaattttgtaatacttcataattttaccaaaatttctcaaataaaggaggaaataaaagaaagaagagagttttctccttcattcctaggtttcaaagcatgtttttagtgtcatccaaaaatcttggaagattccatagaggccacaggctactgtcccagaaaacaactagggaaattctgctgtggaaattcattgctcctgagaagaaacttgcttttaatttgtaaatactttgcaacactgggcccattgctcaagataccctttacaatcatattttctcagtggtttgtttctggacagaactccaccttgtctcctttacttcctttgcgataagattgccaagtaattgcaacattctacagtctcagtagcctgttatttgtaattggaattagacaggcttgattcatattaactgttcaataaaggttgggtgaattaaattgcgttaggaaatagaaacaaatattaccaggaaagtgtttagtcctatatgactttggttaagattatcattttagaccatttttaatcttacaagtaatatggggcatctgaaacagtcttctagcattcttttcattttcaaaattgcatttttattaagtattggtaaattataaaatttaagttaaaatatatagattttatttagatgaaatacaaatatattgaaatgcatcttaaattctgaccaattgttttgatttagatgctgtataaatgtagcttgtaattttatgtttgctccttttcctctatatgatgcaaaagttagtagttaaa

SEQ ID NO: 46854 - DNA, 469 bp, Homo sapiens
taactgccctccactcaaaagagaggaaatcctcaatcctgataataagcagttaatttttgtagtgctctgtctctcttcaatacacacaaaggccagaactgcctaagcatcagttcaccaggcaggaacagagcacatctccccacaggcttgatctctggctcgtgcgcccacatttatatgttattttttctctctctctgtacagtgccaaatgacctctgcctggaatgagtcatcctgctacccagttagcattcactcgcaacagcagatctctgaaatccagccgaggatttctgagtcaggtcattttttagagttgttgcattcctctgtcagagatttttgtctcattttccgcagagaatgaaagtaatcatttcatccatattcttggattttcacaaaagttgaccatttggagctcttcctgaattaactatccacactttttattagtaca

SEQ ID NO: 46855 - DNA, 575 bp, Homo sapiens
ctttgttcatgaagaaataacttttactctcaaagtctactaacctttcttctttatagctgccaattcttgctcaattctaaggcagatagactgtgtgagttcaaaagatatcctctgaaaagcatcaaaatcttccactgtgaacacatgggtctctgcaggaggagaggcaatagcttccaattctgagcgaacggcatccttcacaccaactgcaaagatttcaacatctgaattcctcagttttatcgcaggatctctgaaagcatctgatgatttcccatccgtgataagaatcatgacctttggcacattgcttcttgatcccttgctaggcacaaatattttctctctgacataagtcattgctttgccagtatttgtagatcctcctctgtaagggaaggtgtttattgcttcaattatatcttcaactttggtgaattttttcaaagtgaactcagtatgaggatcccggctgtattgcacaagactaatctggaccctatttggtgaaatttcaaaactttttacaagaacttccaaaaaggctctaactttaacaaagtttg

SEQ ID NO: 46856 - DNA, 977 bp, Homo sapiens
atttaaacaataaggacatttattagataacaataagcccagtggcagcagatccaagttggttaattctaaaggacaatgaagatggctccagtggtttcccatttctcccctctgtcatgtcaagcattggtttctgtcatgttatggttaaaaggtggaagtcaggcatccccctctcacacaagtgcacccagaggctggaaaggaaggctttatcctctcaaatcttttgttttgttttgttttgttttgttttgttttgtttttaatatcaaggaggaaaacttcccaaagaccgccccttacatttcatggcccagttctctcctaggccacttctggtcaagagaaatgaaatttattccgttgcttttcacacacatagacaagatagacacatgctgtagagaagtgctttttaactaatttcctcaaaagggcaccgtccacttcagctggaatgcactcaatttacatttcaccagaattttcatgagagaacctgagattatcagtatcatgcttccaatgtattctggtgtttccatgccttgttccagtaatctgttgctccataaaaagtccgtcccaaacatagctgaaagcagttaatcatttatctttctcattgatcttggctgaatggactctgccaggtagctctcgcatggggtctctacgcagctgcagtcaggcagtggctggggctggggtcatcttgaaggcttcttcactcgtatgcctgacacctcatccaggctggaaagagtccaatagctgcaggctagaacagctgggtctccttgaacctgtctctttctttctaggaagcctttctacatgctgacttcagggtaggtggacttttcacatggcaactgaggctcccttaacaggtgccccatgaaacctgtcagaagctgcctgcccttgtctaacctagccttggaagtcacacagcgtcacttttgcta

SEQ ID NO: 46857 - DNA, 1807 bp, Homo sapiens
acttgacagcaaatagactggcatgattccttctcaattaaaatgcttctctcattacatttttcctaaaaaattttaaagagggtatacatcttttaaagaagagacatgcactacatatccagttgaattaaataatgaaacaaatatgctctcgattttctaaaattacattgaggattttaatgaagcaaaacttcattaaataatttaaaaaataaaataatcattgtcgcatttttctttatcaaaatttggggaaatatttcacatgctcaaagtcgatggaggggtgaaggacaatgcacaatcgcctgacggaaataacactgcacttcagccatgactattcctaaagttccacccaaaattgaatggcttggtttttaaactgccttctcaagctcgcaaagctcaaaaccattgaaacttaaaacctttcagtaccagaaaaacacctttctgcttgatgcttccgggtgtcagacactccccacctgggtcttggttttactcagatcggagctactaacctcatcaatgaccgacagggttagaggtggtgactaagaacccaagacgggtctaacccacgagtctctggtcacttccccagcctctccactccttacatctacccagtaacggcctggggcgagaggaatagacggaagggaaagtaaggtcagggaaaaaggacacgaatcaaggtgacttcattagccgccttcggcacccctcccaggtgagggttttctgtcgtggtgcctcagcctcctctccactccctcgcccccatcatgaatgcaagatgagaagctcctcaccagcagattccgcagcatcttggctgttactgaccagcaaccgccacaactgaacaccaccaacgaaaatggccacgccggaaccggaactacctccgagtcttgcgtatgcattcacgaacttaaatctttccgggccgaagagaggcttgcgctcctaaccatagagagcaaaagaaaaactagagcggcagtacggctctatccgctctagccggctcgccgtctcagtcccgtgatctcgttcctgaccttttcgatgttcagtaggctggtccctggagctaaggctggggaaaaagcaaacgatttatgagacgaatgtaataagcttagatgaagtcaatgtgagaccaggctatcaaagaaaactagtgtctgttttgagcgagaaggcgtaaaactgggcaaccttgaagccgctagaaactgaacaaagactgggttggccgaaatacagctctgaagcctcataaaattcaaaaaagaattactcctcttacgcggatacagtcagttttttccaccgaaggaattgctgcggcacattactgttccttgtgttgagaatatgctgtaagagctgtgtcgagataccagtttttatattcttgtaccttcgactgctgcagaactccccaagcaagaagttcttccacagtgtccccaaattgtggaagaggctcgctcgcttctgaggaaacgttagggaacaagaaatgggatggcgaatctggactcaaaagtcttgctgtcccagatccagcagggcactacattcattactggagtagagaagcacagcaattatttgttgtacagaaaggctgtcggtgtcatccattttgcttaagtaatccccattacaagtgtttatttcttgtacttaccctcaagtatgtacaaatgcaaatatctaccctgtattacaataatctttccactttctacaaactcttacaaattatttgattgccatt

SEQ ID NO: 46858 - DNA, 2368 bp, Homo sapiens
cacaacttactccctgagtgtggtcactggctctttttgtaaaaaaaaaaaacaaaacaaaacaagacaaaacaaaaacccagcaaaggtagggcacattaataaacgtagcctaaaagcaaaaccagaattgaagtttcaggttatcttttatgtacatcttgccctacaactaaaaatatcgaattagctcaaaatgaaaagtactatgcacatttgtcataagtcctcatatgtgacctgataacatgcgacagcttctttacattagaatcgtcaatacctctacgactctggttcttctcccaacaatggccaaggtgtccatctctgtgtcttgggatacttcccacaaaggtaatggcactttgaccctgtcaattcactcagggttacatctacctagttacaattgccccccgcccccacttctctttttacctccgtgaacaacccccactaatcccccacggaaccacacaaaccgcccactgaagaagcgttctccacctgacctatcttctgcattaaacattcattccgtctcagctcattccgtggatttgctctttcgtaaatctcgagcaagacaaagctaggacaaacctgcaaattcaggaaacccgcagaaagagaaagaaaaaacagagaaacagagggaagggggtggtggacggcgcgaggtcagccagtcaactggattctgggcgctgggaaagaagtggagtgggcgcgtaggaccctcctcccgagcaacgccaactcccaccacagctccctcccctcacctcgatctcgcggatgttgttggaggtgacaaaaatgccaatgccgatgggaatgaagatgagaccgatgatgaagaaaataggtagcaccgtgccagccgtaaggatgggctgccaagctggcagccgttgctgtttgaaggccgtgttatccggtctccgagtcttcgcggtgccccccggagcacacgggggcccaccgtccacttcatccttcgcgttatagttcatcgccatcgatccctggggcgccgctccgcgatttgcaggtggaccacccagggggcccgccggctgaccctgacaggaaccgctcgagcgccgctgccgccgccgccgccgcagccaccagcgccaccgccacagccacctccgctgtagagcggaagaggcgggacactcttccgccaaaggctgctgacgggaagcgaaagtcggctggagacgccagagggagggagagagggaggagggagaagaaggagggacatggggaggggaaaggggaggaggatagaagcgggaacgaaaaggcggacgcaccctgatcatctgtcctgtgacgggctcagccattggatcgcgaatctgcgttcgcgcatgcgtggtcctagagctacggtgacacttcgcgtgcggtgtaggcgcatcttcgctctgttggccgtggctttagtaagcacacacctgcctgctactctggttatcgtggcgacggcaggtctggattgccagacaggtttttctttttacctcgaggctttctctgaagggagtcggagcatttaaaaggcggcctcaaggtggattgagtcgggggaggattagcagtatttgcttaggttgtaaaaccgcgactttatctaataaatcgccattcaaggtgcaaatacaaacttggaacagaggtgcgtgacatgtaccccttttgtcctaaagtcaagaatcaataatgtgacttagccctattatcttgcctctaattaagcgattctcacttattctttctctattgctaattctcacgttacatttccccttttctgtgtccacctttctcttttgcgcattgatataggaagtgttttgtaataggctgtagctttttctcttactgttataaaaaccaggacatatagcattactacaaaatgagatactccgtaaacactttaaaagtgccagctatttaatgacccaagaaaatactcgtgatataaaagttgactaagtcaggatattagagtagtgtagcgactatagaagtacaatatagagcgcaactaaaaagtgaaaatggtaactctgctgaccggatgaaggatttttttttctgtttctttgcacttttctgtattttccaaaatttctataataggcgttatgttatttgtaaaatttaaacaatatatacaatccatattatactgacatctttgaaatccaggccagagagtaaatcatatcatttgaaaacaaattacttttttttaggcttagtctgcagtaatgccttaaagaaggtaaactgaggaaagagaaaataaagagtgcttggtcctcataatttaccgttaagc

SEQ ID NO: 46859 - DNA, 697 bp, Homo sapiens
atagtcaaaatctttatccttattggattagcaatttaatccaataagcaattttttccatgcattcttttatattttaagttaatagtttggtaggaaaaatccttcaaagttgtcgcacacaagcaatacactgggttaaaataatgatgttgtaaataatatggaagtattacaaggtcttacaggaaaaaagctgtctgtttactcttcaccgccactagatataatctaaacattacattcctaaaaggatatgcaatatcactcgcattcaggctaggcaattgcattcctctcttggtcttagctgaactctgcggcatgatcttaagctttggctatttgaggtaaacgaactctgtggtcacgcctgccttggctgaaacaatctgtcaatatggacgggcatggaggagaatactaaaagcctaaaaactctgattatcttcagaaaatgtaacgagtcagttcctatccttattgatgtcagacttttatagggaacgttacatcacataaagtctgaaaaagaaagcaagccaaaacaaacagagctgcacatcaaaaagtcttaagtctcacagcaggcagagtttagctactgtagccatattcatgatttttattcagacaatggcaataaaacagaaacatgcacattagggctatgcacttatctaacttataaacagaa

SEQ ID NO: 46860 - DNA, 2655 bp, Homo sapiens
gatcatgcaataacctcaggcaacaaaaataaattacattcattacactactcttgccaatcaggaaagattattggttcgcattaggaaaaagattttaaaggacgttttaaacaataagcctttccgcttaggccttcgttaatagcacaactgaattagaacagtccattccccaaagactgcacttaatcatgtcggttttctgcatcattttaattgctgttgacttttcattgacatttagcatagatttttgctcatttttgttttttaaagaacgatactgaaagacaagaaaaatgctatcagaggactacaaacctacaggagttgagtttcagtcgtgaaacattataatcattttctgtgctttccatatttccttgaatgagaatgtattatttttataataagagaaaatttttaaaggaaaagaagttaaaaaaaaaaaaggcctcacttgtaaggtagggtatggttttttcaagtctcaggcacgtaaatgacaagggactttttaaaaaacaaaaaaacactgccatttaaagctgactggtaggatcttccctgctaaattattttggaaacttctttaaaaataaatgtagaccacgaatcatttactaaacatatgattccagtacctcactaccttttctcttcggttggctgtagtttaaattctaaggtctcctcaagaaatgacattttcacatttcttaggcatctgtggtgccagaggagcaaacccatcgcacacgccaggtctgccatggggccctgggcggtggggattttggatgtaacgtgtctaggccgagcccgcgccgtgaaaggcctaccctgccgaaagcccgggcggcgggcgcccacaagtcagggctcggtgcggcgccgcagccagctctgcccgcgagccgagtccgggctgctgagggggagccgcgctgggggcggcggcgtcggggcgggggcgggagccgggcggcagctccagcgcccgtgggggaggagcggcagcggcggcggctggagctgctgtggcgaccgacgcgaggcggtggcagaggagacccacccctgtccacatggacagtcgcaaaggcctccgctgatgcattcacgcctgggcggggtgggcggacggccgtagcggcggcggctgcagaacgagctaggggcctgggggcgcctgacggtcgcagagacctcgccgctccggcgcggcgggtgcggccattttacggcctgggacgaagggaggcgtgtttgtgtgctcgctttcattctcctttcttgggaacccacggctgggggaagtttctcaggcagcctgggtgggcggtggatggggagtcgtgggccgagaggaaccgggcccgggaagcgccgtcgtcgtcgtcgccggtcgcgttcccccggagaggcctgagaagctcgggccgcgggcctcgctgcccgccagcccgcggacaggcccgggcgcgcctggcctgcctttgtataggcccgtctgaacgtgggagcgcagcccgcctgacggctgagcccgaggcccgcaaccctgcggcgtctaccctcctccggcgcggcccctcatcccggcgagcacggcggcggtgtgggccatggattaagaaggaggcggcgtgggaggaggaagatggcggccggcaagagcggcggtagcgcaggggagattacttttctggaaggtacgtctgtttctgcccttgacggggagaagggagggtatactggaaaacgtggcccccagaaccccggatattcagttatctgcgctgggtgggtttcgggggcggtgaagtacgagggatgagcgatgacggggagggagtgtgctgcgagcgcacctggttcgagtccgcctaggcgaggggctcggctgcgagccggttcggcccagggggcgcgggtggattgagctacgagccagagttggtgggcgtcctttgagagtgcgcgctgaagtctttgacatttaaaaaattttggggtggtggcctaaggatgagagcagccagcattcacatcttgtctggtgttcatgaaaagtttcaaattgctaaggttgggtgcaactggggaccaatctaagtagggaggggacagacagtttcattgaggtgtgttttataccctctggtctgtttctcagagtttcaggcttgcttttgcagccagccttcagattaggcctggccttgtctgatattctttcggaatgtgtttttataaaaatattctgtaaaataatttatctggaaaaagagtaaggtttacagtgtcaattttggggccgtaactaaagcttattgacacaatttgagttttactcactcgtgagggaaagttaaacatttgctgtaagtagactaagccagcctcaagaaaagctgtatgtttttgttggggaaggtggtaatggggaacaatattgatttttttggcctatgaatatataaggacccccaaaatagagctaaatgttattgtaattgtagcccaagaagtgtttatattacttaatttgactatgggttcagtgtttacactttgtttagcaaaatgagtctctgctgctcagagactcattcttcttgttaaaaagaattaactactctttggata

SEQ ID NO: 46861 - DNA, 1134 bp, Homo sapiens
gtttattattcagcaaatatttgctccccacacattcattataagactattcatcctgcctcattgatctaagataggccatctgactttttttttgacaatcaaatgtgtacagaagtaacagtatgccaattctgatgctaggctttaagaggcaccacatgtttctgacctaagaaaacaggagaacatgcctcaggtagccactggaccttcatcttacaccccagaacgagacacataaacagactgaattgactagcagactactggagttgccctggtgacctgtatacttacttaccaggaaggaaacaaatggtttttgtaaatgcattgagattttgctgagactttgttggctacatagcaaaggctaactaatataataataatttggtaaatcttaataaagccttagtgaatgaattcaagttattactttgtgaattcatttcatgctttgttcacttcaaacttatgtttattattaactgtaggataatatttaactctgacacatatttaattaggaacttcctggtcagtgatgactcaatacttccttgatctatttcaagatactactatttttaagactaggaaaccaaccactaacaaacttttaatttatttaacaaacattttcaggagaatacaaggtatcactaatttctttaaatagtactccccacccccaatattttcttgtctttttatattatatacatagtaattttttatttacacagtatcaactttgaatattgtactcataaccttgagaaaagttacaatttattttttgtaaactagcaacatcatagaatattttacatgtgtaaaattgaaggataattggtgaaattaaaaattacaaattctaggccaggcacgcctgtaatcccagcactctgggagtctgagcggggtggaatgcttgagctcaggagtttgagaccagcctgggcaacatggcaaaatcccatttctacaaaaaatacaaaatattagccaggtgtggtggtgtacgcctgtagtcccagctacttgggaggctgagatgagaggatcgcttgagcctggtaggtgaatactacagtgagccatgattgggccactgcactccagatg

SEQ ID NO: 46862 - DNA, 1879 bp, Homo sapiens
aagtttccaagtcgctacatataaatgttgcagaaaaacgtgtaattctcatgtgcaagtaggcttttttcagcggatacatttagcattatagtcaattgttatttcgttgccttaaaagaagctgttttcattgtaaaggtgatgtgtttttaccatataattcaaatttgcataggtacttcatattttaaaaggtgactcacaggtatgtcactaataaaaacagtaacatttaaacgactgagaaggtaggggctctaaataaagtaaatgcgtcggcgagggtaggagcgggaagaggcaaaggggtgcgaaattcccatcccaagccccctcctccaaagaccgaatggcaacttagttgtgcgggaaggttcccccctatgcagggcagcccagtccaagccggcccgatccggggccgagtgagcagtggttcttgccgcaaccgccacgcagcctcgctgccgcccaagcgcggacacctggttcctgggtcccccgcgcggagccccggactcctcgccccttctccgaacaactttctccctgcttgaactgattctcgctgttggtagactgcacagtcacagtatccagccggacaggacctgctttgccgggactggaaacaactaccgcggcaaaagaggccgtttcgccatgggaagaacaagaactcccggcttgtccaggggcagcccctctctgcgctgcagggcgcctaccctcgccccagaggctctgcgccgcgggcggggcgaccccgggggtcgcgcgccctctcccggagcgcgccctccctcccggagcgcgcgcccgacggcctgccgcggccccggcgcccccgccccttcgggcgctccgtagccgtgacgtgcacgccgcagtgccggggactcggcggggcgccggccggcgggcggagaccgactcgggatctgtccgagcaggaagccagcctcagcccggccgctgtcgccgccctgtcctggtgcccgtccgcgtcgtcgccctcttcactggccctcatcacttctcaccgcgccctccagcttcacccgtacaggtagccccgccgccgcgcacctgccttcgctcccgcaccggtgagtgtcccagagacccactgcggggcgtcggcgccggggtctcgcgttccctggcccggccttgctcccgggcctcctcgagcagctccggggccgacgcttctgttcactgcccgaggacgcgggtgggagaagcaggtgatggatgggtgggccctgggcagcagtggggccggcggtggttctcgtttccaccgaaagacaatcagtctcctttcatgggttctcatcaccaaggtccctttgtgtttcttccctggctcccaggtagaagcagagcactcaggtgcctaactcggacttggacactccgtgatagttttattttctcttttgtaaacacgcttaaaattcagtgcagggggagcgcagtttgctctgagatgtgaagatcaaatgataccattaatagtctaatcatgtaggagaccagatcgagactttctaaagccttattcttagtctccaggtggtccagtaccttgagtatgttaatttacggatatgctactgaacaagaactttttttgttaatttccaaaaactccctaaaacgattaaaatgcttaaactctgggattttaattttaagtaggacacaatttgatggggttattgctagaacatccgtgtttaaaagtatttccatacagtttaaaaaattcattaccttttttttttttttttgagacggagccttggtctgtcgcccaggctggagtgcggtggtgcgatttcctctcactgcaccctccccctcgcgg

SEQ ID NO: 46863 - DNA, 1104 bp, Homo sapiens
ttctcttttggaggcattatatctatatgcatgtatctatgatctatatatgtgtgtgtgtgtgtatatatatatatatatatatatatgttttttggagacagagtctcattcatgccacatgcagtggcatgatctcggcttactgcaacctccatctcccaggctcaagtgacactcccacctcagtctccggagtagctgggaccacaggtgtatgtcaccatgcctggctaacttttttgtgtttctggtggagaggggttttgccatgttgcccaggctggtcttgaactcctgagctcagatagtgtgctgcctcgggctcccaaagtactgggattacaggcatgagctaccgtgccttgccggcattatataatgttcagaggaaccaggatcttttcatttaaaatggttctgattttatttgacaaatttgagtggactagaatctttaaatattttgcaacgtctttctagttactgttttcaaaaattagcttatttttcttattgattagtgtaagaatgacataatggtttgagaaatgaccataagtccaccaaaagttttccctgtgagtactgaagcataaaaagtaaaacctaaagaagaaatctggcatctttagaaatcttgctggtgctaaagagagaggaaataattttttatacagaaggcatgtctcaagtgaaaccaaaacaccaaagcacattccttcagtgtatattcacatggggtaaatatgatgctgagtaatgtgcacaaaggaaactcttgacaaaaacacagtcatcttttgagtatgttaggtcatttgttatttcatttgaaaataacctggctggggcgtggtggctcacacctgtaatcacagcattttgggaggccaaggtgggtggatcacctgaggtcaggagttcagaccagcctgggcaatgtggtgaaaccccatctctactaaaaatacaaaaattagctgggtgtggtggtgggtgcctgtaatcccagctacttgggaggccaaggcatgagaatcacttgaacctggcaggtggaagttgcagtgcactgagattgggccactgcagtccagcctg

SEQ ID NO: 46864 - DNA, 1301 bp, Homo sapiens
gaatggtggccctcttcccacagctccactagggagtgccccagtgaggactccgtgtgggcaccccaaccccacattttccctctgcactggcctagtagaggttctccatggggactccacccctgcagcaggcttctgcctgaacatccaggcttttccattcgccctctgaaatccaggcagaggctctcaagcttcaacttttgcactctgagcaccctcaggcttaacaccaagcagaaattgcccagccttatggcatgcaccttctgaagcactagcctgagctgtacctgggcaccttttaatcaggactggatatggagcagctaggatgtgacgagcagtgtctgaggctgcacagggaagtagggccctggtcctggcccatgaaaccatttctttcccctaggcctctgggcctgtgatgggaggggctacctcaaaggtctctgaagtgccttggaggcctttttcccattgtcttggctatcagcatcgtggtcctatttacttaagcaaactacttcagccagcttgaattccccttcccggcaaacatggcctttcattttctaccaaatggccaggctacaaatattctatccttttatactctgcttcccttttaaatataagtttcaggtcctttctttgttcatgcgtatgagaataggttgctagaagcaacaaggaaacatcttgaatgcttgcctgcttagaaacttcttccaccagataccctaaattatcactctcaagttcaaagttccacatatccatagagtaggagcacaatgctgccaagttcttggctaatgaataacaaaagtgacctttgctctggttctcaataacttctctattttcatctgataccttctcagcttggctttcactgtccatatcactatcagcattttggtcacaacaacttaacaagtctctaggaagtttcaaatttttcctcatcttcctgtcttcttctgagtcctccacactctttcaacatatgcctgttacccacttcaaaagttgctgtcacattttcaggcacctttataggaatgcctcattccttgattccaattttcagtatgagtccattctcacactgctataagaaatacctgagaatgggtaatttataaagaaaagaggattaattggctcacagttccataggttgaacaggaagcatggcaagatctgctcttggggaggcctcaggaaactcaaaatcttggcagaaagcaaaaggagagtgagcatgtcttacatgaccagagaaggagtaa

SEQ ID NO: 46865 - DNA, 1050 bp, Homo sapiens
ccagacaagaaatataaaattattatgctaaatattcttagagaactaaaaagaatgaaaatgttaccagagaacaagggaccacagaaagaaacaaaaatgaccaatcagatttgagaaaggaacaacacaacactactagaaatgatgtatatggtaattgaaattaaaaaccgcatggacaaattaaaccagtaaatagacccaactaaaggagggaggagaggcaggccaaagtgttgctacacagtttgacataggtgtatctgtctctctccatctttacatgtttgtctctcttgcccttgacctagtcttgcatggttctatcctgtctggcattggcttttccttgggccgaggaagctgcttttgcactcaggctgagttgttgaagtagggatggttctgccacagttctgctctgctttgaggtgcatgggtgagtgctaccagtctctggttaccatcaagaacgtgagccgttgttgtccctgggtgacaactgagtagcagaactaaacgagtcctgtggagagctgccctcctctcctgcttaagtaagaggagaattttcaccctatataacctgacaggaatttttcctcacagggttttgaacagacagatccatgacccatgggacagagaactgtgactgactgctgactcactgtgatgtttttatgtacacagtggcccaaatgcatttcatgctctattctgtgctgagctattttgaaaatctgaataaatagggcctctgtgggagattttaggatcctagaaaatagcattttgaattattacctgcttttataatgttcatgagttaatgtttcccaaaggatctaaatgtttctcaatacgtattttctgccaagttggaaactgttcttgcattgttgtattttctttggccagaaagattctggaggcaatttgaaaccaatgcttatatccagagaccagactaagaccaccaagtatttaagaaacctgactttaaccagcaaatgcccatttaatcccttgaagatcgtatgggat

SEQ ID NO: 46866 - DNA, 548 bp, Homo sapiens
ttatcttccattcttttggcattttcttatggcaaataaactacacactgcagagatctttgtgattctattaatattccaaaatagcttgcttgaggagcagcaaggttagttggctaaaatgtcattgtcaggcttcaaacacatggattgggcaatgtgtacaggtcagaaaaaaaaatacgggcctcaagagaaaagcaagaaatatcaatagaatgtggcaatgccatgaggttgaattctgtaattttaggttctgaactttggtcaacatttggagacgggcatagaggtcataaactacatgaactgctggagagatcagctcccagaaatctgtcagctgtcccatttaatgacctagttggtaaggattgcttgaggactgcaatacaggtagctagtttttttccatggctattataaaagaccccataatgtttattaaaacttatagtgatgggtaggcaatgaggtagaaggcatgcccctggagaatcacagcatcccaggggctgagtgaacaagtgagtgatgtgtggcag

SEQ ID NO: 46867 - DNA, 964 bp, Homo sapiens
agcatcactggtaactcagaaatgtagtcttggaccacacttccaaacccagtctctgaatcagaaactggaggtggaaaccagcagtctgccttttaacaagtcctccagctgattccaatgtacacaacagttggagtaccaccaatctaaaccatacgctgcaactcataatctgtttaactacttaacaaaatggcaaagcacattaggagaacttgtttgtcaaataagaacacattctcatcagctctgcaaccaggaacagaccttaatcagtttgtgcttacaaaatcaaaaaacccacaccctgggaccaatctaattggaacatacagaacgaagtcaattccatttcatggtgttccaactaatgaaactttacctctctgcctagaatgtagaactttattctgctctaacattttatgcctgctttctccgtagcaaaggatttcctatgtgagttcctgatccccttctgttctgacctggtagtcacacctgtcaacaaggtccgcaagttctggcctttggattctggcagaacatcaaaactggtgagtaagtaatctcccaatagtttataactgcagttttcaaaattttggaatcagcagaattacttcttcaaatgaaacctcacaagaatttcaatttataaaacgaatatatgctgagccattgttaagaaatggaggagctgagtggcagctaaggcaggaaagaggtaatcctaggttcttttcctgttttgtgagcattttagactttatgagatgagaattttaggcttcatgaaattcactgattaggtaatcactcagaactgggaactgaaatctgaaaaatcagaatacctggacaccagtaacttttcaagtccaatattttaaaccaaacataatttgtatttttagtgaaactcatcagttaaatgaccttcaaattttacactaaatag

SEQ ID NO: 46868 - DNA, 628 bp, Homo sapiens
ttttgaggcagagctccttttgtgggggcactagctgcggggggtctgttcctgcagacccctgattcggcaacggatgaataaagtacactgacacactcatatattctgctttgccagtccagctgagggtccaagccgcttgcagtctccaagctgagttctgtaaacagttgccactgggccccgatcagatagtgaggctcacatttattcagtaagactgattaacaaaattgtgagtaaacagcactagagggtaaagattaaaggctgggttccaaggcctaaagcaaacagcatttgccagtaataaacttctgctgacccctttcccccgctctcccaaataggaagcagtaaagtacccggtaggacaaaggttagtcttaagcccatataagtaaacaggttagtaagatacacttcccacattcctttgtacttgcaccctaatctttctggatcctacagaaaccctggctgccttcagccaagcaatctgaagctatgcaaactttcaggcgttccaagagagtttttgactattactataattatcttttatatttttcccaccagcctgatcgaaccctgatataattataattctatattataattttat

SEQ ID NO: 46869 - DNA, 501 bp, Homo sapiens
aaaattgttgaattaattaccagtatgaattttaaatgattattatcagggatatttgtttaatttacaataataattgactgatgatattctaacgatatccccatagacttttcagaatttgttccccagggtgactgtcattttcaaaccatgtggcctgagagatctaaaaggctttgatcatgctcccagagaatgtggaaataagaacaaagtctacattctataaatgatgccaggcccaatgggagctctatcacttcacctgactctatcctttgatctcttcccaccataatcagaatagtctgtaatgggatattttgatttcttctctaccgaggacaaatttaatacagttgcttaataaaatcaatgagacacttcagtttataataaacaaaattttcagtcagggtaaaactttttaatatatacaaatgcatgtgaatattgcatgtgttcaattgtcttacaagaagtacacataaaaactaa

SEQ ID NO: 46870 - DNA, 1327 bp, Homo sapiens
attaaacctatttcgtttataaattacccagtcttgggcagttctttatagcagtatgagaacagactagtgcactcattcacacacacacagcacacatccctgtttccattgttacatctccctctctgatcttcccacctgcttcttatatgaacccttgttgttaatcccatgcagataattcctaattttaccttacatggcaaaagagacatcacaaatatgatttatctccatctcaggatccttagtttaatcgtattttcagtgtctcttttgccatgtaaggtaaaatgtttaccacttctagagattaaggggtcaacattttggggaatgttattctgcctatcacattgagcaaggatggggtgattcaatgggaaaggacaaacaactgctttttaaacataagggaagaaagccagaatgggtgatgtcatatctaagctcaaaggtcaaagtcagtgactgggcccttttgatggctgtatttttctcttggcagccttgggagattaaagtatgccattgacaagaggaacacatttttgaaaaacctgctagaatctattgcagagaacatgactagaaacaggtaaagagatagggaagaagcatggggatgagaatgagggtgccaacagagctagaaaatgcagggttgttgtgaagctttttggctaagtcgttgtccagcaacacttggcagcctaggaacagaatcaaaggaaataaacagatagattaatgaagtgatggatatctgaaggctgggcatagttaaggaaataaggaaaaaattagagcaaggatcttagtgaatacactgatcctagcattagttttggtcaggtccgatctaccccaatttcaaaatttgtaaaaatcaatttgtttaatgtataagcggtgtgtgtgtgtgtgtgtgtgtgtgtgtgtaagacagagagagagagagagagagagagagagagagagagagagagagagagagagaaatgatccccaagccttgggaatgcaaaattcctggctataacattgacagaacaatattcttatgtattcacattacaaaatcacatcaataaccaaagtaacttcatggagattgaaacttataaaagcagaattaggatgagaaataaatctatcctcattcttctagcacataatattgatttaaacatttttgaaatctgtttttgacaggcagattattttcatcaaaagtttatttaacgatgtctaaagctaaccagcaaatagagagggttttcccactggtagagataaagaatataatttaccacataattat

SEQ ID NO: 46871 - DNA, 1695 bp, Homo sapiens
taagtgtgtgtacagaactgccagtaaaacagcccctaggtgagagggaggagttggtcttgatgatcagctccactaggccatctgcacactgatctactgactttcacaatgaataacaaggaatgaggactggaacctggaagggaagcaccctcctgccatcatcccctcaacaatgtccctctagcaccctctgttgataaagcttagcatcaagccagctggagaaagagaaatctttaccaggttcagctccagtttcacaaagcagtgcacagaatggtagttggagctgagagacaatacattaaaaactgatatataggtgtcagatttttctggtgattcggcttcatttaatgatataaaggaacaaaaacttagtatatcactgtaatctaaacatcaagtcttagcagagtttttgacagactatggtaaatggaagctataaatgactccaatccttccttcctctctttacccatgttttttgccacatgcctttgcagttcttccccctaaaaaggcagggtccacctccttacctttggaatttggaaagctctcctgttctgggctggttttgcaacttgctcaagccaataaatgttatcagatgtgatgcaagcagaagcctgaaattttatttatatgtctctgcctacctattgcccacggccattgtcatgaaaacatgtccagtttggcctactggaggacataagacacatggagtgaaaccaagtcatccaatgttgcaagaatgactagatcaaccaacagcctgctggcacacaatcatggaagcaagtccagccaagaacagcagagctgcctagctgacagatacatgagcaagccctgtcatgccacgactggactaggggaactccagagtataagctgaataaatgcttattgttgtatactacagagatgttttgtttattatgcagcattataataacaacactaatccgtgtaactaatacactttccttctatatattaatagacgagagcaacatgatttgtataccacacaggtttatgagtagtagatgttttactatgaaaactcagattccttcttgttttcccacattaaaaatacacaacctaagcttctaagtaatggttagctatactgtaagtcagggtgaaagcttttcccaggaccatctttggagttgctagacatgagcatgagtaaactgctactgaatctgttaaggcataaaagaggaccttagcatttgcagactagaggagtggtttctttcacccttaatacctccagtttagaagtcctcagcacatgcatagagacgtccaaacttacctacatcagcactttagcccaccaccatctactctatctaaaaaggtccaccacaacacaaaatctacataagcgcaaaacataaaagcttttcttcagcccacttctacttctactaggccattccaggaatcctactctgaataaaggcatcttccttataaggtactcaagatccccatgccataccctggcagcctcctgtagcctgctatccttcatctttctcccaaccctgacttatctctatcctaccatatatcaaacctgctctcagctgtgagcttccatgaaactcacattcactgagattacagtgactgataactgaggagcaattgaagctt

SEQ ID NO: 46872 - DNA, 1128 bp, Homo sapiens
agagaagatgatactgagatatgaagaatcataaactgtccaagatcacaggggcaaaaagttcacctcaactgaaacctctcacgaaccacaaaaatgtggccgagggagcctcaaaaagcagtaccccaagcggggacggtaaagtcagaaaagacaaggctgggggtaatcacagagaaatctaaaaacccgctcggcctcgctactcttctccttcctctgaggtgcagaggcgcggtgggacgacaaggagttgcgagaaagggcagagctcactgaggaggcaacagagaaagtccgctaacaatttttgaaggccgtaagttaaacatgttaaaaactgtagctactcactcagccgacatctagtaaaaaagatgcggcaagatcaacaaggcatatagcttgcgcccgccagaagttccgcggcctccacacccatcccggcatactttgcgccgtgcacaggcaagccctggtgcgcattggccccttcggccgccgtcggccggtagttactatggaaacccagctgccatcgctatgtctctgcaaaagacccctccgacccgagtgttcgtggaactggttccctgggctgaccggagccgggagaacaacctggcctcagggagagagacgctaccgggcttacgccaccccctctcctcaacacaagcccaaactgctacccgcgaggtgcaagtaagcggcacctcagaagtgtctgcgggccctgaccgggcgcaggtggtggtgcgagtgagcagcaccaaggaggcggcagccgaggccaaaaagagcgtttgtcgccgtctagattacatcacgcagagcctccagcagcagggcgtgcaggtgagatctccgcgggggaggaaataagagccggaagacacaaaagggttggcagatggtcgggccccacaggcccccctagcgggaagggagatgtggagggtctggagcgtttaggacgcgtttgttgcaaaggtactccgggacgccaggacctggcagagtgaatatttgacccattcttctcctagacgaaggtaattattggcctcaggcaaattaaaaataaaagaatgcaaattgggtaggtttttatctggggatatt

SEQ ID NO: 46873 - DNA, 1011 bp, Homo sapiens
aaagattcctaaaatactcattttgacaacccacaaaattaaggtttttaagctattaaacaaaatatgtcccaatataaacacaactttcataggccaagttccatcccacagtaaatatgtggacaaaaatcaaaactcttcagtgtactccaataataatttttaattaaacgagaggcataccataagaattaaaaaaagcctactaaacttctggttttagggaattacaggctttacacttctgcaaagatgtgttttagtaaatgcaagacgaagcactgaccaactatcatcacacatcagaatccttccaacaaaaaacccaggactgaatttaaggaaaacaaaataaacgacagagggggaaaaaataatgtcttgccacggtaccgcagcggctggatagcctgcttgtgaaatgctaatgccacttcggagcagttagtcaccagctattgtgtagggcaggagaaagccgagccggccgcgcgtgcagagcgagcaagcgaacgagcgagcgcgctctccctcttcgcgccgctcccgccgccgccgactctcgcgcgcccccgcgcccgcacggacgcgcgcgccggcccctcctcctccggccttgcactgcacaacactcatgacgtatctttatttctagcacattaacaaaatatcacaaataaattgtccgcagcccctgcggccccgaagtacgagtacccccggccactggcccccgcagaccccgcgccggcctcccaaccctccccatggcctttggagctttcacgttctagggccaagtttttgtctctgtaaaaaattgcgggaaattcaatttttattcgactcagggaaaagtttctttgctctgcgacgtgaatgtctcaccagattctggtaggtcctgggatgctccttcccggtccagtcggtgcgccggggcagcagctgcggggagaggacaccccgtgagcccggcccccggcccctacccgcccgctcccctcc

SEQ ID NO: 46874 - DNA, 1915 bp, Homo sapiens
gccgcgcggcggcgggacgcgccgggccgccgccgcccttacctccttctcggccacctcgcggatcagcacctgcaacaacaaagcggggagagctgagccccgcgccccgggccgcggccccgccgccgccgcctccctcccccacgcccgcgagcggcgagcgccggcccggcccgcgccgcgcgccgccgtacctgagccgcctgctgacagggtccatcttccaggaaccgggcgatgaggaagtagagctctgcgcgggagagagggacggggagacacacaggctgagcggtcgggcggcggggggcgggggaccgcgggcggaatcgcccggtgccagcggccccggcagccccccgacttacccgatcgcagctccgagaggcctttcctctcacaagacatgtttatgggtcacttcagggccgccgacgggacaccccgccgccgaggggaagcggggacggtgccgccgcctgccctatagctgtcagtgtgtgttcacgagccgagcttcggctccaccattcaagcaacggcggcggaggcggaggaggaggaggaggaaacaacaactctcaggcagcgactacggccgtggccgcctccgccgcggatccctccgccgcagaaaggagtccgccgccttcgcggcccagggctcggccccggctctggcccgcgcccccgccccccggcgctaaaaaaggagtgcctccgacccctcgtccccagcgctccgcacgcggcacagtgagacccccacccgctcctccccgcagggcgtgcgatttatttatttatttccagtcggagaagatgtcggagcccaagccgccggttggctggaaggcgctttctctgtggaggccgatagtggcagggagggggccggggacggttccgcggagggatctgacgcacacggagccgcagcacaggctctattcagcggcgctggctggagctgagatggaagttagtttctatgtagcagaaatatgaaacaaatgaagcaaaactgcccagagaggggaaatgccccaaggatgggtctcactcacgcgcgtacacagacacacacgcagagagcactctcacgctgggcaagctcgggatcgcgctacccttcccgagttgaatgatagtgtttggtttctgtctcttgccatgtgcatgtgtataaatgctgcggattggcatctgtgtaagtcttgtcctgcgttatttctgcagcctatgcaagtgttgtgtaatttattggagtgctgtatattgcaatagaggtttgggctgctttttgttaagcacttgcgttttgcaaacccgttatttgctgaagccacctctgcatatttcttttattactgccattgcctttggcgtacgttttttaaatgttttttattgttaaacgggcaaagcgaactcttgatttgtacttcagatactctttttccttattacaaaaaggctagtgatggctaattaggtatttggaattaaagaaccttaaagcttttttaagtgtttacgagaagggagaatgtaaacctgagggaaaggaaaggacgctaatattcatgtctaactgatctggaggtaatttagtgacagatcgataacctgcctaaggatattgaaagagtatactacagtttagccaaggtgaatagtgattaaataatttaaataatctgtgtatcttgcagttgacttcgtcatgctaattaatggcttctaatttgagatgtaaaccattcctgtttacagttaatcacgggaagacttcttgaaaactgacgaaaaggagaaaaaaaaatctttcgtaaattagtatgtaattaccgattttatatgctaaatcatacatctgtgttttgctgatgaggataagggccttgttttt

SEQ ID NO: 46875 - DNA, 833 bp, Homo sapiens
agccttatacagataatctctttgcacttgaataagtattgactacaagccaggagacctagactctattcccagttgcttctctaatgttctaggagatattaactgaatgctttttaggatttagtttcttcatttgtgaaacgaaggcattagaatacattaagctccggctgtagcattcattctgtggtttggtgatggcaggcagaattctctgctgttggtttctgccaccctttcccagggtcaggcctttccgcagaggagccattggctttgtgcttataattcctggaggatgactactggcaggagaatatccagctcctgctgaggagttaagatgagttcattcaatcattcactgatgcactcactcaatgaatcattaaccaagcttacagtattccaagcattaggggatgcaggtgagagccgctactctcaagaagctcacagattctggttcatagtaatccctaagtaagaaacaagatctcgtgaatttgaagaaaactgaaggcaagaaagagttatataaagatcagttcatccaggtgtgctaactgtagagagaggttatgtataaaggctacggaagcaaggaagtgtgcactcctcccattgcaggaggtcagagggccaggtatagttctggaggacttaaaaaacaaacaggagtttgaggcatttatttattcaacagttattgaacacctttgtgaaaaccctgttgggcaatggagaatggctatggaaatgaaccagagtgtatagaagatagagtgagagcagagggaggataggaaaggaaagatgttttcaacaga

SEQ ID NO: 46876 - DNA, 719 bp, Homo sapiens
cttataatgtgagcgagaaataaatgtttgtgtttgcactgagatttggttattatttgttactgtagcaaaagccagggtgattgccattctgcttactttttcatttcaccataatatgtctatctatctgtttattatttatctatccacactagtattttcctgggtttgcagtatgcacattacactctttgattgcctctaactagcatacttattgatggttgccaaggactgagtcattaagcgcataccttctcttccctggagacagtccattgtaagcactttttttttttttaaagtaaattggcaggtatacatgaagaaggaagcttacatcactggggacttccgatctcaagcctgtactacacgctcaccattttctgaaaatgcaaaatccatctctgtcttttccttgaagtttttaaataaaataagtgaggggatttttttctgcctaattatttttaattatgcccctatagaattagtgcacatttcccccacttatttatctgaaaacacattatgtgaagtgaggctgtgtcccctgatgagcactatttacattttaaagtatctaaacatgagtctcttctgccgatcctctccaatgtggccaaattaacgtcatttcaatttttgcatttctgctaaatttcctcaatcagtagtaacagatgttatttttgcatgtgagtttattaaat

SEQ ID NO: 46877 - DNA, 460 bp, Homo sapiens
tgtcttttacacacctacgtgcatgcatgcacacacacggtagatagctgcataactgctcgacttttaaagcagaaatggtgaaagaactatgtgattccctgttctcaatgtgcattcaccctaagcgactttcatttatctttgatgattccagttaaagaacaggggccagaggtcagtggcaggaatgcctgggagccaccctcttgttccatttgcttgttccagtcactccattcctttaagataagggcaggatgctggtaaagcccaggccaaccacaaaagcacattttcatcccatccttgcctagccttgatttctagcccatttcttgatatgaactgacaaatttatcatagattaccatttttccattatcaactccagcatctctactaaactcccagccttggcatgacagccaggctacgtgccaccctcagctgatttatt

SEQ ID NO: 46878 - DNA, 1508 bp, Homo sapiens
taaaacttcagtattttaaaataatgcagtcactctcacacacaaattagtccatggtctttgataaagcaagacattaggtgtaattttgcttcaaatttaatacccacactcgttgacactgttggaaacactgaggctggcggtgggagggtgcaaagcacttgcttaggaaccagctgagaaatcctcactgatttctcagggaggaggaaacctttcccttccctccccgggacaagtcgaagccccaccccgagggagatttgtgtccctgaatgtagtagttggtgtccggggcctgcgcagaagaggacagtccgcaaggggcggaagacaagacaaaaatgactccagttcgctagacgcgcagaggggcggatagcgcgcggaccccgccttccccaaccgagtgtgggttccagtcgctggggaggacctggtggccccctgaccttggacgagccatattggacgccccggcgccgtcccgtcttccacgctgccaactccaccgctcccgccccgaactgcgggtaggtccaggccgccaggccccgcctcgccggccccagccctgattgacactggagttggtacatacgggtctgcagcggaggcgagcaggagggtgagcgctattttaaacatggctttctctttcccttagcctaggagccaccgcagcgcacccagcccgcgagtacagccgcatgggaataatcccaacatttgcctgatttattttcttccctctccttacgcttgtacttgtttttctcctctcgctgttttcccttcacactaattcgcaacctggcagtttgcaaagaggaaactccctttcggaatggaaagccgcttttgcttcttgttgttgggggtggaaaacattccagcgagaatgagttcaaaaagaagggaaaccgcgtcactggagagaaagtaacattaagagatcgatgaggacggagtgggtaggggggacagagagaggaacgtctgcaacaggcatctaaaaacaagcgtggaggagcaaagattcccaatccccgggttactaccgcgcgcgttctgcgcgagccattgcaatgccagcatttactgtaagcagaatttgaaggcttttgaaatctttttttggtaagacttacctttctcttcggcataatgactatgtcggtgaagcaaaaagtaaagcaacggactggaactgctggcgccgccgctggatgctgcctctgcctctgcagctgctcacgcgcagggcacgacgtagcccggcctcttcgacctgcacctccgcggctccctctgggggccctctgctcgcctccctgctgctccaatgaggagccccgccagccggccgcgaggccccattggctgaggcaacgttctaaattccacgagggcacgcccacctccgcgcgcggtacgcgctgttgtagtttccacttcaccgaaaaaaatctgcctggcgactgagcatgcccagttcaactagt

SEQ ID NO: 46879 - DNA, 1291 bp, Homo sapiens
agatccgcttgctccctttcttctcttctcggtcccaggaagtaaataccctttcccagctcctctcctcctaacttcccagtccccccagtgccggtcaacctcccttcctcgggaccctctcagaagccgagctctttactcattttcctaggtcttccttctcctcgcggtccctacatcctcccccatccctaatcccttcatcttccctgctttaagaaccacccgcaggcccccatccacgaacgccccttcactagctaccagacgcttcaacccagcctcacctcgcacctccacctcccccgccgtctccacgcccacttcaaagcccacctccaacccgcaggctcttcagcagagccgatgcggcgtcccgcctccttgccttccctcttaggaccaaactcccagctggggcctcggcgtctgaccgccaaagagcgggtgcctggttcctgcggaggctgccgggcgggtgccgaggttgccgagatgcgggaggtttgaacacaaggatgggacagaggcgaggatcggggctcctgggtggcagcggcggtaacctgggctccagggtaacggaggcggaggcctagactgcactacgaagagaccgcagccaatcatgatgactctacccgagctcccattggcttctgtctccagacggccctttttattggcttcagtggaactggaaggcgggacggcgagtgcgggagaaggtctccattggccgaccgctctagctgtagcggagacccccaagtagggaaattggggcaaaacgcggagcgctccaggctcctacgggctgtgcggtgccagggctcgactgctgagcgtcgtgggctccgagagggacgcgggcggagggcaaagtgggttcatgatatgaattgtaaaattggcgactgcgtaatgtaaaacacttaacaattgcttagatttcctttgggaaataacttgcttttaaattgtaaacaaattacaaacaaactgctagtgcttctggatcttcttaccgaaatggctgattcaggaggatgcggggtgagtgcactattgttcctgcctcgagatcctggctgtgaatcaccaacgagccgtgagtttggcttgaaagtgatttttaggttttggaacgggtttggggtggaatggcatctgaaatatttgcacacaagttttttttttttttttttttttttttttttttttttaaggaacgttttgaggagcatgtcagcctattgagcgctgatgtgtgacatattttctcttt

SEQ ID NO: 46880 - DNA, 1252 bp, Homo sapiens
ttcacaactctccccacactaaatatctttaagaacatatggtagttacaaggaaaagccaagtgaatatctgaaacattaatgtgccatgctgctatcattacaagaataaagaaaactgggaatccagaaatctcctaacacaacaactgttgcctgccaattcttatatcaaataaaaatcatcatctagggcaaggatggttgcacggtgactaagcaggcagatggcaggtgtgaggcaaaacactctggagtgctagctcaaatcattttgcattactcactgctggaaagatagggaatcaaaaaacaaattgcacattggactaggagtaaaatactgaaaactcaactcacagaaatataaaaggtaaagaagacaaccacaattgtaaatgtcatgttgtaacttctaaagcaaattctttaggtctgccctgtgatctttctctgcctccatctgatttaagcctcctctatctgtccttgtgattcacaagaaggtaattgtttctccactttaccaaccctgccagaactgggaccacctgtttcaaaagtaacctggctgcattcctgaaggcaatgttccaaggctagagataagatgttaaccacctccttgcctggcaagaacccatggtggttcactgccttagcagtgggtcagttcctgggagtgagcaaatctaattttcatatattagattcagggaaaaaaacaaaaactcaagcactctgttttatttgcataactgctttacatattgctatcataaaggagattagctttaacgaatatgaatgtaattatagaaaagggccctaggtggagcctcagtactggtggcaacaaatggaagaacaaattgaaaatacatcgaagccctccaaaaattacataattgcattttatagaactaacctgtttgttgttattgttgtttctccagcataggaaacagctggatataaaaaagatgctttgttagttaagaataaaccttaaaagagctttgttctgtaatcaagaatgaaagcgcattaatgctggtattctgtctctgatggagtttctacaaggcagtgtgtatggtagagaactgtccctaaccttagcacattctcctgaatgaacgtctctcctttctccttataaggacattgccacttgtttatctatttacacatagtaaaaccatcttacattgtaaaagaaataatcaggattatttttaagatgacttgc

SEQ ID NO: 46881 - DNA, 788 bp, Homo sapiens
tgacaggagcaaacgctcaggaaacagtggtggtttcatgatgatcccttgccagaagactgcatggactcctaatccatcttcctgggggcagtacctccccattttttccccttggttattctcttctctcttcagggccccagttgtgcacagtatataatcatttgtctgcagaacttttcctgtccttgcctcatcattgtgtgttgagtgtgttgggggcagataacttgtctttttagttcactggtttccagatggagagaaggcacatctgagcacacacagaaacatggggaaccgcatcccactacactagcagctgactgagatgactagaccctggactttgagcagatgccataataggatgtgcccgtggaggcggttgatgattagtgcagtttacatgtgagaggaatgcgaattattttaggtaggaggtggagtgtactagatggtttccaaatatggctgcatcagtatctccaatcccacaactctttgcaaggtgattttgccacttgtctccttaaaaggtggagtctaattcatctcccctagaatttgggctggctttgttacttgctttgaccaataaaatacggcaggtcttatggcttctgcttaaagtttttaaagttctgttttcacactcttgaaatgctccctctaagaattctgccttgagactgccatactgtaagaaagcccaagctggctatgcggagtaaccacatgctataagatcaatatgctgtggttgacagctccgggtgagccca

SEQ ID NO: 46882 - DNA, 1905 bp, Homo sapiens
acttcataatgattgctctttgtgcaagaaatgtatcaaagagccagagacctcatcatctaatttcttactttttcttaattaacattgttcccagacctctgctaaactcccgtgttgaaaggaaaaaagtaaatacagtacagcagggaaaactggttcctttcgacaaaactgagagagaggcttgagcttttgtcaaacagaaagcacttgataaaaaactattcctaaactattagcaactatatagaagctttttatttaacagcatcctcctgggaaactgcgctggaatgtgcagcggttctgaaaaaggcacagatttggctgaactgtaaatattaggtgcacagaggcgaagccattgtgtagggaggggtggggcaggtagggtcctgatttccaatgttgatagaaggattccaatttcgtttggtatttatttttttctactacaattacagttttgctgagaaaaataaaatattggttgtgcttccatctgggtttctaattttcagtgtgtacagacaagagaagacctctcatttacccaaaagaatcacctttctgcaatctccagtgctactggacaaacaaacgagcccaaccccaccgcccacacctcccaagcacccggctcgccgatcccgcctgcttcaggtagctggggtttgcccggtacgccagcggccctgagacgatgtgtgcccgcagcacgatcgtgtctgttggcatttctgggtgtggatgctccaaaccaataaaccacaatacagaacccaagcttggactttgaaccgagcccttttgcctagtttgctttttcctcatcaagccaggatccttgccaacccacctcacagcttctgcccgggctgtggctcccctccagccacctgcgcgtgttcgggatagaagcgcggtcaggaggggagctcagtccaccagccactccagggagagacggaaactacaaatcccatcaagccccgcagccggctccctcctcctccctctccttccccttcagcctgcggccgggcggcgctgggcttttatctgcggacccgccgggagggagccagatcccagcgatcttccccgacggcagcgctttacccagaggctgccggcggctcgtagctgggttcagctctgcgtccacgccagcccggagcccggggggcaaggggtctgtcccgggcgcagcgagaggatggtcatccgcgtgttcatcgcctcttcctcgggcttcgtggcggtgagcgcggtgggggcgggcagtaggttggggtcgcggggcgcgggtcctgcgggaggcgcgcggcgctcgtcactgcgcgtccttgcgctcagccggtccgcccgcgggagcccgcgcccggcaggtgatccatcacactccgacaacaatgaagagggcggggaggaaaggtgggtgggggaccccggcctcacccaaatgcccaccctgcgtggcctgaaaggcagacaacgcggcctgaaaatggagtccgagggaagcccccagctcctgttgtgtggcatggaaatttggggaacgggttgttcaagagcttcggggatcccccttcccctagtttagttcttcccgatttgggaccttcagactggttatgttttgcacgggagccttttctgctgctttggtttgttaccctagctcctgaatgaagcaagtttaagtgggaattgctctctgtcctcccttccccgccagcaagtgcatttgtttagttttatacctgcgcaaagagaatagtaaaactaggtttgtcctgttgtggtaggattgtttgctttcactgtcattttttttcttagggtgccataaatatttttacatctttatgtaaatgtgtgtgtatgcacgcattt

SEQ ID NO: 46883 - DNA, 533 bp, Homo sapiens
atccttgtacaccactgaagttttttatttaaaaagaaaccaacacgatcatacaaagcccctccacccccatttgcactagaaacaatagatgggaaaatccaacttacacttatgtgcagtcatgttggggtcctcagacttctgacagtttctggtgtttctagctatttgggttgcttagtcatgcctgccttttgtagatttccccactgaagccacacttcatgtgtttgcaaactggcactgtttcaagggtagatttgttcaaatgcactccttactaagaatgctacaaagctcttggtttcaccaccgacttgcatgcttcaataattgtcccaatagcattatattgattatggaaggaatggtttttatcccttccacaagagataaagcctaggctactttggagcaagtcggaccaagtcaaggtaatgacttggcttactctattagtaggtagtatattgagatagttttggtactccacatctttgttttttcagtgccattggcaaatatttatt

SEQ ID NO: 46884 - DNA, 983 bp, Homo sapiens
tgctgtttgaatagaggaatatattgaatgaatagaagaatataatgtaaaatatagttaactttactccttatttttatctctttatgacgtctagctgtctatgtatctttgccctttgaagtctgtggaaattttttcaagtagactatctgggagctggctagaggtttatattacatattgattaaactgtgccaggtcaatggcatcttctgtgcttgaacggtgttagtcctgtggtggtggtcacgacagctattggcgtatgcactgtaatcatagtctcttctggcaagagttttgagacagtgtcggctcttatcaaggttaggtaaatttgactttgacataagcattagagggcaactaaccacaggccttgttcatctcacctgcttctgtgcaccttgctttacctagtgatagtttctgactggtgtcatctggttggttaacctgtagaaacctaccacattgcgagtgacacgatccagaaagcttgtatatttttattctctttcctggaattagaaaattattattgtaacctgggtgagctaggcatgtgaggcatagagtaaacagctgctaagctacttggtaaccagtgtggacaattgccttctctctcatttagcagttgtatatcttgccttttggaaggagttccccactgaatggaatctccctggcatgaccaatcagttttttctaccccagaatttgaacattgaggggatgatgtagaaatacgaggtcagttggaggttgtttgtggcagtgagtgtccaggggtgatggggccaaccatagctgtggctggtgtccttatgcagctcatctggggtgtgacatgagtgtattcttggctacccagacagggaaattccttctgttttctaaactggtcctctagttttaatgtggagtcttgacaactcctatgatacctccataattcataattcctctccctcaaa

SEQ ID NO: 46885 - DNA, 1174 bp, Homo sapiens
catgggttcaggattgcagtttgggaagacaaaaaagttctggagacggacagtggcgatggttgcacaaaaatgtaaatgtacttaacgccactgaactttacactgttaaaaatcattaaaatggtgaattctctgttacgggtattttaccataatttttaaaaagaggaaaaaggaaacaagactgatctcaaggggtagcagtttcagtaacatttttttcttttttctttttcttagaaagggaactggctgacgttcatggtgggggagatggaaggaactggtagaaacgagaaacaaaaaacccaagagagatttcatttttcactaggatgccaggtataaaatagcacatctcttttaatattcagaatagccggagtctccatttcgttattacaataatgtctttatcccttcccaggttctccccttccattctctacctctttgcgatcaaactgagcacccgggggtttcccaaacccagggttaccggatcctgagcatgcgcggaggagggacagggagccgcccacgccgggctccgcggctgcagttgctgttgtggccacaaggtggcactaagtctttggcggccgctggccttcccgaccgtggaaagtcggggccggtggggctaggtaggaagagcacactcctgtgaggttgccgggggcggggctccacctggacccctgctctagagctgctggcgccataggaagagaagatgtttggagttctgccgtcctgcctcttctggagtcccgccgtggcttactcctttcagagctttctgccctgtcctgacagtgccctctcttcctaggcctgagctccaggtactcagcgacccgaaccttccaaccttcgcaccctccccagcacactttcagaatctccacggctgggtccaaaggggccctcgctgggctgcacgtactctggccgccttagctctaactcctgcctctctagggcttttccctctaaccccagagtgtggaaaatcctctattttttcgcacagaaggcatggtgcttccttcagggggcgaaccccactagtttaccagaaaatggacctagcaccctcccttctaaaaaaaataggagggtagatgaccagaagcacagatggaagggccagactttgaaaggaagg

SEQ ID NO: 46886 - DNA, 1204 bp, Homo sapiens
agaaaaattttggaaccaaaatgtaatagtggttgttttaactctatgttctttcagtcatttagatcctctactcattctctgaacaagcattttttaagtgcttaccatgtttcatgctatgctaggagctatgaagaagggggaataagagctgcttggtttcattaactttagtgtgatacaccttctgaatcctgtgaataaagagtctgggtaaactaaggtcaatacataaaaataaaacagattacagatgttcccacagtgaaaatgatcactgtgcacactggtgtttactttaatggacacgtgaatgggaatggtgtcagcaccacactctgagtatcatcaactgactcatgagaaatccagaacactgaaaggaggtagagaggctgtgttacctcttcaactttgagccccatcttgctgaatcagagagtcaactgaataggattaatattaagaccaaacaaggacggtttcaagttgtttgactagatatttcctcctttctctcttatcatatgttgtttttcctaattatttaactcttaggccttccaattctatccctccttgttgatttataccatccatactcttttgggtaattaagatttccttctttagtcatcaccccagcatataaatttcattatctttaacttatcttacttatctcagtgtaagaaactcatctaaatacacctatccacttccttttgcagacacgatcataacatttgtaatttttctcggttgtagctgaataagttacttagaagatgattttacatgttctttttatttctttacttatcctctgtctacatttctgacatgtgcacatgctccaatatctaaggttaaatcttcactggttgggcaggtgagtagttgatatacgactaacaggcaattctccttcaggaaactcaagattgtgtaagtatgcctgattcatccctgctgctgcaactgaaacatgtaataaaagagcaacaacaaagagaggcgatgatgacagcttagctgcagcatcttgttctctagctcaataagccaacagggaaactatgaccctggtgaaacaagtagctctcagaatcattccagtcattccaaagagtgatgtgatttttcttcacatgttcacaatgaagatactatgttgtttaattgatgctctttttcaaag

SEQ ID NO: 46887 - DNA, 734 bp, Homo sapiens
ataaaagttaatattgtcacaatgtgcattctaatttacacgaaactcattgcaaggaagcagatcttaaaagtagtcttgatactggaagactgggaagagtttgggtgtgctcaggacagagctattgactaaagtgtgaggtatgtgtagagaaagatgaggaatcaaggctgggaagacgagaaaaggaggaagataatttggtgctggggtgctgaggacactaatagaaatggtgaaaaacaaatgtgagtaggggtggctgaggggtaaagccagactcttttctgacatgctagtttgaagagcaaacaaaccatccagttggcaatttcatttatctagatcttaggaaagagttcagagcttgtgaaacaggaaacattagcatattattgtgaaatttttgagagaagaatcatttcttattcagctccgtatcttctgtgttcaacctggtgtctggtgcgtagtagaaggtcttaaaagtttgacaaatgaattaatcaatgaacaaattaattaactgcaagtctaacaaatcaaagtagattccaagccatataaccgaagtggaataaaacaccagttaaatgaatgaaatgatagctgaacccctggaattgggaagatccacaattaaaggtgcatggagaaaaagaagaggaccaaggacaaaacaaagaggtacaacttatttgatggctggcaggagctagagaaaacagagt

SEQ ID NO: 46888 - DNA, 802 bp, Homo sapiens
ggggctgggaggcagagtaagatggtagaatagaaacctgcaacatatgtaccccctgcaggtatgccaaattttcacaactgtctacacacagaaaagcaccatcacaagaaccaaaaatcaggtgagcaatcacagtacctggttttaacttcatgttgttgacagaggcattgaaaagggttgaagagacagccttgagttgccgacatcattcctcctccagccctggcagtggccgtgtagcacagagtctatgcacttcggagagagagagagtgcagtgactggcgtactttaccctgaactcagtgctgacctgtcatagcagaaagcaaagccatgctaggttcagccactgactgcacatggaaggtgcatttggagcagacctagtcagaggggaatcacacattccataagtcagaactcaaatttcttggcaagcctcaccacagcaggccagagggttctggggctctaggtaaacttgaaagacagtctaggacacagggactgcaattcctaggcaactcctagtgctgggctgggcttagagccagaggactggggtggcatgtgacctagagagacaccagctggagtagctaagggaatgcttgcgccagtcctccctcaacctgaggcaaaacagctcacagcaacaaatgtgtctccttccttctgcttaaggtgaggagagcgaagagtaaagagaactttgccttgcatcttggataccagctcagactcagtaagataaggcatctgaaacatgctaactacaagtgtaacctagcac

SEQ ID NO: 46889 - DNA, 1259 bp, Homo sapiens
tctaaggatagctttggagttaacaagtgacagctgcagttagtttcctatacatacacaaaaccaacccgtcctaccacagaatatatgtcataatgctggcacaacagacacatcccttttagttttgcagacgaggagtaaccgttgccctggaccacaaagccacttagcggcagagcctcgcacccgcgaagattattactagggagatgtttttacccctgaggacacctgagcccttaagtggggcaggcttcgagggaggggggccgataaggcgacttcagacagggcaatcacgatgggcgcttgagttctgcgcagaattttgacaagggggagggtcttggcttgaagacagagcgtggagtcatttaaggataatggaagggcataagcagaagctcaaggataaaaagcactgaaattcttgagctggcggcagggctgaacgtagctcagtgaaagatcctttcttgccacatcctctctaagccaggctgtgagaaccgcgggaaacgaaggagaagggtggcggtggggtcagtaaagggccggcccaaggtgcatcttttaggtcctgatgctaggagcagccgtccctgcccctatattcctctcactgggtaggtttgctcgggagtggctacctcccaggcaaaaattcggcctggttaaactggaaagaccaggaaagcccgcccacgggcgtccggggaacgcctgcaaagtgccagcaccctaccaacccaggcgccgcacgggtggggtcgcggccgcaggctcttccggggcgggcctagcctgacgcaggaggaggggcggcccccgtcgcacaagaaccaatcacgactgtcgcttctacgtggctagcattgaccaataggagaccgtagtgatagcgacggggaaattcaaacgtgtttgcggaaaggagtttgggttccatcttttcatttccccagcgcagctttctgtaggtaagttctgtcttaccggtgcaccggcgcactgaggaacagccgcagccggtgtaggggctcattgttagcgctggtcggtgaggggtggggcgaggtgggggcagctcggagccaggtatgcgacgcggctaaacgagctggagggggaggggatgtctcactgcctcagcgggtctggccggtggggtgatgcaggaggttttgttgaggaagtaagaagtgggtgtggcccacgctggaaagaaggggtggtggggtacctgcgcacaagat

SEQ ID NO: 46890 - DNA, 1480 bp, Homo sapiens
aaattagtgactcaaattctccaggtttctaagctacttagactaagccaatcaggtaatttttgctacttctgggcaaaatgtatctgaattcctattcagtggatttgcaggatgaaatctaagtttacctctttcatctctcatttaaatgtggaaaaacgaaatcaataaaaatctatatatgcttattaagcattttaaggagggtgtgaataaggagtgaaagctttgagcagtgactacagcagtttttcgaaagtcaaaacaataaccaatgccaatcagtagctctcttcacctctcacacaataatagagacaggacaggataaaaaagggttacatttaaaaaaaagtatggatgttaaaccattggaaatggcactgtaaatgacaccggaaaagatcgcctccaggcactgtgtggaactttgcaaactcgggtcctcacccgaggaccgcacggccgacctcggggaggctccaccccagaaactatttcattggcgccacctctagcccacacttcccctcttccgcatgcgcacaaggagcagaagccgaccagctcgtcacgtcgccttccccgcccctaaatttccagttccgattggtctgtttcatgggaccgcccctctggcccgaccaatgtggaagcctcctcgggtgctccgccctccccgcaggcggcgtgcggctgcatagcctgagaatcccggtggtgagcggggatggcggttgtagcggcggctgccggctggctactcaggctcagggcggcaggggctgaggggcactggcgtcggcttcctggcgcggggctggcgcggggctttttgcaccccgccgcgactgtcgaggatgcggcccagaggcggcaggtggctcattttactttccagccagatccggagccccgggagtacggtgagccctgggactgcccactcggtcccgctgcagcccggactcccaggctcgcaggcgcccgcgaggggcaggggccggcaggctgcaatccttgcatcccagcttattaacttcctgactctctggaacctccttgcctcagggtctaactgtggttcacttcttgctctatttttgtgactgttcagccctcgagacgcagtcccccctcccccgcaactttgagatgggtgagagggcatactgccacctggaagagcctgagggtggaggggtggtgcccagggaacgcctcccttttctctgtcctccgtccttgctttctcaacccaggccttaggtgttgttccagcctggccaggactgggccactagcttaggtagaggcatttaaaagatatatatatatgtttatatatatatattttaaatgtatattatatatattatatataaaatatatatatgtatataaaatcaattcagttactcagtcccttggtttcttcttacatacagaaattgtgtgtatgtgtgtgtgtgtgtgt

SEQ ID NO: 46891 - DNA, 3301 bp, Homo sapiens
gagtagctgggactacaggcacgtgccaccacacccggctaatgtttttattgtattttttgtagagatggggttttgctgtagggtcttgaactcctgggctcaagtgattctccgaaagtggtgggattacaggtgtgagccatagcgcctggcttcttctctcttttatagcaccgtttctccatataattgtcactactcattgtcttcaatttctctgcttctattctctattctcacttgaagtcactgcaattaagctttttttttttttttctcttctctcctactttgcagaaacggtcatgttaaggtcaccaatgataaaatcctcagtcctcatctcactttttaatagcagtatagacacaagttaatcactcttttcttggaaacacttccttttgggacaacacattctcctcctggttttcctccaaactctggcttgttttccttctcaacttggctgatttatgtctcacctgcttgtcttgttaacattggagtatccaggctacaatcttagatctcttcttttctctctatttaaatttactaggtaatcttatcccatcccttgttattaaatgctgtctttatgctgaagacttccaacttatatccaacagtctaattgatagctctacctgaatatctgagggcatctcaaagtaaacatctccaaacctgagctgctgatctctcacccaacatgcttcttcacagttttccctttctcagttactgggaactctgtccttcaggttacccaggccaaaagactttgaatcatccttagtattgctgtgactcatactgcacatccatttcatcagcaaatccttttagctctatctttagagtatatccagagtctcacaccatttctccaccttctctgctattatgcattgttatctcttactgggattattgcagtagcagataatcaatcttgctgtgtccacccttgctattgacaggctattcaccaaatacgagtcagaaggatcctgttgaaatgcagctcagagaatggcatgaccgtactcaagaacttcctgtttttctcactcacctgctctctgactcgctctcacagtaaaagagggtttacaatgtcctccagggccctgcttgatcatctacccattccatcctgtaactccttgactttatctcctactactctttcttttactctagaccaggcaatctggactccttgcccttcctctgatatattaaacattttcttaccccatggtttttgtacttgatggtcgctctgcccagaatatttattctctcagatatatgcatggtacacatcctcatttatttaaaccctttgcttaactgtcacctctcagtggggtcttcccaatgtccttaaaaatcatagtagtttccctccctccatcacctactcccctggttcatcatctaacaaactaaatatttccttcatttattttgtttttattgcatttcttgtgactagaatgtaaacattcatgaggaatgttttcgttttgtttgctgctgttaggaaagtgtctgtataatattaagtagtttaaaaacatttgttgaataaatgtatgaattattatagtcttttcagtgttataatttttctattacacataagaaatggagccttagagtgtttagtaatccgtggaggtaacacttaaacccaggtctttcttggctcatagtgcagtcactcatgtattttttcatctatcaggacacttacagggtactacaggaactttacattggatgaattgcattataagatagaggaagtcatcaatattgtgtgtcttatttgtgctcttctcctcaatcagtatctgggagaaaatagaaaccgatttttaacagttcatgttgaagcactttttgctacatcatagaaacttgtcagagagacttgttaaactatttcctcaaatcaaacatgttttggggtaagagagttctgagaaactcacttttttctgctttctattggcaacaaggctatatttcttaccgagatgaaaaatatctaaatcccatgaactagcaaggaatcaataagaatgctgctagtttggttaaggtggttcaggtattccagggctgtgaattccatgggagacagctggaatttacgttcattttctaccactgagtttttggttcactggaatcatagattttcaaagattatcaagctactcacagtcaaatagggaattgatgaggaatagaggtcacaatttcagaagatagtcacagatcatgatgagtatgaatcatgctttcagtttttgcagctgcttatagcctggcaaactacaggatgtgtctggtcggcatttcccaacacctgccccatgtttcgttcatattcaaaggaaatgattaagctaaaagtgaattctatatatgaaaaagaactggtatccttggattatggaagtgaaatatgaataccaggtttctcccaaaacatttggttacatggccagactgtggctattgtctttgtccacccagaatcctgaaattataatttctaatgaaattctggcatgagctgagaggtggtgaaacgtcaagtgagaattgaattatacgctaataaaattgtacctagtggttcgaatggatcgtctaaagggtttatcaaacttctctaatttgaagggtctcaaactccaaaatctgcctccttgttggtgggcacagctcttttaactgggagagattatttgctgctgggcttttggagtgtcctgtgggcacaagtgttggcaaggatttgatcagtttttgcacagattttggggctcctccatgctgtgcccttcttttagggatttagtctctcaattttcaaccactggtagccacagactattttctgacacctcagatcaaccagactgagtctatttgtttgaattttagctgtcctgactcatagactggggagtccttttgcaggacaaggcttatgaacgtcatggtcatccactgggcttaatttctttcaagagtcaagactccagtttatgcctacttttggcccttcaatgcctttaaatagttgtttgttttattttgcccagagtttataatcattaaatgtggaaaggatagtctgaaaaacgcaactctgacattacgttcagaacctcaataagatattttgtatagttttttcattattattcaatttaaaataccactttctaattttcattatagtttcttctttgagctgtgagttact

SEQ ID NO: 46892 - DNA, 638 bp, Homo sapiens
taatgaggccttattatttggggtaatttatttaagacaatagagcaattaattgctcattggcaacctgacaaaggaaatgggccaagatgccaacccatttcttgtggtctgccagcccttagaattgtgtgttccagggatttgctaatcaccagctggtaactgatttacaaggctggaaagacaggaggactcttgaatcatggccacttacaagtaagatggaatgtgtactggctttaagccttgtctactggcattcagatgttgctgccaggggaaagacttgatgatggcaaagagcctgtgtgctatctttggtgcatttttccgatgtcatcagcattgttcttgaccctcactttggtttaacaattaagacctgctaagtagaatatactacttcagtgatatgtgtgtgcctctctgtctatttgtccacccgcccgtccattgatctatccatctgttcatccatccatccatccatccatccatccatccatccatccatccgtctatgcatctatccatgcaatgaatactggggttaagccatcaatgaatgggctagaattaacctctgaaagcattgtttacaattggggctggcaatctttttctgtaaacgaaca

SEQ ID NO: 46893 - DNA, 543 bp, Homo sapiens
ctggaaaattacttgagcccaggagttcgaggttacaatgagctgtgttcacaccactgcactccaggcagactgacagagtaaaatcctgtctcttaaaaaaacacaacacaataaaacaaaaccaaaaactacaagacaaagaaggctaaggaatgccagaaatccccagaaactgagagaatcatagatgatttccctctcagagtctctgataaggaaacaactctgttgacagcttgattttggacttttggcctcctgaactgtgagagaacacatttctgttatcttcagccagatagacagacagacagacagacagataaaattatctctctgtttgtaacaaaaagatcattccccctcaaattccccaaagtgtgtgaaacaacagcttcattgttagaacaatgctttctttgggtgttttgaagaggagtgttcattgtttaaaatgagtctgattacattgtcaccacatgttatatctgctttttctatatactttagaaaatatcttctggattgtatactccttga

SEQ ID NO: 46894 - DNA, 648 bp, Homo sapiens
acactcctttttccgataagtagctagagagtaaacaagaagcatacagataaatttggtggcattttaaattacataagaaaatgaaataggaagtaacctcagctggaatgtgacttgcaactagaactactgaacatggcatacctggtgtgagcttggcacacgtgagtaggactttcaatggtcagccacctctgctgcctttcagacttatgctttctttagaggcaagtccctggacccttgaagtatgggaatttaatgctgacaccagcagaaaaatgccacccttctagtcccctgcagctattgcttgactttcttggattgcagcagaactcacctcctctgcaaatcctgaccctgctgagtgtgtgagctctggcagtgtgtccaggctaaattggcacacactccctcctgtctgtttgggtgagtcactgagtgttcagagcacattttcccttcattggctgccagctatagctattggctcactcattctctttggaacagctcagcactcttgtgctaatgcaattgcttgaactgatgtacaattgtgtagagtcctgcaggaaagcataaaactgctgaaggctgagacctgtctcatctaccgggaagtcagacaaagatgcttac

SEQ ID NO: 46895 - DNA, 1364 bp, Homo sapiens
ctccaaatttatgagccttgtcaatattatccagaactttgatgtctgaacaggcctcccatgaagaatgttctccttggctttacttttgaatgcactctatgaaatagcatgctgcgtttttagatttgtcactcatactaaactccacatccacatactagttaagcatatatttggacagttgaattatatacaataattgttgtgagccttatcaaggttaaagttcacttgtgtagaggaaacattttaaaacactctaaggtcttcttaagtttgagcaacacgtgagtaagtcattaccaccaatagcctatctattcagtttcagtgctgtttttataagtactttctatttgggctttcaaaaatgtaagtgggatgagagagagtaaacagtcgttgtttgttctcttccaggatcagattacatgatagttgcttagttactgctctacacagtgtacgtacctttatgtgtaaatacagatttcaaaatctctacagatgtaccctgggtcagagaggtttttagcagatccagaaaatgcgtggtcttggtttctcacaaaaaggtaccgccaaacatgtttggtaataggaatgtaaatagtgaaacaaatctaccgagagtaatcagaaaagaaaagaacttacttgattcctagaacccaacgtacaaaaaggcaaagctaactggaaaatgcctcaggtggtgcatcatgtctaccaggtgcattgtgtgacactgtttgcttctctttagtactttttccattaactccatgaaatatttataaacaaccatctcccttttcagtactgccaattcattctgttcagaactaagtcatttggtgctaagtacccaattcttgccatggtgctccaggggccaagaatgactgagtttggtttcaataatgcctctcttagtattccattcctaccagtgatgttgagagccagagaattgggagacagagcttgcaggggatttcctttctgttcttgttccagagtggctacaatgaagataagataaacaagcaacttctgtgcaaggcactgcccactagtgtcttggtgaaaagtgcttctgaaagtcagggacaagggggagaactgatgactacatgtgttcctggttaatttcccttaattaccaccagatcagccttgtaccctgtcccttgtttgcactcagaaaaaagtttcctttacaaatgtttaacctgaaaacttttcaggtataaaaaatacctacagcacaccacaaaggctcaactctgccagcacccaccgcccaagggctttagggactgcttatagatgtttattttaaaagtttaaccaaatgg

SEQ ID NO: 46896 - DNA, 1143 bp, Homo sapiens
ctacttaaagtctgacaaacattttcactatatgtcatgaacagaaattagccctctccctacacccaagtgtaagagtgtctgggtatgtagccttttgttttgggtggcaatatacccagggaaaaataagggtactgagaaggatgggagagaacaggtctttctgtaggcaactggctatctttgtcataacctaggtcttagtgagttggggctgacagcagaagggattaaaaagtactttatgttattaaccataaactacaggaaggaccagcatgatctcagtcatcattttatctcaggcttacttattatattccttatattatgttcaaatttcttcctcctcctccagcaatgttagggtgactgctatgttgaaaagagaccacaaactgttaaagtctcaaattgcatgcctcacctttccacaccctcccttttgcaggccaagttgttcattctcttcttttggggcaatacctagcagattactcatatgaggattagtcagcccttgttccctgatgccacatcctcccccaaccaactaccatgtatcaaagagtcctgggactcccacttttgtcttttctgttactagcacacttaatttcccactcaccatcttccttcttgcctcccactctgttcctactaatagtgttaatactatcaacagcaatgactagcatttttattgttcttcttacaaagttccttctcatatttttatttttatctcatgtgcacctcacagccatcctgctatattttttcaattttcactaaggcatgtattttagaaggttggcaattaaacaaatccgtgtgagtaacgggtagaaatgtaagtccaacccaggtctcctaacctcacatctcatgctctttctatcacactatgctgcaagtcacacctcttgtatattgtctcccaacagcagcagtacaaatgataaaaagtcctggattagtgggtacatgagaaggaaggttacaaagtgcactaaatggaaatggaggccatgaggcccaaatagttggagatgatccttgctacaaagtaggaatgagcagtgactattcgtgcttaaggacacatggacttcaaaatactctttcctcttaccaaaa

SEQ ID NO: 46897 - DNA, 683 bp, Homo sapiens
aataatgcagtattcttgaggacattcatggtgattagggagatgaccttgaccggttatcaaattcacaacctcttacaatggaccaaacctaagccaatttgattaaaagagattttccattgtttataaagactaccatggccagccagcacttcattccaatacaagcagtttaaatattatgcaatcctttcttatgtaattcttgattctcaggccacaccagcatggggataaaaatagaacattatgattgctgcaaactggtatttctctggccatgctcctattcaccatgtgagaactctggattacccttacatttttattaaataattatagcattcttaagatgtatgtcatctacaatcagaaaatttagccttttaactacccagtggcatcctatgctcgattttctctatcttttatcatatgccagtgtaatatgtctcctgccttctggtataaaaaacagcagctttgctgccaatgccaccctatggagatgattctagaaggaacagtgtctgttcccaggctgctagtgctgactgccaaatgtgtcaacgaagtcttagcattagtcaccagtatctcctgctgtgggggatgagattaaccccagcgctgtagttgtcttgtgttctgtatatctgtgctggtcgcccttggtttta

SEQ ID NO: 46898 - DNA, 494 bp, Homo sapiens
ctgccttgtcacagtggagaataaagccatgctgggctcagccagcacctgctcatagagagagcatttggaccagccctagccagaagggaattgctcatcccaatggtcataatttgagtttctccacaagccttgccactacaggccaaagggctctgtggtcctaggtaaacttgaaaggcagcctaggacaaaaggactgcaattcctaggcaactcctagtgctagtctgggcttcgagccagtggactaggctggcatgtgacctagagggatactagctagggcaactaagggagtgattatgccatccctcccccaaccctaggcagtacaccttgcagcaactaaagtaactccttccttctgcttaaggagggcagagcaaagagtaaagaggactttgtcttgcatcttggacaccagcttagccacagtaggataggtcagtgggcagagttttgaggaccccattccaggccctcactca

SEQ ID NO: 46899 - DNA, 838 bp, Homo sapiens
ccaaaatatcagaaatcagcaataaagaacttaagcaaacaccacctattccccaaaaaccgattgaaataaaaaacttaaatgataaataaatatggcctactagtttttgaaagatcttatatgccaatttgtcacattattgtgtagagtaaaaaagggatttgttacagtcttatttcagcaaaattccaagtgctcctaagtgagatgataatcaaaagaaaatattcattaggaaagaagtatctcatacattaaattttaaacatatgtgtagctaaacttttctttgaaactcaaatatgtatatttctgagacagcaatctcaaaagagtatgaacaaacatttgtctctttgagataccatacagcagggagtgtagaagaccacataagacaaagattacattctcacattttgattttttttttgaccggatttgacctttccctttcacaatattggactcaataaccttgctcctctctctgtccatgaactgttggcttcaacaattcttgcgctatggaatcctgccagcactgcaggagggctggagtacagaggcaaggttccaatgtctaaattagggccagttacttccagaagaaaattcacagctcttgctgggggttgcttgcagggaatttttccagagaaagtgtgtttgtaaaagtatggaagtggtctgtgaagtatatagacgcagtctcagggagaaaagaggggtgggagatattacttgaattgatcatcttggacctaagaaggatctcaggcctgagggatcagaaataaacacagttgttcacaaacttggagcagctctctag

SEQ ID NO: 46900 - DNA, 1271 bp, Homo sapiens
taatccaatgaatacttctaaatttgatcttattactttgtagtatttgataatgttagtcttgtctaaccttcttaaacaggtttcttaccctgacttccttttcaactttgtacctcaaaaacctagcccagtgcttagaaaaaaaaaaaaaaagaaagaaagaaaaagaaaaagaaaaaaaaagctctatcaaaatattagttgagtaaatgaagtgctaagtgattttaaaacaatcccttctcaagttagttttggtcatgtcatccaagatatgttcttcctaagcattacgttaatattcaacaatgatactcatcaactaaagagtaagggataccaaaatgacctttcagtttttgcttttcataacttggaattttggtatatttttcctacctacttgggctccaccttggcttcctctctctccagactgtcccagacctggcactgagtgtggccgctcagctttcatcatttgttctggccagcggaatgttccctctgatgcacctcccttggctggctgttgctccctactttcattttcactacgggtacagccattcaccagcttccactggaaacatttttccagacattcctttaggattagtgccattttcataactggccgctgggttctgtaactatttttcatacttccctattctcaaatttgtctttttcagctttataatgacagtaaagaggtttttttttttttgcacattactttgcttttatccttatgaaaagcatgtattttatttactcttgtgtaagaaaacaatttttgctcaatgtaactttctatctcttgtttttctattttttctttctgttcgtatttcttcttcttgggattcttcataaagaagtgttttgatttgacaaaagtcttaatcatggtctttaaatttaaaaaaaagatttatttagtcctcaaccacaatgataagagattctgtcttttccacttgagattacttgtaagcgacaataaaaatgtatagccctctatgatttctataaaatttcttgggatattaaaccctgattatcttcttttattgattgaaatatgagctcagtgttgtcctttgataaacttcttaccttttcccacattgttcttttcacttggattacaactagatgggaaataaaggtggagtctcccctcttcccaatcccatttgaagtatctgtgactccctatctctgatttggaaacatatttattttcctctgaataaattacc

SEQ ID NO: 46901 - DNA, 817 bp, Homo sapiens
atacagtgaaaaggtagagtaaaccttaatacttttttttactgttttgtttttgagactgtcatgagaacatatttagcattagaattaatttattttgaactcttggagagaaagtctgcttacttcatataaatcagatggggtttacactgcaaaatagtccaaaatctctcatgtggagatttggctacttttcattcttttctctgtagaggtcacaacttaaaattcttgcagattgtcttcattctgaaagcatgtgacagaagcttgcccagtcccctcagactttggactcttctgttgtcttttgcctgagcaaatagaaaaatacataagtaagtaaatagtgaaaaataaatttaaaagtgctggtctatgcaaaaaaaagtatagagcataaaatagactatgaaagaaagatctagaaagaaaaacaagagagctgcccaagtgaccagcatgtttgactttcttctatatactttggcttaatttactacctcttttcttcctttcccctagaaggtcttctcttgtcctactctgtacctcctagaggaacatatctggcttcactaaaccaataggcctaggcagattattgtaattctctgtaccattccttagtagtgacacttgtgatttatgttactctctcagtgccactgaaatggtttaaacaggtatctaaaagaggtctgatttttataattcaatttataagaccaatactatctaagaaaaccccaataatagtatgttattctgaaatagaaatgtgttgagctttggaaaaaagcaaagataaaac

SEQ ID NO: 46902 - DNA, 2550 bp, Homo sapiens
ttttctagggtacttggggttagcatcacatacctgaattactcaggggaatttaagtcaaataagaagatccttactcagagacagcgcaggtctactgatttctaggacctagactgaagaaaagtgtcatgttgaatgaattttatggatgctattgatgagcatggacagctagaaagtccttgaagagggtaggcagcatgagtcatcactctcagagtgaccttttctgcaaaggtggacaacaggtgtgggattcatgcaaataatagaaaagggtgactcactgctttttaatttagactacattagcgggtaggaaggttccaattcagaaaagagacaaagcctctattatttctttggcagctctttttgtttgtttttgagcctgcttatctcccaaattagataaagtaacagaaatagagggaaggttcatagagaggcttagataagagaaatgcctgtgaaaattctgtctgaaatagggcaaaaagcttccctgactgagtgtgattcaccctgttataaattggacagaagaagaaacaggacatataatagctactttctttttatttcaaaaagacatagatacattatttttctttttcatcttatagtccactaatgctggaggtattttttaatatttggaatttttctatcacctagcgaatctactaagactcaatctcttcctaagcaagtaagacttgagacattgtattttccctttcaatttgttaccttaattttggtaaataattgtaaagactacaatagttaaaatgagaaggaatttaaatggtaacagataatggcgagcaatgaagtggcacagtgatgtctagaaagattgcattattgtgggaataacagaatgaaactatacagcactgctatgtgacagctcaagtccagcgcaggctaacagcagtaactaaacatcataggaacactttatccttcactaaaagtatttagtgcttttaatcagctcaaataaaagagtctcatcactccttgaaaatacatgacaagaaggagctcttagtttttgtaactgtatattttatggagaagatgcaaacactttagagtttcccccaagtgtgaaagtgttgtctttttaaataggcaattaaaaaaaggaagcctggcttagttatgactatgtagttctctctgatttgtattttctaccagcaactttgtagtcagctgcaattacaatttgaaattgtttgctcttatcgtcatcatttgacccttctttctgaactcagtccagcacttttcttatcgatgtatgagataccataaattagagttctaggagcccttcattgacttgtttggagaggctgtttaaggggattgagtctagtgtgagtttctggcaccagcaacttggtatgttatgactcagtgcacagaaatcataaaagactgcttctctcccactggtcttaaaaggagctcaaagtccatgttagaaatagtcatgcttctgaaaaataaagagattatcaaaatgcagtaaaaacataaagacttacaaataaaagttggtctcaaatttttagaatatagaattttcttattgtatgagtaactactgcagtacagtttccctcaaactacacaccacatagatatgtttccagaagttttctgagaatagaatccaacagagaagtttatcccaaagcaaagctatcagttcatatattgttccagtttccatgctatattcactaaatatccatctctaaggcaatactttgctccttgctggtaggatactaggagacctgaatagatgagtagaaacaagttgtttataatgatatattatatgttgaatacagctatgtgcaaataattttaatttgtaaaagttactattttgggaattaataactgtagtttatggattctaagtatgataaattatactaatagtcctggtaaatttttgtggtaggttttaattcccagataaaagaggatattgaatagagtgaaacctaccctggtaaatccagaaataagtcaacaaaataaataaaaagaagattagaattagaatataaacaactctatctttcttatatcctccaatctttattggctttaatagttcacagatgaaaggtttgtgttaaaatataccacgcaagcctcaaataaagttcgttaacatctaaaattgtcatccagtaagtcaaaatcaataaagcccaaaaaatcaacgctccaaaaagatgccaaaataaatggtttgatataggtacaacataagagcttcttccaggtgatctctggggagaaaaagaaacaaaattggcagcctagagttgccaattagcaggttggttatatgagaaattgtgtcagaatgtaaaatttccagtgatttatcaaagatccaggaacactcttcctcttagaatcattaattaattgtgcacgtgtttgtgtatttggtattgttgagcaactgtgttttgtcgttatttgaaaactacaatctcgtct

SEQ ID NO: 46903 - DNA, 997 bp, Homo sapiens
aaagaaaatacacaatgaattcattcatataggagagtactggtggataaattacaagtagattaggcaggggcttaaaggcagggtaattatttcagatttaatttaataaattggaaacaaaatcactgctgtcatgtgtgatgtgactgacaaataaataagcaatttgattgcataatagtatcagagcattcagaatgtgagttgtaagagtttgtattttccgctctggtcaagaaatacctatagagttgtgttcagccaggactccattatttgagaactttcataaactgcagctaattcgaagagaatggtaaggaagcctggtactatcacacatgaggaatgacaaaaagaacaaggagtgtttgccctgtaaaagagctattacaaggggatgacgtaatagaccgtgacattcctaaggacatggtttggtatttttgacctttgagtcctcagcgcctacatatggttgttactcaataaaggtctgttgaataaatgaataaataattgaatggccagctgtcagacggaatagaaattctatttgttctttgtgtccctaaagggcagagggtgatgggagttacagagatagaggtatagatggcaactcaacataaagaagattttaacatgtgcaacctcccagcaatgaatggaacttctgccagagatgatcaagtttcaactcacatgctagggtgaacagctcatgcttgacaaggaatgacttaagcatcccttgaactctgtgactattcagcttcatcaaaattgttgaatttttagcatgatataggtctcttataatgacttgcaataactttgttaatattacttgtaaatatagtaacagattgccctaaaaaattagctgcttaaacaatgctcatgttgcattttgaggtgtttcatgagtcacaaattggtgagaggagaccacacataggtaaacacacaggcaacccctacctcccaccat

SEQ ID NO: 46904 - DNA, 550 bp, Homo sapiens
aactattttgttcatttgttcattcattcagcaatcgtttagaggcattatttatagggtaagatgaacatgcagatgctgccacaattccacaatatacctgtcttcacttacacagaggtctccattctcctctgccagtggtttggcacctatggaaatgctaatttcattttaaaataagcaacctcttgaaagagccatattcatttgcaagcctgtctcttgccagatattcaaaagcaggtgcaacggggtcagctacctctgagatataaacaaaaggtttcatgtatgagtcagtgtgacctttaccagcagaaaacaggaggaccagagctgaaagcagcagcttatgtatttagttaatccagttgcatgaataagcagagtgtaaaaggtacaagtgttttcagtgaatgtagattaaatgtgggcctcatagggttcgttttcaatattcatagatgaaacatattactcaggctaaaatttcttcttcacggactcctacctcatggacagatggattcaaagaattatcatattt

SEQ ID NO: 46905 - DNA, 788 bp, Homo sapiens
acacaccacttgtgactatttgcgcttaaaatgtgctgagtgagacaaagaaactgaatgtttaactttctttaattttagttaatatagataaaaatataaatagccacatgtggctagtgactacgatactggacagtccagcacaggtctacctaatctcaaaatgtgaatttttcaaggaactatttccatggtaatatgaagaataaacttttatggaaaagacagcacttgtcttccaaatgattaatcactaaggaatttttgtaactaattgactatctcaaacctaaagatggaatgaatatgaattatggttttgggcccacatacaaacaactgaaaaattaagtagcagattgtggggtacaaggccttcctgccaccaactgctgttctctctctaaatagcctatagctaagtttgcaatatgcttggctgggctcctaccacaaattccacaggctgaaaatcaaatacaacctttatccaagtgccatgagtgagaccaagcttatttttttaagaacattaatcaaaagtcacatgaaaaaaaaactatctgctgtttcaaaggacactaaaatatatgctgtatcgcaagttgatgaactattaaaacatccaatctgaattttgtaaatacactttaatataggatgagatcaacataaatatgctctatatcatctacctccttttattattatcatctactattatcatttattattaccatttaataaaatttactcttgaaattataatctatttgcattaatgc

SEQ ID NO: 46906 - DNA, 816 bp, Homo sapiens
agcctgaagaggattttcttctgcccggaataataggaggaaaattggtagagaaactatcaaacaatgtagaatcttggacctagagctagaaaagattttaaaggataaacctgataacctgtattttatattctccagccaaaggactccgttaaaatctaaatcacacaaaatcttcaaatgtctcattttcttactcagggtaaaaagcaaagtccttaaatgctctacacagtcctattctgcctgccactcaccacctttggcctcagcttctgtgactttctcgcattgacttacctccagcacagtggcctccttgccaagacatacgctcactgcatgagatttctgtttgccgttctctctacctggaattgttcctctctcatttcgacatgactcatgcctgtatcactttcaggtcttctctcaaaagttaccttctcagagaggtctttccctgacaaccttaattaacttaaaaaaatcaatcccccgcattttctatcccctttcagttttattttttgcacactacttatcaccttctaacatacctacgtatttcctttgtttggtgcttgcatctcaccatcagaacgccagctccatgagctgcatttctgtcttgcactgctatatccccagagccaatggcatcctggtacattgtaggcacttgataccttcttactgaatgaatacgtgaatgaaaaactggtgttcaaagtacttaaggatttatacaaactcacactttagaaatcaggtaacagagcaggagtagacaccaacttacatcccctttac

SEQ ID NO: 46907 - DNA, 619 bp, Homo sapiens
gcttcagatttccttagattttaccaagtgctcttttctgttgccagaccccaccaggatcccacattacacttaagtcatatgtctctttaggctcctcttggcaatggcagttttcacactttctttgttttaataatttaaggaatactggtccagtattttacagaatgccccacaatttagttttggatgatgctgttctcaagatttggcaggttttagagtgttgaggaaaaaaccacagaggtgaagtgccattcttatcacatcacaacaagggcacatactatcatcatgacttgtcactacttatgttggccttgatcagctggctgaggtagtgtttgttcggtttttgcaatggtacagtactcttctttttcccttttccagattgtaatctttggacataagtcactatgcacagcctacacttaagaggtgggtagttaacctccacctccttgaagggccaatatctacattgattatttggaatcctgcacagtaaatttctttccctccatttgttcattcaatcatttatttatatcagtgtgaatgcatggatactttactcgttgtgttataatccattactatttattttgttgct

SEQ ID NO: 46908 - DNA, 4429 bp, Homo sapiens
tcaaaggcttcctggaaatcgccatagacgctctccccgattattgtggggtgaaatgtctcagtcattgggttctctgaacattcataaaagagcagaagagagtctaatttgatttgaaaagaatctacactgaattcaaactgcctccggagggaatccacaaatttcagttccacatttttgccactgttgtttgacagggatataagactccatcggtcagagtcattgcacactttaaccattttctgcacataagcttcctacaatttaaaagataaaacaaaatgagcaaacctagaaaataataaatcaataaataaatacatcctcttcacagctgagaattattttgctctttcccttttgttttgtcaagtttcagccaaacactacctacaggcttaaacggtcttctgaaaatagaaaaaaaatacttttaacgagtagttttactgtctgggaaagggactagaggtaatagtttgaggcttttggcagacgtagcacagtagtaagaggttttgttgtcatgtctgactttttaagtgttactttttgaaaacggtctaataggcacaatattcacacagtatccaaacaacattcaaaagactcggaagggcattcagcggtaggttagtcagcctctcgcccttgttccaagccacccaattcctctccgcctgcggcaatcaatgttatcagtatcttgtgtgtccctccaggggcaccctgcagttacaatcaaatataaactaaattatgacattccaggagcctgcctcctcagacaattttaactaatcatataaaacccgtcttgaactaaagtggagggtggggagggggtgccactatacccttaacatatgaaccagcacgaagaaccaccagatagacctttaacacgtagtcagctgaatgccgctgtgaaatctattcaccttttccagtacaataaaaaactcattgactcacttctgcttcaggctgttattttcccaaaggctagactcaaatataatgactcaaaaattatttacatcatttcattctgccaagtatcagaatctactctggacaagactccaacagggaaagccaagagttaaaacataaggagaaagaagagaagagagggcagaggaggacctgggagaagagttgtagcgccaaagcatcaagtaaactgaaacactcaacaccgtccacgcacgtcagtttactggtttaaaaaatcaaaaatcaaagaaataacgcgcgcccaaactcgtgatggccacagattcatggcatttaaccgatgcccctctgcccgctccccgtcacacccggcccagactgggtcaggacccaagtgcatctcgggtggtgttaccttgagcgtgagtggtgtgatcttctctttgttcaccccctcgggtaagaagtccaacaggcagtccagcacgacgtccttcacagtctgaaactccccttccccgcgcaggtcggcgcagaagatgaggtccaggtccttgtagcccaggccgctgtcctggtgcaggacatggctggctgccgagccgttgaggcgcacgtcgcggacgccaatgcgcttctcggccaggcgccgccgcaccaccttcacgatcaggctcggctgcagctcgagcgtggggaagttgccgcgcccgtgaatcggaatggtctcgctcaggatgccgtccagccgctgcacttgctcccagttcagcacattgcagtgcgccgtagggctttcgcaatagtccaagcaatgcccaccgaagctgccgccaccgccgaagtcgccgccgccgaagtcgccgccgccgaagtcgccgccgccgaagtcgccgcctagggggatgtaggggctgcaggccagctcgtcctcagacatggcgaagtacccttcaccctccgccatgtagtgcccgccgagcgccacttggccctggtcagtcctaaaaagaaagggaaaggagcgcggtgaggacgcgcggcggcggagagcacgcgcggcggcggagagcagaggcccgccaggaaaagagcgccccctcccccgatagttccctgaccccgggcctcctcggagactccctcccccggcccttacagtccccagccgcgcaccgcgccccgcagagcagccccgcaccaaaagtatctctgatgcatctggaaagcgcaagcgagagtcccgtctgtgtcacctggaggcggccgccccttctaggagcgcagcgagcgagagcgaaaccgagaggcggcaacacttccaggagctgcgagcgcgctcagacagcaaatagcgacttcgtctttcccagacccctgccgcctgcgctcaccactccctccccgcgacccctcctgcgccgctgccaccccagctgcggtggtcccgaactggcggctcttgctgccacacacgctcgtgtctctggagctttagcagttgtgcggggaaaatgtcttcagtactttttttataccgggcttctctgcgcttccggggcccagagcggcacgttcgccacaccctcctcatctgcatagggcgccgccccctctgccctcccccgcccgcagggcacgcagctgactagcccagcagttagtgcgggacgactgccggtgagcgtgaggtcctgggctgtatgtgcggatactgtgtgcgcccgtagatgcgtgtatttatacatacatttaatttatgtacgccccctcccacaaatctcttttcattttccccaggaggagacactttaaatgccccaggaatcataagtggtcatcaaaaccagatcacgactaaaatcctgcaactgcagaaacttcccaaaattctcgcggactcagcccgtctttagatcatcacggttgggctccggaggttcctcacgaccgctcttttaaacctcggtttttaggtagaccatttactccattgataaacccgatccaagtgtggactcatgagtccactcttgcacgcaaatcagtcacggcgcgtgagtgggaagggcttgttgataactgggtttcgattctcgaaacctcgggaagcgcgccggggagctctgggcgagcccgagaaggcgcgggggcggcaccacgggcctcgggcgtgcgcggctcctgcgcacgagtggctccaaggggccagtacttcgcgggggtcagggcgcgtcacggagcagacgcgggcgagcagccaatggccgaggactgggcgggccgagtgggcgcagagagcgcgcccggggagtgcgtgctgccccggagtccagggaaagggccgctaggtgtccggtgcctttgctgcgagttctctgacaaaattggaggcggcgaagcgcgttcctcgcggccccctaaagtttggccattttaagtgcatcatagtgtcagtggaatacgatttggttttccacgagacgtaaaagtaggagtttcaagaataaaatgaattctctcctccagcttcggtgacttcggcagagctaattctacgcacgctcactcgcgccaccaccactctttgctagaaagctgtggccgtctcttcggcagctcgctgcctccatcaactaacccggagcagctttcccagcgcctagacgctgccgggggctgaggtggggcagaggggagaatgccagggtcacagaatactccccaaaccctgctcagccctgcccgcccagactgggaggaaaaacagcccgcacctcctaactgggggagccccggcctagtcactcaagctgcgcggctcgggggtgaggggtagggtgcgggggtgtcacccgtggagcatccagctgcgtgacaacgccgccccctcccggtgccctgccgagctgcgtcccaaaatggagaaatccgactgtctctgtggcagaggccatcccctcagcgctgcgcctaagcactgaggtgcgcctggggactctaggacaactaccctgtccgcatagggccatcgcttccttcagagcacacccatgtgttcctctgaccagccatcggcgcatgaatctatcttaaccaggcattttatacatatatatacatatgcatattcttgtgtgagcatgtgtatagagagagcatttagtgacctgttacgtgccaggcaacaggctaagtgctgaagatttaagaatgacatttcacgtaatctagagggcatagcacctaggtgcataattatggttcagttgcatatgtattatgagagaagtatattctgacgcaatcgcgtggcgggctaactacataggaaacggagagacacccgagaaggtgtcatttggactggatcttgaaagaatggatgttctttcagtagtcggggaaagaggagaagagcgttatctacaaagggaagcgtatggagttggagaatgtt

SEQ ID NO: 46909 - DNA, 1480 bp, Homo sapiens
atcgtcttagaaagtctgaaaaactgaacaaaacataataactaaacaaaagtttctcttgaagctactcagaaaatggacatttttaaaacatttaaaaaaagaactgttcaaaccagactctacgaagaaaaatatgactaccttaaaaaccctgagattgttaagtgtaagtatggaaactagctgtggactttctataggaagtcacgctaagatgccaacatttattctggtaatatggaataaaagaaattcatgttttctttcctaacaaaagaaaaggcttcaagatgctagtaaattaggcattagccgagaaggtgtagaggagaacaaaagctataaaagttattgatatttgaaccatgaaagtgtctggctggaagagatcagtttccaataaactacaactcctgcaggggagctgggaaataaaagagaatttggattgacacatgattaagaaggctgaatattgatagtttagataagtaagatatccctaaagggtaatagaactgccctctaggttttgaaattcataattatttatggaagtgaataattgattagcataaaagtgatattcttaacataaactcatgtcaaaatattagaaagggaaaaaatatatggcactcaagattcttttcccaacaatttctccctgatttccattgaaattccaaagattttggtgggttttttttttttgtaattcactggaattaactcagcaaccacatcccactctatttacttattgtgagatctttgtgagcagtagttcgtcatcctcacactgactagatatggattgtgttgctgtgttttaaaaaagaagtatttcttgcaaacacttatgacttgtctatgtcttctacaagtctggacatgtcttggaacattatctgtgttctgtgggttacaaggcttgtcgaggtcaaagtactcagacatgagacaggcaccttgtatactccagagagctagaaatacttggagattaagtctagtccatgctcagagtagtgcagaatagtgtatgtatttttaattcactatcttaaaagtaaatgataacgttaagaatagtatatttcactttagttattatacatttatgattttttatatgagattttaatgtttcaaagagatgtttaaaaatggtagatacccatttttctagcatcatttttatatactaaattcagaaactttgtaattgccatataaacttgtggaatcatggaaatcatttgaataaatatactatcataatatttgaattatgttttgtagtacattgcattgtatttcattatatatatatataaaataactctagaccaagtgcaggaatgacataagaatatttccgacataaaagtaattaccctttgcatattggatcggtcattattttcagtcacgcattcttcataaatcaaagaaattgagttaccatgactaa

SEQ ID NO: 46910 - DNA, 3124 bp, Homo sapiens
atgttagaccagagctgccttctctgcgggacattttataatctgtctgtctgatggctcacatgggcaagtctgcaatacacaacaggacaatgggtactacgatagagtttatgtatatagaagcttggaatgtctatgaccctctgtgtagcaaaatggcaacttgaagaattgttttaataggatttattaaaattttgacatttatgctttctggggaagatgagttatgtagacagcaaaatggatttactttttaattggcttttctaaaataattcgtctcattttgcatttagtcttcagctgttgctccgatgcctaaaattttatgtttttacattttctgaggcagatattattaaaatattcactgctacttgatatttcagtgctttagtttcagtttcatttttaggaaattgataatattttcaaattatataccagagtgattgtgtcaatgcaatttcctttttgtttttactgtatttactttattcaagatgctttttgctttctttactcagacacacatccttgtgtgattttttgtgtgtgcgctttctaatatttttttcttgcccagtggctattactattttgccttgttcaaaattcattcatgtcggtttcaaaagaacttcaaatatttgtttacattttactgtatgaggcaagtcctgtcatttatctaacaatgaccaacattgctcctttaaatgtctccccaaaacaggtcctccccagttcttcattttacctcaaagaatcagaatgacaaggaaaactttagcaggaaaagaaaatggtagtcctataacttttttaaaaacagcaataaattgtattattggcagcataagaaaaagtctgtggctgatgacgttaacaaagttgacatagtgccatttgaattgactctactcctagacaagcataagtagtatttactcagtcccagaaactgtgattctcaggctgaatctgaaaataaaaacccaacaggtctgtccatttttattttcttcaatctcaggctgatatttaaaaccattgaaagacaaaattggctgtttgatagtagcagcatagtattatagctcacacacttctactcagagaaatatgatgccttaagaacaaaactttgacacagagcttagctatttaaggttcataataccctgaattcgtagagtatattttggtttacaaatattgctttgaaactggcagcaaccttaagaggtttgcagagagcataaactgttaatcccagtttagagcagagaggagtggaggtcagtcagaaggtctaaatgactcacaaaagggcaaacaactaattaggggaagatccaggtttcctaatacctagcccatattatttgtactatttcggttgagcatttttaaatttctatgctgttagaacatttttagaccaataagaaggacaatttcatatggtctctcaaatgtgcttcttgcaatgaatattgtcattgttggtagtttttatgtgggagtatggagtgtgcagtaggaggaaacaggtttgaattttatataattactaactagtttgaaaatatttcatgacaatgtgactttatttaatattattttccttctacatagcaggagttcaattaattaattgtgatacttattaaaactgtgaagtaaatatttccacagaaacttccaaaacttataaacataatagggtttaaaaattggggatgaggaagatacatcagtaacccatattatcaaataaaatatttaaatactcactttgcactctaatcttcctgaagacagtttatttccttttatatctgagattctatattctactggactactggactctacctctgatttattttaaaagaaattttaatagtaatcagaatggaaagtcaataactcaaacttatcagaattgagaaaggttctagcttaggaaacttgtccctattcactcaggaaatagagagcacttaatctaaaggaagatgcttgctcccattcaggagggagaaatgttgttctctgttgcttgagtctctccccagcccagcgcctatctcctaacccaattgccatctccaacttcagagagcagctttagtaaaacactctggctcaatatgtcatgctcccagaccagtgggattcacacactctcttaaggccagaaagacatctttatttgtgaacaacatgttccaggaagctccatacacctaccatcaataaagcaccacacaggaccttgggagctggtgactcaatggtgtttgttctgttttttttttttttcattgctgtttatggaggaccattgtacaaggaaaattaaagcttaaaaaagacagttctgccaatgttacatgggtggaaactgcactattgattctcatttgcctcatgagtcacccaggatttttccctatttcctgtcaatggaaattgtctggtagggttttaaagaataaactgtgtctcatggtcagggcaggcagaacagcattaatggtgaaaagcgtgtggcttttaggtagactgcctgggtttggagcctggctccacaacttactggttatgtgaccttgtgcaagtttcctaacatttttgcctcaaattccacatctataaatggagatgataatagtacctacttagtagagatgttatgaggattatatggattaatgcatgttaagctcttaaaatagtgtgtagcacatggaaagtgctcaacatgtatttgtcactgtaatcagctcaggtgcccaactagcccagtgataaatatattcatcttcagaaaaacaacacctatatgtgactctgttatctctaatgtatgatgaccacagaagtcataaatcaaaggtcacctcagcaccacgttaaaagtatgatcaggacaatgtactgaaagagctctattctgtaagtgaaaagacacaaattttaatccatgtttgctattaacttgctatgatcttgggcagttatgcatctttttgtcccagttttctgaactataaaattaagcaaatcttccaaaggcttatccagacttactacactacaattactt

SEQ ID NO: 46911 - DNA, 677 bp, Homo sapiens
cctgaagccttccttgatggttggagatacatttattagaaaggcacagaattttttacgtgcaatatatatgttttgttccctaaagaatcatttctccactgtcctgcttatacattctctctctttacctgctccttgaatgctgaggaaaaatgatgtactcttcaattgcatttttatattagggtatgtcattgggtggaagtcagaaaacactgactcaaaatgtcaagctcttctccagggaattccctggggcatggctccgttgaccttctgttgtttatccaatcaatctttgtcatcgctactggaaaagcaggaggtgcagattgtagatgtggctgcttcaaagccagtctctgaagatgcatgtaacaatttctttgacctatttttttaatcatcaggtaaatatcctgtcaggaattaggaattgtacatctgaacttatctctctgtgtctgcctatcattgtcatttcagtttttatcagccagctgtgatgcagtcccaaaggtgacatttgtacagtggtatgctggtaaagatttaaaactggctctctggggaaaataggactgatttgtattgtttgacaatttccttggtgtaaatacttccacatggctcatttcaagctatcaacatgaagttcttggaagcaaagttgg

SEQ ID NO: 46912 - DNA, 1329 bp, Homo sapiens
tggcagtattaagaggtgggatcttttaaaggtgatacagtcttaaagactctgccctcatgaatggattaatcacagaaatgggtttgttatcatgagggttcagcccctactctccctgagtctcgcttgctggcttgttcttcctttcactttgcaccatgggataacccttgccagatgtccggcaccattatcatggactttccagcttccagaacaattagtcaaataatatattttctttataaactgcccagtctgtagtattctgttacagcagcagaaaatagtctgaaacaaaaagagactgactttttatagaatgacacttttcccttttatgaggcatcctttgctaagccttctataaaatatattagcatttcttatcagcatcaatggacaaaactcgttaccaggtgccaagcacttctatcaagagtacatcttagaccccgtggagaactggaactgcctccacttctccacaagacttttcgtctgcaacctcccttcatcagtctctttctgtaagctcccaggttaaagtctctttgctattttcatttgtttgcttgaagcatagtttgttgccagctgttagctgtagtgcagtaacccatttaaagtcctaccatacttccttctagagataattgatgctaatgaggcataaaataatccatttgaataactggtagagaagtttcagtttcaattcagtttcttttcatggaaaataaaacttcacaacttgatcatgtgtgaaagcaaagtcggctatttcaaagaaaggaactgattaaaaagaaaacactcacacacacacacaccccataacctgttgacactaaactatctgaacacagaaggcatttgggccaaggcagagtaattgagatttgtgcttacttttcccttggtcttgccctaatgggttcatgaggattgtctataatgaacaaataataattctgataaatgagtttattggttaattcataaaacatatggcaagcttcctctgccacagtatttgggcaaaggaaaagcaaatgaagatcaagaataaacaaatgatatgacacaaaaacaatgttttgaagtagaccagaaaagtcaactaattagggttttattgatctagaaaaggggaaatcccagttctattctaggcacatttgcacatacctaagtgtcaaaatggagatgaaaactgtgttttcattaaaactcagtgggtgtgggccctaattctcacattcttctgtaggttatcacaagcttgctctgtagactttatgttgcaaaataatgaatactata

SEQ ID NO: 46913 - DNA, 405 bp, Homo sapiens
ctcatccactgattagacgaatgcaagaagttgctttctaggagcaagccttcacattgaaaatgattttgaatagtgacattgagtgtagaggtaccaagatgctgtagaaaaatggtttgacaggatattttgcaaaacgtttttctctttcaacattcctttcctttctttcataaatgtatttgtttttcaacacaggtatatagtcaaaggctgcatactggctaacgattaaccagctgctctgattatttgccaagctaatgttgtacgggaatattgcacgttgaatgataaaaaccttggatactgcacattaagtctggtacaacatgtattctaaatgtcccccatttgactgggaaagtctagtacattttaaggatggtttatttttgtttg

SEQ ID NO: 46914 - DNA, 1073 bp, Homo sapiens
acatacagttagttccctgtcactgaagaccatgggctgaggcaagtcagaagttccccagcaccttcattcagcaagaccaaattaaaggcatattagtcacatgcagaaaagttgaagcagctggagcagtggcacctgggaaggaaagagaacccacctattctgtaatcttccctagcaaggccatcaactgcttgcttaagtcagtgcaatattacatttgtgtccaatattgtagaacttggagaggcagggctaaagaaaccctaattctgatagatcaacaatatcctacggaaaaggaaggagaaatgtaaaaacggttgagactaaacatccctgccttacatagttcaaagggcatgtttgtggtttaggaacagccaactccagaaatgggaagttgttgggatgaaagccagcgtggagatggctccctctagactgtttaatgggaagattatgtggtgtgtccagcttcataatggagggaatctaaggggcttgtcgatgaagtgctgattgaagtactcacctgcacaccattatttatctcctttgatttgccaaagtataaataatcaaaatgatacataaatttaattgctggtgttgtgtagttatttttgaggaacagccacaaatctgagatctggtatttaacaaacaactcaggctacctactcagactaaacacatagtgtgttttccaggctgtaattttataaaaacaaaatgtctttagagagagaacaagctagtactattactttaaaaatcactttaggaaaagtttccttactaaactaaaataaaacatagacaatgtaatccatttttctgcctggtcctgatccaccctgttatgccttgttattaccttcatttcattgacatcccacacaaatgtcttctctctgacaggctcagggagcagataaaatcatctctcttatggtggggctttgtttctctaagagcagaagtttgtagacatttcagttctggaccttttcatacccttaaaaattactcagactctacagaccttttgttatgtgtattttgtc

SEQ ID NO: 46915 - DNA, 1129 bp, Homo sapiens
tttgactttacagaataaaatattaaaatcatctgctataaactcagactgttattttaaatttgagatgatttttgccaaagccaacaagaattttgagtaaattatcctcaaggcaagaagcatgacacattccaaattatcgtgaggacaaccatcactctacaaccttgcctttctttgaaaacagaagcacaaactacttttatccagtagggtctttgcaaatatgcactacttcaacgatttcaatctaagtagaaggaagtagaaagtaagaagtacttaggaagtagaaagaactgtaatatagtctcatccgatgtaacagtctcactccatttacaaataggatgacaaaatatttaagcttaatatttcaacttgattttgtgccaatacttttctgactactacattttaacacaagtagtcaaaggtgcttttcctacttcccatgttaacccaagaatgcctctcccttaggaagagaagttaatattttccaaggaaagagagcccaataaatgatgtcatgattacttcacccaatgccaacatgtcctgtttatcttcaacattagataaacctctaaaatctagatgtgcaatgctcatctcataccttagcgtatttaggaatccctaaatcccaagaaccaaaattacaaagcaaaaagtaatcattagtacaatgattaagaaaaataaattttatctcctttcagtcaccataatttgaaaaaaaaaaaacattgaaaagtaatgaaaaactcaaatccacacataaaacatcacctgaatcattataattttcataaataaacataaaatatgtcctaaacaatataactaaaaaatatatttttagaaaacagataaattgatgattcctttttggcattcactctgacaaataatacggaatagccactttctattttttaaaaagtggagctctctggttttggcaacttggaaactcccacctttttctctcatgtctttgtttattctttttgaagattaaacatttaacattttcattattcaaaacacttctttgttatcacttaataaataaagttaaattggcttgagaattttcagaaaaaaattaaattgtatc

SEQ ID NO: 46916 - DNA, 1796 bp, Homo sapiens
cccttcttacctcatttcctaaataggacttgtttttaactatgctgtttgttatgtttttaagagtgaggaacattgaacgattcactgctttgaaatctttactatatctccccatgatgtatagtggtaggtcacaacttcaaggacaatgaggtggatggacaggtaactatgtgtgaatgtgtgatatgatggttacaagaccacagagagtggctggagagagcactggccctgtctaaaggcatgctgcttcattgaaaacaaaacaaaaaccaaaaacccttcaccacacaaaacatgtccatgggccacattaagccaagaggctacctggattgtcattatatcattgttgtaactctcaccacatagatagtttacctctagctcaggctgagatcaactctgtctttcatggttgacatggatgaaaacgaacggaagcatatcatagtatcactccaattatccttggagctggccaaaagaagggaccctactgcttcatctttgtattctgtttaccagttcagtttgcaaataatcagcattgtgatctcatggggaaactatgtcagataaaagagaatgataataccaaacaactattgggagctcatttcttgccaggccctgtactaggaattttccttatcctgtttcatttactcttcctaactaacctattgcataagaactatcattatcgcaattttatggatgagagagctgaacacaataggtgaagcagaaatttggtgactgcaaagtctatgattgtaaccaaaatatatatatttatataaagcaagtgtgagtcagtggttcaaggattgtgcaataggctagaaggaaagatattgaatgtaggtaatatttaacagggaattactgtttccaacaatagaccttagcagcattagcaagaggaagagcagtggacccaggagagcttggagaggggctcagtggtgggagactgaggttagggttagggttgaagtgcaatctgacagaagggtgggtggagacagtgttgagtctgagcttctcctcccccacaatttctctttcttcatcccccctctacccttcatctgtccacttacacaaattccaactaagaagagataaccgaaacttagaaaaacactgtatttcatatatttgaagcatacgtgatttctctctacatctcccaccctccccttgggtgtctggcctctgttaagttaggaaaacagaaaaatgtaaactttagtgatgtggagaaaaggacagactcttccccttcataccgcaccacagttgtattctaaggtctaggttaggtgtgttacggatgtttctctctgagggaggggcctgaagagatcagagacaatgaactccaacccctacagaagccttgagaggcagagcaaagtgctcgctgttctgtcccttctggtctctggactctgtttaggagtcacttctagtactaatatttctgtcaatgaagagactctccccatacttcctgatgtcaccctgtgatggctaattgtttgtttgtttgtttgttttaagatggagtctgactctgtctccaggctggagtgcagtgacatgatctcgactcattgcaacctctgcctcccgggttcaagcgattctcctgcctcagtctcacaagtagttggaactacaggtgcacactaccatgagcagctaatttttgtatttttagtagaaatggggtttcaccatgttggtcaggatggtctcgatattttgactttgtgatc

SEQ ID NO: 46917 - DNA, 4321 bp, Homo sapiens
actaccatgcctggctaatttttaatttttttctagagacagggtcttgctatgctgcccaggctggtctcaaactcctgagctcaagtgagcctcccgccttggcctcccaaagtgctgggattacaagcatgaactactgtactcagccagatgtccaggcatttaaggaagcccttcaaatctacatactcaaaatcatcaaataagtgactatttgccccccttttatttatttatgtattacatcttcccttatattctaggtgcatgtgtgtgtatgtgtgtgattgagtaagtcagagacagagagaagttgagcgaatgagagacagagattgtctcttctgggttgtgaatattttgaaggtggcttcatcaaaataccataggtttagtgccaccattttgaatactgcttctgccacatataggcaatgtgactttggaataattacttaacttttctcatcttcagtttttgtacttagaaaataaacataatacctgcgttgaagagtttagtgaggcttaaaaataatttttgaaagaaacaggcgaaattttagatctcatcccatgtctctctcctgctgtagccctaggcacagcgccttgtacttggaaggtactgtcatgttttttgaatgaatcgccaagtgtcttgacaaaaaacacacactatttttggctttctataaaacatgcaataaattttatggcctgactcttttgagtacaaagtaaagaaccattcatgatatgatcccgttttaccccaaatgtttaatattttcaaccagagtcatcaaatccaatgtattacttatgttctagcctcactgtcctatataaatatcatcttcatttagatgaaaacgacaaccataaaacaaacaatactgcagatatttcagttaaaccatggaacttacttcaagtttatggtattactagtttgaatttttcacagaagaaaccaagatagtcatttctagtttttaagagataaaaaaaatcacaaaacagacatcttcatgtcaacattatttccccttttgttactttctttcctttctttttccactgtcttctcccctacccaccatctgtttgtttggaagatcaatgaatgaatcatccaacaggcgaacaaactctggatgacacattactttaagccacatctgaaatgaattgaaagtttaaaaggccacataataacatcgatcagtatacatgcttttcttgttgaaagataatcagatgccagaagggccctttgtaacacactgtcccagggactatcaattccaacatccacacatatgttccccccataaagcactggcagccattttgtacttattgactgtgcctctataattcttcttcagataaatgattcaccagattgtagtagcccttagtcagagaatcacaactaacagctaaaagcaagtgtcaaaaccaagcaaatgagagagcgatagtctcttcccactgttccgggtggcaatggaaagagtaaatcctaaatagactggaagctgagaacagacagccggaaagaaggtaggacgataagagggaagaaagaaagtgttagtggatggatttagggccagattagttcaaaagcctgagtaaaatttcagctctaagttgtagaaactgagtggaagctggaatccaaacaagtacttcatttattcagtggaaatatttaaccaatactctatgtcaggacatgttctagatactggggatatgttattaatcaaaacagaaatgtgtaaactcctagaaagtatattccagtgggggatgataacaacaaacatttaatgtaatcaatcaatcaattactcataaagtatattgaaagagaaagagaagtgctgtagaaaaattaaaaatcagggcaaggagaattgcaaaggccagagtggaagcttccatgtaaatgctgtggtcttagcaagaggattaaatatcaataattcaccagaaaacggcagagtcacaaaactaaaaggaaaccattatgtaacataacacaaagagagcaatttcatgacagtatataaaaggactactcacatttttcatctaatttaaagaaaatatttactatgcatgtaacaccagagaagctctgaaaacatttcagagatagttccttgtccatatgcttctttaataaaacacctttctgctaaagaacacagttatgtggacttcacttactggcaaggtcaaagtcctctaaaagcagtttcgtttcatcactgtccatgtgactgatactattatctttgttttacaggtggggacattagaatgttgatgactaagcaccatgagtcagtggtagggtttatggaaaacgcatgtcctaggcagcatgcaaatgacttcatcttatgtgggtttggccatgtaagaagttaaattatctcagcaattttgtgaacttggctttcttcataattatccttcttcccgtctgctgtcccaaaagacctggttactgaagaaagctctgtgagagctaaggatgagtgtaaatgccatgaaaacaccataaaagtattctgtaggtgccatgccacagggttcttctaatgaaggaattcaggaaaagcttaggcactgccaaagagtttaagttctcaagtatttttttttcccctcttagaaaagtgcctttttggctggcatttcataggaaaatgacaaagactttacagcaagtcccttatctcctttccttttttaaatctttagaacatggttaatactatgtatttgtggttcaactagtaaacactgattacacttggcaagtgacagcaatagcagcaaccccacaaaacttaggcaataatgatggtttctttaaatttggaattcaagataaaattgggaaatgcatcaagaagggataaagctctttaggttatcttatcacagaatttgaaatttgtggccaagagaatgaagttaaatgtttattttatactacttgatcattctgaaagttttccaagttatttcagactaaacttaaagcaggatattgtgtgaatcaactcttaaatattaatgtggccctgccaaactggtttccttaaaacctctttcatttgtgttaccctaccattttctcatgtaacagatgaagataaatgtgcaatgctgttagcccattttgctacttggattactaggttcacacataaacacatagagagagcacctaattattcagggcaaacgccacttttgcccaaggcaacttactttgtctacctattactcttttagtgatcattttctttcctttgaaaagtatcagaattgaaataccaggaattccaaaacaaaccactcctccctgtgtcatccttgtcccgctgcttctgatcttggccctcaaacctagtcaacggccttatcagaactgatcaagctgacttagattggagttattttgatgagagcttgagtgtgtaatcagatgtatggatttttgccctctcccagaaagaggtcagaaacatgtggatggagccctaaggggtagcctggtctcgtttgaaataaaataaattggcttcacagtggccactctgacctctggcagtctaatttctcagctggattataactagatgccctacatacagctattctcaagaactacacaagcctacgaaagagagagaaacttttaactggtgagaatgctggagctacatctgtccaggaaactggtaacacggtgacatcaactgggctccagaagttttgagaacttccatttggctttgagaaacaattcaaggtgttaattctgacttataaagctgtctgtgttttggatgctggttaccttagaaatggctctaaggccatttctcttagctctaaggctgaagagttcccagatttacacttcaaacacccagaagcaacacccttccataaacagacgagatggctagaattaagggctgcttcaatctcacagaattctactttgtaaattacaaattttaccccttggcttcctttactgattagaaatatgaatgtggagaaagtaccaatgtgaaaattttaccatcagcagattaatatccttgagtgttaaaacatttaaagtccaatcttaaaagagtataataacaaattccagtgtatatttaaataatgttcctgtttataaccctagctatacaacatatttattccatgagatcatatatttaaacaattatcttcttactggcaagtacatattcccatgagcaat

SEQ ID NO: 46918 - DNA, 928 bp, Homo sapiens
gtatctcaataggacatagcacagttgcccccacttcacataaacaaaactaaattatgttttattcttcaccctctctcatacctgctcctcctcctgtgtccctcatcttagtaaatggtgtcatatcaccctccccaacatactttgttatggttgcctaagacagaaagctttctatcactctggccccagtcactctctaagtactaagtattctacctccaaaatatctcaaaactgtcttccacccttctccaaattcaacagtttatggcagcatcacctcttgactggattactacaacagcctccagttgaaattcttgctttcacttttgcctctttcatgccacaatccacataattttgataaacatttcatttaattatgtcattccccttccaaatgttacactgccttcttgatacagtctaactctgttagaatgatctaagtgactatacataacctgatgactgcttacctctttagacttctctttcatcaatctctgccctcacctcttcccttccactatgaaacacacagaaacagaaacagaacagtctccaaaaatggccacaacaatatttttagttccatatgctgttccagaagcatgccattccccctcaagaagtgaaatctagtttccttccccctgaacatgatccagccttagtgactcacctctaatgaatgaaatgccattatagtgatgctgtatagcttacaaataaaatcagtacaccttcggcctggtgcacctcctctctctctctctctctctttgcacatatatgttatgcctggttcatggtaggtattccataaattatattttctatcattctcatgtttcagattaagaaactgagacaagttagaaagttcaataattttcctaaggtcacatggctagca

SEQ ID NO: 46919 - DNA, 490 bp, Homo sapiens
caaggaccaatcttggaggcaactctcctatctacagtagaaatggtatttggggtaactatctaggcttattcaaaggaacaggaggaaagggggcagctggagagaaggtagttgcttaacacctgacagatgttattacagcaataaacaagcccagcaaatcctccttccctctttagaacatttgtctccatggtgaaataatgcaaaactgggcaagaatcagtcataacctgggagaagggagggctcagggtcacagaggcttagcagagtcctctttgctgactctgactcatcaatccctgaggagttaagcacttgcttaacagctctcccagtcatttcaataggcaacaggagaaggggacagagcaagcaggaatctcatgccattgtaaagtttttagatttgatttgggatttctcagtctcccctgtgagcattgcaaaatatttctgcccattctgggtatgattaatctat

SEQ ID NO: 46920 - DNA, 959 bp, Homo sapiens
ttgatccaatgttcaaggctcagttcaaatcccacttgctctacaggtctatgatgacctgttactgctgaaatcctagagtatttgtctttacttctcagtttggaacatcactatatattcttttatgttatttgctaagatttcacgtgcttgggtcttatctcctcagccagaatatgtttcacagggtgaaacagctgtcaaccatcgtgaattccagtgtcccagcatagagcagggcacttcatggaacccctgataaatatcttccgatctattcaataacatgctacaggacagaccattgccaaacagacagaggaagaaaagcaagggaaaaggagagcagggtgcagggactgtgccctcatgaaagcagctaagatttcctgaaatgactcatagaacaggaatgccaacactgatgagtagaagtggctacatgtcttagacagttgaactctgatattctcttagtattagctgactcctggattacttcctctaacagtgtataaggggcaaattttttgttaagaaacttccatcctaggtgttaagaaaaagtccacatgaaaggatttccccctccagagcactgtaagaattactaatcaaatgaatcacctgacctatggtcccggaatgttaaaactggaaggagtgtcacatatcatctgatctctgttccagaaactgaggcccaaagacatgaaatgacttgttcaaagcaatgtaactggttagtagcagagctgtgtctagaacacaggcttcctggtttctaaggcccatgatctttccatatccatttcatgagaagtagcagaattccactggcttagttggtgaaactgccaatgactagtctctattcctcctcatttgatttcctcttctcatcagactggaccttcatcacttaaaccattctcccatcaaggctggatttcagt

SEQ ID NO: 46921 - DNA, 1299 bp, Homo sapiens
taaaacaattggaaaaagatttgctttgttctgctgctaagattcaacatttgcccaatagccacagccagcctagccatcaggaatcgtggccaaggtatgcaggcagccaagctcattccttcacacctgacacagacaccagacttttctgcatctcttcctggccctttaggagaagcagagactactattggttcctttactatcaaagacagacaccaaaagctcctcaaatctccagagaatgtgaagtttatcatttctaagtatactggacaaactctttttttttctgatttaactagtaatatgtcatctggaaaagctattttgtcataaattagaaagagcatcaagaagaaataaaaattattttgctccaacatgtacatggagaaaaggtaagtggaagagcagaggggaggggaagggaggccattagcaaaggccaccactagctaaggtttgtgctggaaacttctttaagcagatgttgatttcacatgctgcatttgatacacgtgtctcctgataaaagcaaagggaatgaaattacaaagtccaacactgtcatcaccacaaagcaatatgcaaattatggtcttaaaataagtgtctgagagacctgggtagtttcatccatacaaaggcaatttctttgtcatcctcttactgattaactacactaatctccggtgaagcgagcttgggattcctacaaagtacaatgttgtgatccatgacatttaagacatggaaggggcctctccagaaatgagccactgggctgagcctgggcagaaaatagactgcaatgagtcacacaatgtaagacggcacaaaagatgattcaccatgtctaaaggaaaataaataggagtgaatggctagtgtactcagggaaactcagtcccaatgggcagagtttattggtctgcatcactctgagttccgtcatggagctgttgggatgaggtgatggtgctggaaatgctgaaacggtgagggggtgaggaagcagctccttttggggcagtagcagtgcagtagctgcttgtttccagttaaggatctctgtggcagggggatacatccgcactggatgctctgaagtgtatgatgtgaaatgatttatccagaaggctgcacagctggcatcagataaaacatttggaaccactttagctgtgcattacctagaggcagcattctcttcctcgatgctgaatttaaaccattcctgtcatttcagactctctaatgaaatctgtttctcacaggatgtctctgtcttgg

SEQ ID NO: 46922 - DNA, 2989 bp, Homo sapiens
ctcccagactgctgggattacaggcatctttttttttttttttttttttgagatggtgccacactcagtcgcccaggatggagtgcagcggcgcgatctcggctcactgcaacctccacctcccgggttcaagcaattctcagcctccccagtagctgggattacaggcgtgagccaccgcgcccggcctaaaaaatttcttgaagtaaactctggtttgactaaagcttctgcaaatatttgcaaatgtaattatttttagaaaccagttttgtcctcatctaccttgcctcaatttctaaaacaaataaaagttaaggaattcaaaatacaaaaagagaaatgatcaagagggggctggcaagcctgtgaatttacaccactttatgggcactgaaacactactactcataaaagtcatatcctttcagtatttctgataaatttcaaatggcctacttcgaggcataagttaaaaggtgctacatgaatctctggctaacacagtcaagttttatgaactacgttggaaaacaggagtcaaggacggcctatgttacctaattcgcagctgaactaaaactctttgagccagacagctctgcctgttacaaaaacaaagggcctgtcttctctgtctctctcaaccctccaccctccaaaaagaatcagttcctttttacatagcaatcaatgtccacttatcagatttcacgacctgcttccccagagtcagtatccccagggtggactcaaacttgtgactccaggaaggggataaggaacatgagcgcccacaggaatggcttcaaatccaagactcgaaggaaagtgacactacataactatcacaactaggaatgcaatgtcgctggagggcgtgtccagcaggacgggagcgtagcgcatcgccgggacaggccattcattagctgaggggggcggtagggaccctggccactcggccctctccgcgccgcctcgcgcgaagcccggcagcctcggggccacagagtcccctccccacggtccccccgcgccgccgtccgcagccacccgcaccctccagaaggcgaatactctccccctgcccccgggctgaagggaagccgcaccgcacggtcgggcagcgccaagccctccctcaccagtcgctagatgaaactgcgccggtggattccgcagggtccacatagagccacaaagggactcatcctcagtgaaggcaataagagaaaccgaacggcgccagaggggccagtccccagacccgggtcagttcggcaggcggctgcaatacagccgctactacaggaatcgggaacggggatgtagaggaagggcccgagcgggcggttcccagtaataaggcgggcgctggttggctggggctcctgtatgtctcttgatgattggctggtgcctgcccagaaggtttcgcgtggcagcacctctgccatggccttttccctggcgccccaaaggaacttgacctcgccggccttggggccgctgactcaggccaggggcggggaaaagaaaaaggccgcagcggggaactctaggccaacaacggtgatgggagtgtccctttcaggccagccatctcgtagttagaaacgtctctctaggtagctggagactcgcgggggaggctaaacccgagtggagaaggagacctggcaggatgccttggacacccggtcgctacgcagcagaagccaagtgcataggcgtcctgcacagaagagtttcctcccatggccttagcagtggggttactgcaaagccaaaggtgtagtctccgtaaacccagcctcacccctctctggatctccatacacccggattatctggcagtcactcccttggtcagaaggcgtcactgccctcttagatcaccaccgtaggactagctgccgacccgggtcacgccactcactgcctgacaccaggcttacactaggctttttccacttgaactctgaatctaaaggccatttagaaagtggtcaagtgaaaaatgctaggagggacagtagccaataatcaatactaggttactgaatgggaaacacactgctgctgaatgcctaatacggtaagcactcagtaaatgattgttcaaggaggtgtagtgtgactcaaaacaaacgacactaagaatcatgagttggctgtacagctctgccacgttgagttttacaagccactgagtcgacctcatctaatctctaaaagaaaggagttgcgcatgtcttaatgcccactgagctctgcttgctctcttttgaagccttttttgtgggagggtaggttactagcccaaagccacacagctgcttagcgaaagagaaagggagactaggacccagccctcctactgcccttcccagcacataattgtttctttgctctttattcttaatgtccttctacaaaacaaaaaccagtttgtaatgtcaaaattgagtggttttgaaaataagcttaagttggccgggcgcggtggctcacgcctgtaatcccagcaatgtgggaggccgaggcgggcggatcacgaggtcaggagatcgagaccatcctggctaacacggtaaaaccccacctctactaaaaaaatacaaaaaattagctgggcgtggtggcaagtgcctgtagtcccagctgctggggaggctgaggcaggagaatggcgtgaacccgggaggcggagcttgaagtgagcccagatcgagccactgcactccagcctgggtgacagtgagactccgtctcaaaaaaaaaaaaaaaaaagaaagaaaataagcttaagttgtatctccagatatttaaaaaaagaagctacatataatgactttcatattcatgaacaaagaagccaataatggcaaataaagctgctagtgtaaataaatgcattgacctgagttcgtaacttctctctcttgtatctgggcaagttaattcacttttctgaagcctcagt

SEQ ID NO: 46923 - DNA, 1081 bp, Homo sapiens
ctcactggaaggaagaatatgaataaatgaacgagctccagtaagaagtctacaacctgtcttagtggttcactaaactcacgtttattgaatgattgtgtggtttctctgcaaagagcagttttggacgaaaagacccgaggttatttacaaaacaagaagctcacataggaactgatccagtaaggaggatcccgaagagagacagacaaatcattttttgcattgttttgttggaaacgccgggcactgccaacagtgttttacatcactgttcctcaaattttaatgtgcatttgattcctggaaatcttgttaaaatataagttttgattccataagtctggtgtggagctgagaccctgaatttctaaaaagctccccaaagatacccacactgtcagtaggggtgggagtggcggagccgactacaggggaaagcttcactttgagtgatcgagaggctctacgcaactggaaagaagaaactcaaaatccctcgtacagagagagactcaccagcccccgacccccgggcagcagtaaagcgagctgggcactgcgcctagaatcccagttcttaccccaggatcagaagcgcgctctgcagctgtccccgcacctccagaaacacgcgcgtctccgccgcagaagccgccatggcaggcttccagtcccagaccggaccaagctggaggttccgaggggcccgggtcaacaggaccaggagaggttccacgtgcggaccaaccagcggcagccccgctgcggcgcaggcgcctgtgccagatcgcagggctggcgccgcctaccagctcacagcgccacctgccggccggagagtgcaccaccgagaaggcgcgtgaccccggaggccggggcggggcgcgcattttcaaaaccaggctttggcccagagtgctgagaaaggtgggcggcgagaggctagctatcgccccactctgcttcttatgagcgtgacttggcgcgttagcatccctggaaatgaccataaaaatcagacccagggttcacacctttggctagctcgaagggagggagatgatggaggcaagtgtta

SEQ ID NO: 46924 - DNA, 1596 bp, Homo sapiens
ttttacggtatggtgttggcaaaacggtgcaatttaccttggagtaactagatatgattgatagagctctagactcaaaatagttccaaatctgacaccaactacttgtctcctaacttcacaagtctcctaacctctctgggatgcaggttactcatatgaaatattgagaaactattcaaataatatttaaaagctgttttcagttcctattatctcttcaaatgaaaacatctgctaaccccctttctagccactcctgaaattggtagccatggccgcttcccgcgacagtccacttgagggcgctgtggcaacagctagcgccgggaggcaggaagccgatcgggggcggggatcgaaggcctcagacgtcgacgccggcgtgggcgcgagcacggtgcactctgggagctgtcactaggcccttcggctcccggtctcggtgtagctgccgtggttgccaggagagctgcgccggcgagaagcggccgagccagcagcaggtaaaagcgtccctgcccccagtgcggccgctaggctggtagccggctccgagcatccttctcggcccggctaggtcctgagccgcggggacgccttgcgagtctgactgctgtggcgtcgggggtgttgccgctccggccccgccaggagctgcgaagctggtcggccgccctctggtttacggggagtcgggagctgcgcggggactggagggccagggctggggccggggcctgggccgggcagaggcgcgagggcggccccaggtgagggaggccggaggcggggccggggagccggggacaggtcccgagcctcccctgctggggcggagcggtgcgcaaggctggggcagaggtcgcacctgtgcgatggaggcgtgcggagtaccctctttgttgaaggaatcgaggcgttgtgccttctcggctggtgggttcttttagcattgaggagacacgtaggcccgcgatggttcatgttctccgtggggcttagaaaggagtaccgaagtttattaagaggaagtcagaagagtcaaacgggtgttgttaacaattatcacctttgattcctaagccttttaaagttgcaacataacaatagtcacttgttcgggcctcctccattcctgtaccctgaggggggcggggaatggcacacaactatttttcttaagctaagtaaattgtgtttgaacatttttacactatcttagagttctatggcgtttgagaaatgtaaagattgggaaaatgacttcgactccagctaaagcagtcaaaaaaaatgataattaccaaaaatgtaggaaactgtttgcctgacaaataggccctgaactgtagagagagaaaaatctgttttgatgttgttggccattgtctatgcagacataagttctcacattttaattttgtttgtgggtattaatatggtctacagtgaataacatacgtcggcattatgtgctaagtaactcaccacctgatagataacacagtgatttaggtgggccgactgaagttatgagtaaattaaaaccacgagtagtctaaatgctttattttagtgattactttcggccac

SEQ ID NO: 46925 - DNA, 2127 bp, Homo sapiens
cctacattaactaagatcaaattcatctgaatgaatacttatgataccatcgtcaagacccccaccatgtttgcttccccaaagtatctcagaatgtactacataatttgccaagtaaacgccaatgtaagttagcaggatacatagaccagaaccttgtgtagccctagagaaaaacaaaaaaggagatatgcagcatctttggaaaaggaaagaggaggcatgacaaacaagataatttgttcagtagaccatgttactttattcatttgtttaactttaaccatgttcaataaacttttcacctgtttggtgagttccacaaaagccttagagagtttctggtagtaaccttctatagttgcctttccatatcggccacccgtgtttcgacaatacaccatgtagtgcagctggggtgttgttaacaagccataatctgtcatagaaatacaaaaagcaattcaccgcatttcttaacaaagagaaaaaagtttaaatgcattcatgtgtaggaatttcagggtgacaaatccttttgtgtcatctcagacatcttagaaaacataaaaatgatcttaaaaagaaatataaatgactataagaagccaaaaaaccaatcattacatataaacaggtaacaatgtaaatataaagcaatacagacaagtaataattgagttctgtttccagtaacattgcaaactacataattcagatgaatcatcctcctggaaacaaccaacatgctagataaaagacaaaaacctccttttaaaaagaactacagtgctgaaaagtgacagaattatcaggccaaaacatacccgaaggcaagaactccaagatctaagctagttcggaagccagttttgttctgaagttattcctctaaactagaaattgagctacggttttcagagcaaaaaaagcccatgctgatctaagatgcagaacccagtagaagaccagactctcatgaagttgaaatcccaaagaactatatcttcagtccgaggatgagtcagaaattaatcaccccatgtcaccattcccaggacagttatcttaacactgagcagggaagacgggaaaacccattcttgaagagctgttaccaagcacaggcccttgcatggacttcctgcccaacatacataaccacaggagtccaaaggaactttgtcatgaattttttttttttgagacggagtttcaccgtatcgctcaggctggagtgcaatggcgcaatctcagctcactacaacctccacctcccagcctcaagtgattctcctgccaagtagctgagattacaggcacccaccaccacgcccggctaatttttgtatttttagtagagacagggtttcatcatgttggccagactggtctcaaactcctgacctcaaatgatccacccacctcatactcccaaaatgctgggattacaggcatgagccaccacacccggcctgtcatgaatcaatttaaagtgaacccagccagtgccccaggtacccagcagaagccagactaaactttaccaaaggactatactttcattgtaaacctcaaaaacgtcccataattttcaaaaacaaaaagaaagaaaaccagcttacagttaaacatagctaacatataagaaaagcaccatgagcaaaaaacaaagaaaaatggatcgcaaagatggaccagtaaccaataagtaaatactcagtgactacacctgtcagttggacctgaacctcaaacacaagaatttgactgcaggcaaaaaggagtcactttaaattcttgagccctgaagttatttaacagaaatggtaccttatgaaggcaaccttagctctggtataatgatgagatgggaggagatggagaagctcaaaaaatacaaataagagcttagattagtttaatggaagtgtttactagaggaacccattattctaaaagacatgctaaagtaagaaacaaaataattttgtgaccaatatcaaaattaccaaataaacatttactaaatgactagtatatatacccagtgaaaagcattatctatccaactcatcaactcagaaacctggaatgtgttcttcacagttctgttctccccatata

SEQ ID NO: 46926 - DNA, 2095 bp, Homo sapiens
aacttgcaagaaatggtgaaaaatacttgcttttgtccagttggaaaaagctggcattcagtaaactaatttagttcaagacagtgatcagatctctttcctaaggatgaatacatatttgtaaaaactgagcagtcagttatgtgtcatgattattcataagagtgtaaaccagtcctgttaactccaaaaagccattaaaaaaaaaaaggtccagataatatgagttcatcctttcatgcgttttaggccctacaactactttcaatgcctctgcgaatgcctttattgaaagcatatttgccaaatccagcgtccacgcaaaaagttaagagtatccccctactctccattcaatcttcaaatctccttggtgcctctctcccgcctaccctcgaatcaccgcacaagggtgattcccggcactccaccctgaggtccccgcctaggtccacgtaccagagccccggcaggagacccgcggcccgtcccgaccagcccgcccgcggggcgcaggggcctgtaggtgtgtcccgcgcgctccgccgctcggtcagtcgcccgccagaccactagcccctccgtcgggccgagaatctgacctgtcccgctcccaccgagcccttgccgaccggtagtctcccttctcaactccgagcctcggggcccggcttacctcggtcaggaagcccccttcacctacacgcagcggagaagcgcccaagcaacaacgtctgcacccaaacccagtcctcagaaccgcagacgtggccctgcgtggcttccggctcgtcgccacgccccctggccaatcacggcagaggactatccgccagccccgcccccgcctcgccgcaggtcgcgcgcagctggcgcctgaggaactgcggctgcggttccgagcggggtctggggctgttaccattgagtgaccagaaagggtgaggcccccgcggtggcccgggggttggggccgagggtcgcgggccctcagagcactgcggccgcggaggcacagcctccgcctccaaatccgggcctctgggggcggcaggccctgcgttcctgggaagccggggttcctagtggtcttggctaggggcgggggtggggaatcagccccgtcgctgggcctcggacagggcgacctcgcccacagtgagcgccgccggcggcccgcatccccctctccgacgtcgaggtcatctcccaaacctttgaatctgggaagccttctccggctgccgtctccccgggtacccccttcccccagctcactgtaaacatcttttatttaatgacctctgagacaccccctacccttatcctgggtccctcggggcagaggccagtgaatcgtaaacgtccggagccctggaatgcggcccaagcgaaaaggccaccgcggtgttgggggggggcggtccgcgagtccaggaccgaggggtggcgactggcgctggggaactcggagcccatcctgctggcactgcggcctctctcgccgcagcgtctggctccgcccaagcccgagccccgggtgggattggaagccgggccccagcctttcccagaattcaggcttgcagagcgtctgcaggtgtctgcctgccacctgcagcgggacagttccaaacacctgttgaaagtgcagattcccctatctagtgcggggtgcgggaggcgggaacccggagcccgggtacgcagaatatgggtttttacggagtgttttagaggatgttgtgcatactagattttggagtcaggaaataaagaagagtgcaagtgtctggtttgtgcccctagctctcggtgcaaagcgttcctgcagaattgcttccacgtaaagggaccttcgggaaatttcgctggataccggctggcattgacaaacccagcgtccctgagccttgtgaggtttccaggcaggctgattgcgaggcaacatgtctgcttcggtgaaagaaagccttcagcttcagctactggagatggaaatgctgttttctatgtttcctaaccaaggagaagtaaaacttgaagatgtaaatgccctgacgaatataaagaggtatttggaaggcacaaggga

SEQ ID NO: 46927 - DNA, 1367 bp, Homo sapiens
gacctctaaaacattccttattaaatcaaacatacattgcctgtgaacttgagcgttcacatataactccttacatgccatccatcccctctcagaacctgagaaggttctgatggtgtctgtctgcagccttcatggaacccttttgaacaggtttttttcacttgcttttatctcaagtagcccagtagtaagtcaaaagaatagttattgtctgaagagggcacagtgttgctcacacttcctggttttatacataatcctgatttgccacagaaactctgagcccattggctttccctcataaggtccacatggtggaactaatttcaccatagcctggaccagctagagagacctctctttctgatcccagtcaaaactagatgcatttgggtcaacccccgaatgaatttgagcagggtacacagaatttaagtaagcccactgtattagctcattcttatgctgctaataaagacatacccgagactgggtagtttataaaggaaagaggtttaatggactcacagttccacatggctagggaggcctcacaatcacagcagaagacgaaggaagagcatagggatatgttacataggggcaggcaagagatcttgtgtaggggaactcccctttatgaagccaccagatctcgtgacacttattcactaccacgagaagtatggggtaaaccacccccatgattcaattatctccacctggtcctgtccttgacacatggggattattactattcaaggtgagatctggataggggcacagccaaaccatatcacccaccaaaccctgggagttctccttagttatagaaggaacaaagtacacaatttgttcctcacaatgaaggggaaatcccagcatgtaccagacactggacttctacaaaacttggctgcaggctctgtgctttcatgggatttatcgttcaccctctgggatgacacatcttactaggcatccaggaaacatgactccattctccaagtccaatcagaatatcacctggaggcatacagcatgctgccctgtatagtggtaagctgatcaaaggtctgatatcgagactgatattctgacatagaaagttaatgtaatgttggaaaaagacaatctacattgctgcttactgagataaagaaaatgcttcaagtggtctttacttactggaataaaggaaaaacaaaaaagcattgaccaaatcagtagccagctactttctgatttgctccaagaaaaaagaacttatatgacagcagctgcagttggaatcaccatctgcttaagtttcggaatatgtgcagccattctatttttttgagacggagtcttgctctctcgct

SEQ ID NO: 46928 - DNA, 355 bp, Homo sapiens
ttgtatgcaagatagtttattgtgttaggtggaagtatggatcttgttattgcctttattcaaagattaagtatgatttgaggagattcatatgggtggtgtcatagtccattcagtttgctatgacaaaaataccatagactaggtagcttatgaacaacagaaattgatttctcatagttttgtaggccaggaagttcaaggtcaagctgccagcagattctgagcctgataaggacacattccacatagacagcacattctcgctgcatcctcacatgagggaaagggaaaggcagctttcttaggcctcttttatttttttattttttattttactttaagttctgggata

SEQ ID NO: 46929 - DNA, 1653 bp, Homo sapiens
aagagagcagctctaaacaaaatttttttttaacttccagaaagccaaattaaaaacaaaacaaaacaaaacaaaacaaaagaaagaaagaaaagaaatggctttacccacagtcccatgtctgggacagagttcttctaccaagccatgcaaagtgtccaagacagaggccacccaccacgcattcccagactcttaaccgtgtcactccagaaaccgagaggacttggatttccagattgctaacgtgatctgaaggcactcagtacacgtttctgtctgggcaggaccagttgagccacttctcgccttatcaacttccaataattgccacactgtgtgtgcaaccagtaagtgagtggcacatggagtctgacctggcactccattcacacactttgtctgatactactttcattgtctgggctcttgtttttggagaagagctgccgaaaagtatcaccttttcctctatcactaacctttacctttacctctatccctaacatgggatgccgaggtgcagaggcaccagcactgccctgccatcactctagtggatacggacccgattaggcgtccttcttccttctgcccacaccaaggccccccaggccgcggccgctcaccgggaaccttcccaggggagcggcggaggggcgaggccatggtgcggggacctgcaagagggccctgaccctgatagagaggggccgatgggcggccaggtgggcctgcgggtttaccttgttgaggtgagggttccgtgtcagcaggtagccgcgctgatgggtgtggcggcgacggggggcttcgggctccatggctggcgccgggttcggcggcggggtcaggccggggcgggccgcacgcgcggtgcaggcggcggatgctgctggggtgacggtgctgactgcagctgtggcggcggcggccgcactgggaaaggcccagcggctgggggcgggcgtgggtggcgagagggggtggacgcgtcgggaggggcccgagcgaagccggtgtccccagcagggcagcctgcgagaagcgctgagtcatggcaggagatcatccgagccggcgtgtgaggaggaggaggaagagcgagtcctggcagcgctgctggtggcggagcgggggtggcggccggagcccttggctccatagggcctctgcccaccatgggcttatgatcaccgctgtggtcgcctctctccatgtgggcatgcctaaacgcagtgcactgggtggctctgctgaccccagagacccagggcgggggcagggagcggggagcgtcaggccaggatccccctgcccgggaaggctggagaaagtgcgagaagatgccagaaggtgcgaacctgagcggttcaggcagagccggcggtcgctcagacacctagggggattacaggacggaaggactcgtgaggggtccccagaactgttgacagaacacctcgacaggctgaggagaatcagactcgtctctcctgtcttgttagcgtcttggaagccctctttctacagatccacaaccttcgccgtgccatccaggatgccggccatgcccggggccctgaggccggagggaaccaaccttgacccagaatgccgaggcccaagggaactgggaggaagcccagagag

SEQ ID NO: 46930 - DNA, 507 bp, Homo sapiens
actttttttatttcagattacctatggcgccgggcagaatacccagcactaaaagtgcttaaaaattgtgaatcaatcttttgaatgactgtttctctttgtctttatcttaatgccaaaagcaaggcaaaataagtcaatattattatggctagggaaagaccttaactacctcaaagagaccttagttacaattatatttcacagaattatgtctcaaaactccccaaagttcagtttcatcattgcactaagtaaacccttggttaagcataatcttcacacatgcacagacttgcatcatacctgtgtgacacaagccaggatcgcatcaattgccaagggaggtaagttcctctaggcagcctgacccaaacctctcttctgttacagctttccagagttcaatcaatttaccagagggagagaaaggtatttcctcaagaaatcatttttttaaaaaaggtgacatgaaactgagagagtatatatttgttctatgataga

SEQ ID NO: 46931 - DNA, 1312 bp, Homo sapiens
agtgggtgaatagagcagaaggtgactttactaacgtctttcgcgcattcattagccctcagcatgcttaaaggtgaagtttaaggatgattaaaggtgaggttttcttcttaccccacagtagtggctgttgacatttgatatttttgctcttaaaggtgtgagatgctctttgcattacagcctagtgccttacaggaaagaatttcagagaaactaaaattcgttttagtccatatttcaagtagtgtgttttagtccatatttcaagtagtgtgatggtactgcttaacaatgaacagacattgctgttccgggttaacaggactaagaatttgttcccacattcggtcagcaccaaggctaaggaacagcttcactctctaatctttccacgaaatagctgtcaccttgctccggtgctgaagttcgggatgcggaactagctgagcatgcgtacttcctccctgccggccctccctccgtcccgttggctccgccctccgcggacgtgctgcgtcagaatgcgcctcacccctggcgaccccggaagtgggtcgggggcttggcctctgcccggccacagagccggagctggaggtgctgtcccgtctggcggcgatccccgggcagggcccggggccggggtttgaagatgctgaacgtcccttcccagtctttcccggcccccaggtcgcagcagcgtgtcgcctccggggggcgtagcaaggtaagcgggtggctccgtgagtctctcccctcgctgcgtttcgagctctggcagtgtgttctcttcttccgccccaactcccagctcctgcacccctctctaagctgtcgttccctgctgtccttgcctgcaacctctttctgatcccactttgtctacagtccctaaactctccttacctcctccctttcccctagcagtccctcttctttctggtcctttatcccgctctatccgttcccttcctccaagtcctttcccgcgatttaaatttatatgacagagccaggcactgtgtttgcggtattataggctctcggtattagccgccttccctcaacctcatcttctccctggtcttttgttcttcactgcctgaaggagttgtaccacatcactcgatgtgggttccctcgcaggagggaaaggcttggcagtggcgacagtgaccgtccgtgcaaggatggggacttctggagttggggagctaggtcaggtttacagacactatccaagacatactgcctttctttcttcctctggtacctgattgttttgtcattgccttttctactagtatca

SEQ ID NO: 46932 - DNA, 1075 bp, Homo sapiens
caaagggcctaaggtcagtttaatgcactgcatttcacaggaggtaagtgggagagtggctgaaggaatcaccacatcctgactgtgtggacccgggtggaaagacccagtgagaccctttacattcttttctgtttctggctcaagagaggggaaaaaaaaaatcactgctggaggaagattctggaagtctggctgccagtggtgaggtaatcagatgtacctacgggtgctcatacttgtatctgctactgactgtaaacagggagttaaagaccggtgtttctgaaagttgtcaggacaaggcagagcagaggacagacccagttcaccacaaggcttgagctaaagagctaaagagtgactcaaccagttgagatcagagggagaagagatggtgccaatctgcacttagatgccctccctggcttatgaacctgtttaaaattaaaaatcagatgcaaaccaagggctttgagtatctaatgcaaactatagactgttttaccatgtctggaatagtgcctggcgacagtctgtgcttaaatacatgaagaattaacaaacatttccccctactatttagacacataaattttgtgttgtctctgttggaggggttggtcggcatacttatgggtctgttaaattttcttaaaaacctctgttttttaatggcaagatcaaactggcagaagaatttgaatggttcccagtaactgaaggcagtgtgtcctgcaaaatcattccaattcagttacagcaaacattgtaatcattgatggggcaatgcttttgatgatgtccctgggtgataatgcatgttactaaggctcaaggttcaagttacagttgtcaaaagagaagaatgtaatgagagacaagaaaggagagaagtaagaaaaaagggtgtgggaggcacagaacaaagataaagtcttatgttgatttgaagataactaaacctgtcctggttgactgtcaggctagcaacaccaagataccaagatgtcattacacattgcaaacatctgcctctataggacccaaagattttcttgcattaaattcaaaa

SEQ ID NO: 46933 - DNA, 1380 bp, Homo sapiens
cacaaatcagtactatgtttcttttgaagcgagggaagaccgacaaaaattatgtgctgaacacaagcagaatccagtgatttgcaacggaaagcgttcccctagacacctaatgaacccaaccttgggtcgacccccagctcctgaactccctagagcagctcaaatcccagctttcttctgtagagatgggggaggggaagagggcttgcagacccggacaataccctccccatcgtgcagagtaacacctcttcccctcatttgcactttcgatcagttcagggtaagtgcggttaaggtcttggcctgaatagcttggtcaggggtgagctccactaaaagcttctcaagcctggctgcgaccccgtccccagaagcgcgggttcgggaattggagggaagacaaagacgcatttgccgtgggctccgggcggagaaggggaatgacctggaaaattaaagcccttcgctcgagtatgaagcacggcctcgaccagggcgatttgggtgggaaaccagcgttcacaccttaccacctacctctgcctctgaattccgcgctttcccggaaggtctgtgcgggtccaccagttgtcagggtaacagacttcagctgccgggttctggagtcacatgacccgggctggtcacgtgggccgtgggtttcccaatgcctttacaagcgaaggtcggaataaccacggctgagaaagacactctagtggctaaaccttcgctgctgcagtaaaatgcctttccttccctggctttctctacgttccttagaaaaggggacagcggcaaaccggttactggagaagcgagacggaggcttccagcaggcttggagggcgcggtggttgtaggccagcccgtggctttctgggaaatgtagtttagctcccctggtccttgtgtttccgcactccgcatcgtcgcctcccgccttccccacacttgtcattcgagcgctctgtttttccaaggggcaattttgaagagattgaatttcttggatttctttggcctgcaaagacctgtgtaggcattgtgagagaaacacaaacctgtgaggaaaaaaactgtcgtttagatggggactctgttccaccacctagtgggcaagaaatcgaaaatacgcaaacagcaagattcttattaagttattgctcctcccgctacccctacttttcaaaactgcattctttactggcatttcacaattactgacttggattttgttttctatttcttttctttttttcaaagcatgcaacattagctggagtttcagaggacaacatttagcatagtgtaagtaaaatctacaacagctgcaggttttgctgatggtagacttagttcaggacctcatct

SEQ ID NO: 46934 - DNA, 1466 bp, Homo sapiens
ttcttttttaaaaaaagaataaatgttaaatttatttggataggaacaaaattttttactttttaacacttttcataataccagcatgatgcttctaacaaagtgacaaaattgctgcttgactaatagatgaaatgattttgtcagtattgaatactgatgaaaaaacctctgccaatcaatgcttaatctgtctgatgaataaaatttatctttcttttgaaatatttaaggagtctttttcatggttaaaggttaaagcctgtctcattggtttccttaaaaatatgtttttcaacttgcagtctgtgtgttattataacaaataaaaacattcttaaaagccctgggtaagctttttcctttagataagtgctatgctactagaacatatgacatcgtatttggcctcaatgtttggaaatgaaacggtagaaaaatgacaagctctagtggccacgtcatcatagggaataaaatttaaaacgactgacgaagtttgaggaaactgactatttttaaaattgtacatttatcatgacagttttggggctaatctctggaaccagcacaaggatgaatgaggtaatatttgcacatgttgtggataagataaccagagtgggggaaagtccatttccaggctaatgtgcaactaagattatatgcttgatggctggaaactgctgtgtggttaggataatataggttaaaaaaatgatgctgatggaatggtgagcagttaccctggatctgaagctttctgaatggaggcatgaaaagaggaggcagggaaagaagtaggtaggagcacaccaagagaaagatttgggaagcaagaaaatgtggagtaaactaccaaactccctcacagaaatgacatagtaagggttggcaattaaaacttcagtgaaaagtgaaatctcatggtaaacctagcttaatgctgttcatgtgtacattagagtatgaagggagattgtaacactgattcccattccttactacccagatgttattaccatcagagaaatgttcagaggtcttatttggacccactttggtttattctgtggctttgaggaaggggaaagaaagcattgtgagggacgtgttgactgaaatgggccattaatttcatgtctcttttgtataaagcacttttaaagtgtgccaaggcattttaagtgttttaacaacatgcttttgtgacaatagagaagcaagggtattttttcatggtatcaataaaaatatcatggtaatttacagggttgaactggacactaaattggctcacaatggagttctttcaatgtggacagagatagaagcaacctttattttattcctgagccactgagatgagaataaacatgatctctgtttgtctccatgatctgaaatcttgtttgccaggggggttgagttttatggagggtccccatttttggaactctcttttc

SEQ ID NO: 46935 - DNA, 511 bp, Homo sapiens
aagtaattttgtaactccctggatagaaatcagggaacaataaaacttaaatcatttcagggacctgagagatttctgtttagcaaagccagtgttatctaagaaaagaattggttctgatccatgtctaccatgttcttcctagttttttttggctaacatgagataaaaattagggcatatttattttgtaatgccgtgatcagtatttatttttgaacgtgttcttttttattttctaccatgttgtgatggctctctgaaaaagtcccagtatgtaataagggtttaaaatactgtaaccctgggatttcagaataccaaatatttgaatatgtcccaaagcatgattactttagagagagaattgaggtctgatattgcacaagcaaaaataaaatgattgcatgggggaaaatactatgttgcttgggaaagtgatcagggttcctattttggggcatcacatagcatttgttctcacatgacagaaaaattatttttcttataa

SEQ ID NO: 46936 - DNA, 461 bp, Homo sapiens
catgtgtgtacgaaaccatattgttttctatatgtaagaaaaaagcattccattgaatttattaagaaataaaacatatccgttgactttaagttcaaactagatgacaatgactaggggtattggaagaaaaaaaaactaataaaaataaatttcttacacaaacccccagaattatgacattcctttttgaacaagtttatttgtattgttagtcatattaaggcgattgcatgaatctctgtagagatcaaagccttatgacaacttaatgactctgcagattgcaatgtgttccttaccattttaacatccagttctaaatttaaaaaagaatttgatttctccaccctccatagctgtttttttttttttttttagatggagtctcactgtcgtccaggctggagtacagtggcaggatcttggctcatgcaacctgtgcctccttgattcaagcg

SEQ ID NO: 46937 - DNA, 629 bp, Homo sapiens
gcctaactttaccttctcatgttaagcatttgttctgacatatgtttttttttttcttccaaccttgttagatttttttattccatttttataggacagctttgactctgcactaaaccatgccactaacacgttacttaatctaactggcacattgtaaaattttacacatgcgctcatccagataattacacaattaattttcacttagttcagctgaaacggggataatgaaatttccactggtgtactgttacgtccaggggccaagggtcagtttcctgtttggataagggtgagtttaaagaggatttctgacagtctccttacttcaactggttctaaaaacattgcaatggaatttcaatttacagctaaattcaatgaaaggagcagatgttgggagtgtgccaccaccctgcgagagcggccttccacacaggtgtgtgcagggagccatcagctcttgctttaaagacaggtcccttctaccttccattctgtagtgaaaaagtggatgacagacacttggaattcatttttcccttaaggtttagacatctgctgagccacaatgcgatattaaagcaaagttctcagttctcagtgctttcattctaaaggaaaac

SEQ ID NO: 46938 - DNA, 1327 bp, Homo sapiens
cggagactgcgcgcgacgggcgtgcgtgcgtgcgcccgcagattcgcttcaggcggtaggtgtggagtacctgggcagctccggcgggaatggtgttggggagaaggagctgtcattcatagtcttctacatatctgaataaagaattgctttttaaaaataggttcagagcctagtgagtgaaaacttaaaagtccccgcgaggagctctagttcccgggcggcgcggccccgactttctcgtcggtagcgctctggccttgggcgcccgccgctttggctatggaggtacagtggccgcgtcccggggagcctgggcctccttgcggctccgagcctccgcggcgcccgcgccccgactctccggtcccggctctctccaggcccggctgtctccggtccctcactgacttcgccagccgcaccacccacctctttctcccgcagacgtaaacccgaatacgccccggccttgggcctagggcctcggcctcgcctggctctacaggattcgggggcggggtaggccggcagagctcagctcgcgccgtgggtccacatgtttttatttcgtgaccctgaccgcgtcccggccataacttcctctgcgttacaacggggataataatccccggccggcctgccggatggtggcgggataatatatcccggtgagggaaggaccgagcttggcagagacacttaactgtcccactgtgtggctgttcacagtccgcccagatttaggggtgggatggggggttttcgggccccggcctgctccccctctccagaccccgcagaaaggggttcatgggcaattaggttccgctggactcgccgggctgcgggcgggtgagcgccgccgggcaccgggcgggggcacgtggcgccctctggggaccgtccgccgcactgcctggcgtcctgcctggggaggcgcagcctagcccagcacctcccgccgtctcaggctcggaggagctctgtacctggctccgcgctgacccctccacctggctgaaggcagcagccctgggagactctggcactctgggccggagcaggagctgtgccccatggcaacccagactgaaagggaagccctgtctgttgctctttgctgcggattcgagggaggccgtctcgagtcgctcagaagcgacctaaagaaggcactggcctctgtgcgccgaacctccacgagatagactaagtctcccaaccgtttacaaaaatatgaagccatctggaaaagcgagcaaccacatggatggagggaaacaattaaaaataaaaggtaattaggaggagggacctgaaagga

SEQ ID NO: 46939 - DNA, 1207 bp, Homo sapiens
tccttctgcataaagtctaatttactgtatcttgtgtgtctctaacttttttccctaaatgagggaataaattttcagcctagaaatgtactgtatcagatgacaacttcattagaatttctttccagttttgaagacctagcctataaccataggcttctttcaccttcacccactctaaaaatcttaccatccaacatcttttcttgttctgttttcctctctaactttctgtcttacagacacacacacacacacacacacacacacacgtgtgtgtgtgcacactgagcaactaaatatttttgaatcttgttgaccaactgtgagtctaggctgctttaggcagcagttaaaatcagggtatgtgagtaatgctaggaaggcttggagtcagactgctggtggcaaaaccggccttctcactcatgatgttgcttaatcatgctgtatctctctctctctcttttttgatgtttgttttttcataaaatatttataagagggcattgattttgttaaatgtttataataattgtgtcccttcaattaatttttgtgaggattaagtacatcaaattacataaagcatttggaagattgatcaagatagtgaatgcttaataagtgctgattatttctattattatttcatactaaataaactgaccttgaagaaaaggaagatgaggcaaccttgccctttaaacgtctttaagacaagtacataagacttacaaattaccaagtatatatcctaattgtgcaagaaacaaataagtgttaataaaaacatcttttgaaactatgattgagaatagtattcattaatgtctatgcttggcaaaccagtaatgaaaagagatacaatgtacagtcatatctctgtttcaaaagagaatgtattccagtgatatgcttgttacaacagtataccagaagtagaaataacacagggatactgtcagcttatttagggggaagggacagttatctgttaactattaatgattcttatcagcttcctggatataaggatggcattcagctgtatgtaacaaaaattcaaaatgtagtagcctcaccactggggacctcatgttccataggccatcctgagctggggcagaggctccaatggtcaatagtgaccctagcttcttatttttcctctcctatccttagcaaacagctttcatcctcatag

SEQ ID NO: 46940 - DNA, 2283 bp, Homo sapiens
atacacaatgagttgtgggtgaagcacactctaagctaagggacaaatgaatttataaattatgccttaatgaaggaaaaggggctggcaggctgaggagctggagagaagttggccagacaggtgaaactcttaggcataggatactcttagacacaagtacacattggcactttgtgtgtttaaggaattataaggccgggtgtggtggttcatgcctgtaatcctagcactttgggaggccaaggtgggagaactgcttaagtccggaagtttgagatcagcctgggcacatagcaaaaccctgtctctacaaaaaaaattttaaaattagtagggtgtggtggttcgtgtctatagtctcagctactcaggaggctgagatgggaggattgcttgagtccagaaggtcaaggctgcagtgagctatgaccatgccactgcactccagcctgtctcaaaaaaagagaaacactgtcccccaacaaaattattataagtcatttcacagacagttaattcttgttatattcagtagttttattctgtaaagtctcaaaaacactgaatgagtaaatactgaaccattgcttctaggggaaatacaagtttagattcctgagagtgactggtcacaacattttcattaactggtcaatccatgcccttcttttatttatatttctgtctaaacacaccttatttaatatatatagttgatccatgaactttgaactcacagccaacagcactatagctcatgcctgaatgaagcttatctaacatgtatatatttccataaggcacatcacagccttcctgcacttagaaactctagacagaactttggcactgtatttgcaggccattttaaacagccaagtcaccaacaaaaagcacaaaatatggaaaacatggtactaagtagacctcaaaaaagacatttttatagcataagagctgaaaataagaaggcagagtgtcagcttgtttgacctcagtggaaacatgaacatcagatgactcagatgtttcacatatgcaggcacgtgttcatgaatgacagccaaagcaccatgaataatgatttgagggttaaataaataaattttagtgagtaggcagatttgcaaatttcaaatccatgaatagtaaggatcaactatagctggagcaaagagtaggtgccagtgtgcacaactgctttagggtataaagccagacaggccagaaaacaagctatcaagggcctgtgtgtcaagctcttgagcacaccctccctcagggtggttgtttggaaggagcagcttgaaggcaaggacagtgaagtgagtcactaacttcaatgattcaattccctggtatgaggaacatggatgctgctggtgaccaatagggagacattattttgagtttacctaattaataccattcaaacatactctgacttcatcaagatgctaggggagaaaactaaaagaagggtcactatccctttatatgtggccattacataactagcacattctgcatttatgaagaaaatactgtgtccagcagcgcaagcagaagtcgcaactgcccatgtgggccacagtagtgaacagctttaacagtgaaggcagtagtaaagctggcagctgcccagggttgaccactcaggaagcctgccagaggaccagagatggtgtgtggccccacagattctttgggtaggacttaaggggtttctgatatccctgtgattgttaccctgtcctgattgtcctccccagactcaaacctgggaaaggaaaggataccctgtaaatcatcacaaatcagttagcaacttctacaggactttttaggggttgccatttagcacttcacatctcagtaaatacattttaaagctttttaattcctggaaaaagttatttttttcctggaaaaaaactgttttctacaaggttcattatgctttaattttaagcttaaaaaaatgccagccaaagctgtatcatttttggaaactgttttccattttcaaatcttaggtatgtaatcttaacaactctagatttcaaattattcatctgtaacctaaaaaggtttttgtaggtgctatcttaagtctctttgtttctggaattctagaatttctactctttgaagctcagaacttttgacaaagtccacatcacatttgaaacaaccattcaaatcctgagtctataattttcattgacagatgagaatggattctcatatgaagcctcatagaatttagattgatctttg

SEQ ID NO: 46941 - DNA, 1624 bp, Homo sapiens
gtggtatcttcacacggacgcgcatgacagaggtaactttaagagaaggaacaatataatccttgtatgttcaagctatttgctcctgtgttccagccttgatggaagaatcgggcatcactgtgggggcggtgagtcaagctggctggcagtgcttcaggaaatcgggtgtgaggcctgtctatgctatgcaaataaataatactcccagacggaggcaggattttcattcaatcttccggaatttgtatgaatcttagacctaaaaatgatgggcaatgaagctgagtcacagtataatctgagtggatcctataaactcagttacttcactctgtcttttgcttgtatcagcccagagagatcttactgcaaacctagctgaagggctctcagaaaccagaacacaggagctcatttgtgcttccgagttgatggaagggaatcacaggtgtcagtcttgattgggcacagagaaaactcacaccaagttacaagaggaaatttcatttgtttctctaagataaaacaatacatccctccagatgctaatttataaaatgtcattgcactcaatgttttttcagtccaattcaagcttgtggctatgaattcaaaataaacagagctgatctggggagccacaaagctttgcagagaaaaacaaacatcagttattgttaagggaaaaaccacacacatctttgcctcaaatcagaagaaaggtgaggctaaaagccaagtggtttaacgtttgaaaacttcctttttctaagggcgtgtttgttttaataagttaatacttgatatgcctgtgcaaagtccaggatggacaactgccccaactctaaccagacaatgtctcctctgtgggccaaccctgattctgacttggggaaatctgggggctggggaagccctgctctgtgcagacaacctccaaaatccctcctgctttctggcctttctccacctgaactgcccactccaacacaactttatccacttgttctcttcagcaagaaactccttcacagagaaaccaccagcccattcagcccctttgtggggaatatgaaaatgcacctcacagcaccactgacccagggtgcctctgagaggcagggagcaccctgtagcgagccaggtagggctcctctcccctcagagggttacagcctacacacacatgagccatgccccatcctcattctccccctactctagatcgaaacccagcttaggaaccaccttcagcatgtcccatgtcatctggagcttcatcacttccaaagagccccggtgacaacttcctaatctcatcctggctagaatgctgataaaaatgtactaaggggaaaacccaagcctgggcccttcttgctcagacctttttttctatgttgttcctttttaattctaaaacaatgcctgtttattgtgcaaagcctagcctacctctttttaatttgggatcaaaattaaatagaaactttgggcttttttgtgtaatagatcatacttattttcccatgacattaaaaacttttttgaaacataatgacagcataatattcccttgcatagaaataccttaagagtccccctgacactgactgtgata

SEQ ID NO: 46942 - DNA, 3320 bp, Homo sapiens
caaggaactggattcgaatgatttcttagtttctgagatttttttgtctaagcatcgtagacttcgtgcgttctcaacccaacaggaagcgtcacatctcagtgagcttcggctctcacagcccgaaactgcaaggagctcctctgcccggcctctctttactcctcctctctgcccctcagctcgctcatctttcttcccgccccctctcttttccttctttggttctttgaagtgatgagctagcgcaaccacaaaccatacattccttttgtagaaaaacccgtgcctcgaatgaggcgagactcagagaggacccaggcgcggggcggacccctccaattccttcctcgcgcccccgaaagagcggcgcaccagcagccgaactgccggcgcccaggctccctggtccggccgggatgcggccggtacccgctccccgccgggaacaacctctccactcttcctgcagggagctggtgccagccgacagccgcgccagggccgctccgggtaccagggtcggatcgggtgacgtcgcgaacttgcgcctggccgccaagccggcctccaggctgaagaaggacccgccccggccttgacccgggccccgcccctccagccggggcaccgagccccggccctagctgctcgcccctactcgccggcactcgcccggctcgcccgctttcgcacccagttcacgcgccacagctatgtgtccccgagccgcgcgggcgcccgcgacgctactcctcgccctgggcgcggtgctgtggcctgcggctggcgcctgggagcttacgattttgcacaccaacgacgtgcacagccggctggagcagaccagcgaggactccagcaagtgcgtcaacgccagccgctgcatgggtggcgtggctcggctcttcaccaaggttcagcagatccgccgcgccgaacccaacgtgctgctgctggacgccggcgaccagtaccagggcactatctggttcaccgtgtacaagggcgccgaggtggcgcacttcatgaacgccctgcgctacgatgccatggtaagacccgagcccgcgcccgggatagtagtcccggactgagagaggagccgggctggaaaagcagcggatggcagagtgtggcaagcctaggtccagggcgcggagagatgtggggataaagtgagactccggccagtgtgccagctggatgcatagaagtcccttggacgattcgtcttaaacggacgttattgcgcccccactatgagatgggagtatttagaggagcaggacccagtcctgcctgcgaggggcttaaggtggggtgcgtagaagcactgacagttatccagagctagggactgaatcggatccctcacgcagctctcatttactgctagatctttcaaagaatgctttatctcaatctagatctttcgaaaaatgctttatctcaatcttattgaaagggaaaccgcgtcgaagaagctgaataaattaacaggcaccatccccgcaaaaagggagacgtgataagaatggacaccagatctctttgaccccggagcttgagagtaattaagctcacagctttggggtagattctctgttcaattaccttctatgtgaccttgagcaagttatttactctttcttgcctcagttctatcctgtataaaaataaggattataattgtacatagtgcacatagtgtggtctctatattattaccagacacatagtgtggtgtctatatatgttgttattaccagacactataatatagggttaagaaaaggaaagaaagaaagaaagagaaagaaagaaagaaacttcagagagagccaaaatgtggaaagacttgggtttcaaaggatttcaataaagtaggtttggcggcagagatttaggaagagtccaacttaagagataatgggctcttaaaacatgtgcaaaagtttagttcaaagtcccaaatgttaggttaaaggtaatgccttttctattgcactaaattctagaaagggagcagaggtggttgcacagtaataaataagtacaaccaagatgtatatatggtggttaaaaaaaaaataaaaccaccacccaaatttaaccctgtgtaaaagccttgagtaaagggattcagcaagactgtggagaaacttgggagaagaaaaaagagctttggaagaggaagaactgagaaatctccagagaaacgtccagagaaatctgtgaagtccacaagtgtggaagggaaagggaagtgtgattaggctgggatacagaaggctaacagtacactttatatgagaagagcttagaggtcaggagagcacaatgctgaggggtttgtttggttttattttcccctctggaaacttggagaaaggaggacaggaaaagatgataagagggcaccattgtttggttttaaaggtccctccccaaccccccacaacaagaaagctcattttaatgagatgagagaaggggagaaagctccctccgttctgatgcttttgagcttatcagggacaccctgcagcagaaattccagctgatccttcagccttcagagttgatgaggtggggctcacacacatctggatttgaagaagaatcgtgggtttcaagaactctgtggtctcttaagcattggtattccacagctacacttccctgatactttgcactcagtaatgacaaaataaatatttgtagaattgagttgttgctaccctgtgtctccacttcctcccagaagggtagaataaacttacatgtgtttgttttattttgcatataaaccacgactttgtaaactttactttttgtgacactcttttctccacaattgtgtgaaccctttttagtggaaaaataagaatgaagaattcctagttttccctaataatatttccctcttgtaagtctagttgagctcctggtgttaatcatggtatcaaatgtttatgacaggacatctaggtgaggcctgagtaaactgctgtaagttacagcctatctcttctgtgtttgttcagaatcctttttgttggatgaaattactttctttcaaattttgctcaagaaaattgaattgggttctgaggaaaaataggctacttacgtaatgttggcagggggtaaagattgggagcggatcacatggcaaggttagatggctgtgtcctcaggacttactctgtgcagtttgggggtgtgtcaaacatgatttgacgtgcataaaatcccagttctgtagtgctaaagcatgtgctaaagctctgctgtactccagtattgcacagatg

SEQ ID NO: 46943 - DNA, 2392 bp, Homo sapiens
tgattattacatgtccagctaactcacctttctcgcttttcattattcatctcgttttaatgacattcttgtatctgactttctgggaaatatatatagtggtcttatgatatatatggatatatataagtgtatgtatatacatttatagacatatatacacatatgtatatataatatatataatcttaagacacacacatacatatatgacacatatacatacatacatataagacacacacacatatataatcttaagacccttcaagaaactattttgaggcacttttataagaaaactttttggaatattttggcaatgagaacaaaaatgacattttctttaaattatccaaattaaatgtgtttccatatttgaagaaaaaaagggaaaataggagccagggttatctagaaacatgagttttcattaagaactaactgataaaggacatataattgacaattcaaaaatatatatttactgttgttgttgttataaaataaataagtccaggccattggaaacaacaacagaaaagtcagctgtgtttgctgagagcagcaagcgggtcctgcagctggcatagaggcagagctggaggcagggtggagcggctggggctggagtggtcagtgagaagagtgagagaacttgctaaagaaccccccaaccccaccctggggtcaggtttacttgctgaagaacctccttggtccccttgagagctgtgtaaaacatccctggggcacaggacattccagaagtgaggtcagagtcacaagctaggatgcaggctccatgaggacagaaacctctgctgtctcactattgcccaatgactgtgcacagtgcctggcatatgataagtcctcaggaagcattgctgggatgaatacatgagagcaggaaggtataggggccacagtcacagaacagcagatagttccatttcctggagcatgggttctgactaggaaaagctagaaagttggatcagggctagattgtagggctgagaagttcaggtgtgatttggaggaaagcattgtctcttctttaaaaggcacccataaggaggtaggaggtgcaggtcttggtggaaaggcacagcagctccagaaatcaaactgccccagctgggactctgaccagccctttaccaggctgtaacagagaggggatcaaaagtgacactgctgtttccagcagctgctggaagagagggctgcattttgcagggcccagtgtggggggaaagggatggggtggaatagaatgtttccaggagcactgcttcttccaagactacaggcccagcggcctggtgtgggttcttcctacagttctttgaccctaatcaagcccagttctcccagtcctagtggcctgggcacccacagggttataacctgtatttctagcacatttaatctaatttattttagctagatcattaaatacctgaaatacaactctcctcatgacatcttgaaatataagccatgctttgtatatatgggatgcctggtcctgtgaggtttctgatataatagaggaatacattcctttgtcctcagaggcatttctctgaattttttttccttcttggcagccataccttaagcaaaagatggtagcatactctcgacatttagtcattcccctgggtacctgtctgtgtgccaggcactgttttaggcaccagggatactgaccaaaaaaaaaaaagttgcccactggagcttacatattcagtgggggaatcaataaatgagtaaatggtttggtatgtcagaaggtgctaaggctgtggagaagaattaagcaggaggggaatggcaagtgcagcaggggggaaggtataccttgttgtttcaaagagatgctcaaggaaaggctcacatagaaggcaacatagcactgagggtcaacggggagccctgggcttcttggggcaaccaacaggaagcagattgtccttgatgttctcataatagacaacagtggcaaaactacaactcttgatttttcaacattgcctatgagttacagacagccttgcctgtccaacacatctgtgagctgctaattattaggttgtcattctggggcctccctggctatgatgtcagccatgaattatcttccatggtaatttgcacttgtggagttggctaatgttaaggattcaggagttcccctgctgaagcacacagacattcctaaacctcacagtggaacaagggatgcatttctaataatcttgttactctttggattagtacttttcaaactggagtttgcagactcctgcattttgaaagcttttaatgaaatgtcattctcccaccctccttcccttgtttagtgttagttcttagaaat

SEQ ID NO: 46944 - DNA, 612 bp, Homo sapiens
ctattaaacttttgtatattaacttgtactctctatatacatagccacaaatcaatgaggttcaaaaaatatcacatcctactttttcatttagcaccatatcaaatatctttatgttgctttatagttttcataagcacaatttcatctgctgcaaaacactccttgaatagatgttccttaaaataatcattcctacaatgttagaatttcatgttgtttccaatttttcacttatgtaaacaatattttaataaacacctttacatgttataagctcttctcttatttttctccctgacaaattcctagcattcctagcatgagttcaataggttatattttgtaaccttcatgactcatgaagtaataaacctgaagaattttgtaattgttaaagaaattaaattggttataaaaaatcttcctacaaacaaaactggaggcctagatgactttaccaactctatcaaatatttataaaaagtctaccaaaaataaaaaatgctaataaaactttgataccaaaacctaacaaggacagaatgagaaagaaaaattataggctatattctacccataaacatgaatgtaaacttccttaatcttttt

SEQ ID NO: 46945 - DNA, 1875 bp, Homo sapiens
tcctccccacaggaacaccaaatttaacaactatctaaacaaaaaaaaccttcataagaatcaaaaaccaggtgactgatcacagtacatgattttaacttcatattgctgaaagaggcatggaagagggtagcaaaggcaattctgaaattgccaataccctttctgcagcccccagaagtggccacatgtcaaaggaaagcacacggcttgagagagggacaacacagtgattgtgagaatttgcactgaaactcagtgctgccaacaccaggaagaacttagccgatgcccaaaaagaggtcatttacacatgtcctggccagagggcaactgctcatcccagtagtccaaacctgagtttcagcaatccttgacaccacaggttaaagtgctctgagttcttaaataaacttgaaaggtcttaagtaaacttgaaaggcagtctaggccacaaggactgtaacgcctaggcaagtcctactactgtgctggggctcaaagccagtggacttggagggcatgtgaactagtgagacatcctgtggggaggatgatgagagccttctatctggcgatcttgttctgcctctctctctccttatggttattttgtttaccaaggcagctaagggaaggcttgtgaaacccctctccaagtcccaggcagtgcagcttgcaggtccgaaagagaccctttccctctgcttgaggagaggagaggggaaagtaaagataactctgtctttcaacttagataccatctcagggacaggaagacagggaactgggcagagtaatgaggccctcattccaggccctagctcccagacaacatttctagacacaccctgggccagaaggaaacccactgcctttaaaggaaggacccatcctggcaggattcatcgtctgctgactaaagagactttggactgaataaaacagcagcagtaaccaggtattcacacagtaggtcttgggtaagactgaggtatgccggcctcaggtgtgtctagcacattcactgctctgatggctacaaagagagacttcttctgcttcaaaaaagcagaagaaaaggtaaaggggatgtcgtcttacagctcaggtaccggcttggccagtggggtagaggaccaagagggcttttggggtccccaattccaggccttggctcttagatgccatttctagacctaccctgggccaaaggggagtgcattgccctgaaaggtgagttgcaggcctggcaccattcaccacaagctgactaaggaggccttgggcttaagtaaacattgacagtagtagttagattgatagagtctagcagcactcccatgggcttatggtggtagttgacacggagagaggctcttttgcctggggaaaaggaagagtggtaaggattttgtcttgtggtataggtgccagctcagccacagtagaataaaacaccaggtagatttctaaggtttccaactcctggtcctggctcctggatggcatctctggaaccaccccatatccaggggaacttgccaccctgaagggaaggacacaagcctggctggcttcaccacctgctgattatagagccctaacatagtcagtagccagatagtggttacagtgggccttggatgagacccagcgcctgtgctggcttcaggtctgactcagcacactcctactcctggtggccaaagggttatttgtgtcacccctcccccagctccaggaagctcagcacagagagagactccatttgattggaggaaagtgggagaagagaacaggagactctacctggtaatccagagaattcttccagattttatccaacaccaccaaggaggtacctctgtaagt

SEQ ID NO: 46946 - DNA, 2010 bp, Homo sapiens
aatggcgtgaacccgggaggaggagcttgcggtgagccgagaccgcaccactgcactccagcctgggtgacagagcgagactccgtctcaaaaataaaaaattctaaggatgttgggacgggtaccactttgctttctgatttctgtccaacaaatctttatgatcgtctgttttattcaacaatactgcgggaaaagcttcagctgcaagctgagggggtgggaggtggggagatggaagaacgcgctgcaggtgtgcggattctgcctaaaattgcggctacgaactggaccttgaacactcctccgtcagctgacttgactgcctgtgtacagtctcaatttgagccgacacacggatttcacttttgaaaagcaacgaagatgaagaactcgttttgagaaatggatgagaaaaaggtagctcaggagacgaagcctcgggaaaggaggcaatcaaccccaccccaccggcctgtgcttccggcctcgacgctccgccgtgctccccgaggccgctcctctgcggagctcgctctccccactggtccccagtcccgcagctacgcggcctccgcacggttaagcagcacgggccgggcgtctgcaccttcggagaaaagccgccgcccaggctccgcgctgcggcgttacctgttaagaagcagggaggcggcgctgagacagagcagcaggaagcagaacagcgggtactggcggcagatctcgcgtcccacgtccagtcgcagccgctgcttcagcttctgccccatcgtccgcacccagggcaccatctccgtaacggcgaggccgagactgcgctactggctgaggcagaggtcaaggcgaccccccatccacacctcgcgtccccgccccaccgacttggcggcgcacacagacgcctaccggcagttagccgccgcaggctgaggtcgcgtccggctgggcccagccccacgccccccgccgcgcgtgcgcggccgcggtccccagccgaccagaggaacggccgtagaacgtgcccgaagtcgtcacccagcgcaaagcctctagcgtctcgccgctccgccctcctggccggagtagcgcgcagtcttccgtggaaactctgacaacactggcgaccggccatttccggaaatcaaaggacagccccagcacccagtaactgcctgtattgcggaggagagggaagaaggttgtagggagcccggaagaaactacagcacccccgtagccgccgggcgctgcctgaggggcaaccggagctcgtggagcccgctgggaactgtagtcttcgtgacacgaacccgcagagggatggagcgggtggtagcgcttccccgaccccgcaacgctccgcgcctcaccgtacactcggctccgggtgggagcaggtccgagctttgcgtgacgcctaagggagagggggataggaggacgcctttgagtcggtattttaaaaggggtgtgttgggggctgggggggtggcgagtaaaacagccctagaataaagactacaactcatcaggccgccaccccaccaacaaaatctcttttgcgcgctcacgggcaagggtagagctcaattcacgccggctccgggagcccaaccaaaatccgagtgcttggaagaggcaggttggcagattaggtaaaatccctcttatagagtctcatggggttttccctttactaattcatcacatttctaaatttttttttctgtattgtccgctacagtgagagatgcaggaagactattatcgcgaaaatttacttaggcggtacagacactaagcactttcatttgaccttcatgcattcaccccatggtgtaggtacagtactatagtttcaatcattatacaggcaaattactgagacagaaaggaacttaggatcataaaactaacaaagccggaatttgaacacgttctaaagacagagcctgtgcctgtcatctctctttcctaggatcttatccttcaaagtggggaaacaaa

SEQ ID NO: 46947 - DNA, 724 bp, Homo sapiens
aggaccggcctcgaccccttttccctgctagccaggtaacaaaaggaatcagttagataaatcatcttaaattaataatgtgtacatacataatgataacattaaaaagacaagccttaacatggtaattctaaatatactgtctagccaaaaaagttgcctttaataactatgaacttctttttgcttgttttttacttgctttgaggtttttggttgcttttttgcccctttgagtgaggaggctggactgaggtttgaaaaccccattttgttcacaaactgattttatttaaaaaaaaaaaaagactaacaggaaacctaaatgaagtcacaccttaaagttacccattaacttgcaagtaattcccatttttgagacatgaagtaatcataaaatatgctgaaagcaaacatctcagacttgtttgaccttgagatttgaaatttagtgacatttttaagaaagtttgtctttcaagtcatgtatttttcacatgtaactttattgtcaggtataatacctttaaattcaagggtgatggaggttcagaagtggggagtggctgttaaaccttttcactgttgacctagagtctgtcccccaaaactctaacattttcccatcattactgttagaagtatagaccatatggccaaaacaagactaaaatgtgaaacaaaaatccaaactattagatctttaatacaaaccagtctgtga

SEQ ID NO: 46948 - DNA, 3535 bp, Homo sapiens
ttaaactaggatcttcaaaaagaatacaagacaatatgagagccccatctttactttctctaccatttactacaccagctagcctatacctccctttaaaaaagccttacagtcactatcgcctgacaagccagatttggagcacagggcacagaaggaccgattcaccatattcttcctcagcaccacccctgactcacctgctaacactccctaggaaaaaccatattacaaatagagcccaatcagcacgggtacgagccagcgtgccacatgcagctgtgcccgttcggaaaatgaggtgtgtgtggagaaagcaaaactgggctcctctctctcaaagataaacccccaaagtgcgcgcttttcccgcctgccgcttatagatcggtaacaacagccagcgaagaacaaagcgctcatacaagccaccttcccaccacccaatttctccaccctttaaccccgcaccccaaagcccgcccctgactccgcacccagagcggcagtctcaccactgcggccgccaggagcccattagaaacacgtgctctgcgccttccaatgtcctacaacttccttcaacggcaacccaacgaatcccaaaccaagacgaccatcactggttcccaacatcaacccgaagccgcggtcggagcccccagaaagctgcagcagcacaatctctcccctgaacaccgaggcaccggcggcgccaggccacaggctctccccgccccccagcgccgccgtctccgccgtgacacatggctctccgcccctggcgctccccgggcgccgacgacccccggccgcccgcccggccgagacgtgacccgtggcgcgctgtgcaggtccccaccccttacccttccgtgcagtgactgcgacgcctgcccggcaacccagcagcgtgagggcgttcagcggacggctcaacgcccgcgggaccgtgagcaccgcccaagctcgccgcacggctgcaggacaagacccactcctctccgcccactcccgcgccgcggcgaccgccacgacagcaccaactctgaagccgctcgcggtccgtgcgggccacgggaccgtggaggcgcctcctcccaaagcgccgcagacaaagcccgaaccgcagcagcacatggaaaggaggaagtggcggcgcgggccgcggcctactcccaggcagccccagtcaacgtgctcttctccccattggaatccattttccagaaaagccggtttctacccgcgccaccctcccccagctcactccacaatgtcatggagctcccctcccacacccaggttctggcagtcgttacctccccgttgggctgaggcggagaaatcctgtccgatggtatcgggttgcgggaaacgcgtgctcgctgctccctgtgtccggcgcgagtggagctgttgtaaaatggcggccgaagctcacgccgctggcagcaaacccgatccagttccactcgcctccgagcgcgctcccggtgcgcgcgcgcgcccccgcgtgacccccccttcccttcccttcccttccctcccctccctcgcgcgtccgcttcactcactccctcagcccctgccctcctccagctcctccttctccccctaccaccaccaccaccactagcctctgtccgccttctctcggcctttcttattcccgccccccgctcctttaccccactgctcccactcccctctgcggtcgctcaggcacgagtggccgcctttccccttctggctcgcacgctccctcactccctccctcgctcgctcgcactctcggcccggtcccccagtccctgccgagtcggctcctctctttctctctcccgcgctgacgtgacaacgtagcctacgcctcgggacgcgcgcccgcgggctccgcccccacgccgcgccgccttccccgctcctcaccccttgggttgggggtgggggaggcacaagaccccgcccttccgctccgacggtggcggccgaggggccgagactgaatgaaaggcccgccccttcccctcccgacactccccctccctctcccctccaggcggggcgggccggctcagcgtgtcccactcgttttcctttgtcaggagactggcatctccccaccccgccccaccccaccccctccccgcgacaccatgcgcacgccacccccaccgagctcccgcccgccccatccctgcccggtccggggctggcggggcagagtgctgtgggcgctgagtgcgactgccgcttcccggagggcacccaccggtctgtgcgcgcccggcccccgcccccggctccgcggccgcgtagccgttccaggcggtgtccacgccgctgccaccgccccgcgctctcctcctcgggaagctgcaggcgcacgtgtcccccggggcggggcgaggcagacaatggggccaagggggaggggagcggcgcggagacccgcggacctttggtccgccggactggcggtactcgagtgcgagagtcgcccttggagactcgatctccccaactggacagtgggccctcctcgcagccgcgcggctccgctttcacgggaaccttcggcgaagggaggggcgccccaggcttggacgcggaaaccccggctgcttttgaagggggaacggggctggctccagtggagcgaggagcggctcctgccttgggatgacacgaaggccagatttggaagcgaaaccgcccggtggtgaagggttgtgcaatactccgtttcagtccctggccttttaagcagttaagggcttcctcctggcacagtttgagcaacttgaaacagcacaaagctgcgtggttagaacaactttgagaaaaatgtctgtgtttcttttaaaaaaaaccttggcaactaaatcttctgtgaaatgacgtttcctttataatcgtttactaggtacaagaaagacaagacaaaggcatttgaattacagacgcgatatggatactaattttatccagggcagctgtaatgaaaaatagaaacaatgtccttttgattaaaaagcttatttttaagagcttactggttccccagatgagctctgtgctatgataacaaatcagtggtttgaggaaaagttagataaacactcttcaaagtgcacaagcacataaaatgctagattattttcatagctacttggatcagatatgaagtatgttttagccaaagcaccacatagccaacctgtttagtaaggatttgagatctccaccaccccagattccttactatcaaacatatgtgatattcagctgcttcagccatagggatttttgttcacaatgcagaggtcgtggttaatgatatacatgaaaaacaaaatgtttaatagaaaactatgaaaataagagtcataccatggattaaacaagaataaaaattggccgggcgcggtggctcacgcctgtaatcccagcactttggaaggccgaggcgggcggatcacaaggtcaggagatcgagaccatcctggctaacacggtgaaaccccgtctc

SEQ ID NO: 46949 - DNA, 2468 bp, Homo sapiens
acaaacattacaacatatgtaaaagcattaaaagtattaaaaaaaaatattgtccttataacggtccatctcagaagccagatccgtaaaagtttttttttttcaacagaagttcaggttcgggataagatcatcacagataagaccaaggacacaatattcactgatctctaagcaaacagaaaaactccacttacagaaatcgttgcaactttggaacttccaagacaatctggcctctatcaatgggcagacagcgaccctcactgttggcagaaaaaaaaaaaacccaggattttataacacaactgttataaaatcacggcaacaaaatttactccacctctgaattactggtcttaatctcagaagccgaatccgtacttatttttcttcaggttatcagcttcgggataggtttcatcattgattagaccaatcagaccttgtatatgtacacataatacattaaactgcacttctgtgacactgactacaaaccaaggtaatgctaaaaggcaagtattatagtacaaatactacagaacttttaagccatacaacctacttcaaaatgaagctgctagtcagtcacattcgacattcattatcttcactggctactcgtccacactcagaacgctgttcactgacaaaaaaaatttgatttagtctaggtgtggattaaatgctatgctcaatcataaagtactaaaacaacacatacctgttaaaagtgtcaggttttaaccaagcgattttccattaaatattctcccagatgttctggaagttttttcgtgtatctaacaaaaaaaagtaaatttcaaacgatgcaacagttcctattcctgtaaatcaacaggtttactcctttagtttggaaactaagcttaactaagctcttacctttgcatcttcagagctgctccactgtgccactgaagacagcgccattgttcctgcgggaaatcggtatttaagcattctcgcagaaatgtcacactccaaggcgtttttccacacaaaacccttccccttcattaatccgaattgcacacaacgccgccttcgaacagctcagtttcaatacagggtcgaggcttcccattttaaaacaacgccgacggaaggccttcgccattttagtaaaggccctttgctgttaaaactaaccctccgccccaattaaggtggtttttccgccgccgctcaggcacatgccggaggccagcaagttcggcgcccgtggccgatcagcggttcctcacgccaaaactcggagcctgtggccgtcacgactcaacctcagtacatgtggcagtccggccgcacgtttcccacgtgcaagctttcaactctcagcactctaaactcttcactaagatgtcttcacaggattaaagctcttaactcggcctgcgccaccatcttttgctcggatactagcccgcaatacccactcacctaccacccgcccagacgctcgcgaaggccgacgtaaaagaccgaagtgcgcagccagtagctccttatatagcctcccggagtcagaacgaggccgtcccgccctctcgcacctattggacatggaagtagacaggggtgtggtcgcgaattagcgggagcgcgcgcggtggctcttctgaggcccgttccgcgttgtggagcgcgccgcaggccggccgcgcgcccggccatttcccggcgcgcgcccgcaggcgcactgcgaagcgtctcttacgagtctggcggccgacttggccctacgtggcgcgggtgtggcgccagaattcaaacagctgcagttggaaacgacgctttcgcctgccacgagccaagtccgtccaggacagattgggtccgagagtggacacaagttttgcagcgcagggcggcctcagcttaggaccgattcgagaagctgggctggctggctggctggcgctgggctgtagtgggcccccagcggaggccgccggaggagcgggcgagccctggccgcagcactccgggaaagggcagttggctggcagaaacgcttgggtgaaaaagcggaaagcgccacgtgagaacagccccggcgtgcggccctgcagggcctcagggcgggcatcaaggccccatggggatccattcctcctcacgcttcctcgtgccaggcatccggttacactaaacgtgaccatacaagtctccctcaaacagcgaacgtgaggttcaatactccatttcgcagaggagaaaactgaggcttaaaacagccaggtaatttgcctaaggtcacacagctgaaatgctttgctaatttttaacttctttgtactcaattagttatattgaaaacgagagaaagattaatttgagaagtatccctgaatactttatccagacgacaaacacaaaattcaaaagcagtgctttgattaattagcatgttcgagtgaatatgtctgcgtgtgtgtgtg

SEQ ID NO: 46950 - DNA, 976 bp, Homo sapiens
caaatccaacatttttgtcaagttacccacagattgcaaaatttcaactacagcattattctgccaagagaaaaagctaggcacagcaaggaaaacttaagagttgtagccagatattaaaggaaactagaaaaatttaggatccagtttagtctacaggtagatgataaaaactcagaaacaatggacaggtctacagtccaataaaaggtatagtatagtttttcttttttcttttctttttaaattttttttgagacacagtttcacttttgttgcccagggtggagtgcaatggcacatcttggctcaccgcagcttttgccttcaggattcaaacgattctccagccttagcctcctaagtagctgggactacaggtgtgcaccaccacacctggctaattttttatttttagtagagatgaggtttctccatgttggtcaggctagttttttttctgaaacataatttttctcttagcagtcacccccatttctaccaaagataatcaaagtaaaactaatttgtttgagctgaatcaaacttggcctgattatttacttaagtacagccggaatagtgattcaccacataggctcttttaaagtttgctttgctggaactttggataagaaatttcagagagaacttgcaaaagcctctcaaggataggaaaccaaaccaatatttccagttgtatcctgttataaagagaatgagttctttttgaacttgtacaaataactgtattgccataaaaataagaacattcatgagtagtttctgaattctggagggatcatgtcgagagaaaaagtaaatatttcaattttattcacaagagtatacttatactttaccatatagctgtgatctatagatagcttaaaaggaaaaatgtttcctggaaaaccaaagaaccagcaaaatttcaaataaaaaactcagaaaaatccataattcttctttttat

SEQ ID NO: 46951 - DNA, 1404 bp, Homo sapiens
atcctcttaaatgtgagtcccatgttttctctgcttttggaatcacttcaacatgtggcacagcacctgccttaatatttttaacattatattgactccttttgctgttcctctcgaagaaaatgtcttccttggaaaagtgtggtgtctaaccgatcccaatagcgctttaacccatgctctttctctttgcatctgtgggcacagcactggttcccagactctgggggtgggggtggggggtttctactggaccaaacccaggatagactccgtccctcacttctgagatccagaggctgcctgtctgtggctgggctgcccagccctttggaagagagtaggttgatggagcctcttcgaaatcaggcagcagtgcccgcgccacggcctctgcaggacagactccagcatccccggggtgggtttccggaggccccgctccccgccgcgccctggaaaggctccagaatctctcggcctggaggcccctggcggcctctgctcccaagcggggagtcgcagccaggctacagcgggcttgatcctcagtgctgggtggaaaaaccgcggcggcaaacgccgggcctgcaactgctgggtgtcggcgttgctggttcgcgggcggcggcggcggcggctccgcgacaacagaggacgcgagcaaccggcgcagcgcccagcagggccttggcggggtggaggggcgcaggctgggttagcggagcagagcggaccgatctggtgccctccgtggcccgaggcctgcggaccttctccgttctccggcccagggcgagagcggggcaagagacagcgccccgatagtggcgcacgctctccgccatccccgggcctcgcgctttcacctcgcgtgctggggcgagggcggggctgcggggtgtactgggtcgggggtaggaaggacctgccaggccttagccctgagctatccgtcatccgctaacgccgcgctccctgcatccctggcttggcccccaggctctgcgccgcttgtctgtagcagacacaactcagctcccttactgtcctcaggcccggctatttcaagaattccagaaaaagagtgcaccggcgtgtgcgggccggtgctgcccggaaaacccgtgaagcaggcacgcacggcccggatgcaagcacatctgtcccctcccccaaaggtctccccagctttattgatcgcgtgggtgcgggtagggatctaaatttgtctcccagattttctctgaaatcgagtctcttgggagtgaaggtccatatgattacaccacgtccttagcagtcgcgttgtgttcaaaatgggcatgggtgctcgcggcgcggatactgagttccccagagacgcggagtcttttgccccaggggcttattcttgttttctca

SEQ ID NO: 46952 - DNA, 2109 bp, Homo sapiens
aaaaaatgctgtagatatttataataattctcgacaatattgttttattttagcatcaatttcctctcctccgttatgatttttaatggagtccttattggtgttttttttttccttgacctactttcttttcaatagctttcatatatagcctgttgtcattgttggtgatttctgtagagtgtagtagagtctaaatcacggtgaaacagagtagttagttatcacttattctagaaatgttttcgtggtttaaaagtcatctggtctgttcatattctgacttcttttaaactatgcttttcatgaatttgctccgttctccagactgaggattgaacctcattctgctctgacccaattgttcttttcctttgttgcctccaccccctagagaatgtgtttccaggggacaggcgttcttggtgctgaagaggaggagagtcaagtgagacgagatctggtacctcacgcactagatccctcctctccggcctggtgagaagtcagagacaattttgacagttcatagtcctgccttggctctcacgcttgcggtccatgggcgggttttaccttctctctcttcctctgcttctggcctgcttacaggccaacagcaaatgcagccattgcccgagaccactcagaactctccctgtgccatcctcttggggaacaggaggatatgtccgtagaagacttcgtggactggggaaagccacgccgggatcgggacgccggagagggtcgcccctccctaggctttttcccgtcgcggcgcccacgtgaccgagagcaggccttcaccagcccgcccctttcggccgctgctgcccacttcccgctcggggtaagtaaaccgccgttttccgcaccgccccaaccccgcccttctcctttccccttgccttcacctccctcgggctctctcgcgccactctccccacccccatatcttccccatcgggccctttgtacgtgctcggcgccgtgcaagcgcgcccggcacgtgaccccgccgaacgtggcattgtgttatcacgtgacccaggtgcgtacgcgacggagcggggtgtgaagatggcggacgaagaggccgagcaggagaggttgagttgcggcgaaggcggctgcgtcgcggagctgcagcgcctgggcgagcggctccaggagctggagctacagctgcgggagagccgggtaccggccgtggaagcggccaccgactactgtcagcagctgtgccaggtgagggcgcccggtggtcccctccccctttccccagctagagggggaagagggcgagcgagcgctaggcggccgagaggtggtcgccgcttccttggcatcatcggcgcctccgcctgggtgggagcgggagtagaaggaaggcgcctttgtgtggctgcagttgtggcggttgttgtcgtctgcagctcctggctgggggaagggagttgcggtcaaggcggaaaatcccccctcccctttccttccctgaactcgggactgcgcggtccccgcggctgaggaaatgtacacggtgcggattggagagagtaggagaatggaggccaggttctcttcctcctcctccttttattgtgcactggggattaccgcgcctcccgcctctgcgcctctgcttcccactccgacgggcctccgcccccactggtttgattcctttgccttcccctgctttcatccgtcccgccccccagccccggccctgtcctggctgtctccgggcctttgttgttcgagtttcgccttaggactgaaggggcctttgttgatgttcggaggagcagtccccgccgaccccttctagttgagctagacgttcgggagggggtgcttggcggaggttgtcccctcctgcccatacttgcttgcttggtgcatcacttctgtggtaaagctttatctccttagtgtagaggagctgtgcctgtacatctgtctcaggttgagtgtccttttggggcggtttttccagagtccgtttctcatttgctttcgcccttcgaggagtatgatttccactatcctttctgtcccgatcaccccctcacccctgtttcttggagtccttcctatttg

SEQ ID NO: 46953 - DNA, 1107 bp, Homo sapiens
tgctttccactttcatgaaataaacatacttctaggagatgtctccttttatttatacaaacatacacaccgaactggaacgtaatttgaagttgggaggtggaaaactaaaggtcaaaaagggaagaaagcaaaaacgtcccttgcacacttcagcccgcagaccccaaggaggggcgcgaggtcctcagaaccggaaaggctagcactggatgggtccccgcagccccgcgccgctgcgccgcagcctccggaagacaggggacgctgtggcgccgggcggggcgccctccgccgctctctctagcaggcggggcggcgaagcggggcggggcgtctcgggcgaggagaggaggtgaccccgcgaaaggtaagcggcggcttcggtggtgttgagtggctgggcgccggcctggaggggccagggcggccgcaccatcacgctcccgtctctgcccttcccagctgccctgccggtctccctcccagggagggagcgtcctctcggatagcccaaatctttgcctctccgtggactccctgtacccgcaccccaagtcggtgaagctctctggccccacagagcccatttcccgtactcaccttgcgggctccagtttgttcggtgcttcatccatggacacccccaccccgagaactctctcgtttcctgcagtttcttagtgtcttggctcaccagactcataggggaacatggtggtgttttgaggagacgccgcttttcttttgtcatagtgcggacactcgtgctttttcagccctgcaacacaatgtgtagaacttaacggaatgaagttttcttttggaggcttccaatgcgtctgtctttgagtaagccttcggcaccgaacagtagtccatgacattgggggaagccagatgagactcagattgtcagtactcaggctgtcgccagcaaagcctttccccttttttcagagacagtactacatccaagaggtggaaagatacttttgttttgttttgtttatttatttatttgttattattataagttttagggtacatgtgcacaatgtgcaggttagttacatatgtatacatgtgccatgctggtgcgatgca

SEQ ID NO: 46954 - DNA, 1167 bp, Homo sapiens
accccgctttcaaagccgcctcatcattcccacgctagcaagttaatatccttatttacgagaacttgtgtttcacagtcttaaccacggaggttaagatgtctctgcctgaaattcctttgtttttaaagtttttccagcccatcttttgggggaaagaccctcaaagtgggaccccgccccacccccacctggccccgccccctctggtccggagccttccatctccatggttacgcggcggtggctgcgagcgcccaactgctccgaccgtcgcggtgagggccccaggacagaagcagacagacacggctcctgctgtcgattccgatccaggtcagcctactcggggctccgcgcccttgacccggaggcgtaccccgccaggcggcgagcttggggcggctggcggagctcgggcggctggaggaccgcgtcctgcctcgtcgagacttagctctcagtctcgatcctttaggctgcgccgccgcagagctggaacagcggtccattcctgccggaggcgccaccccagggctgcagggctgccctctagcctttgcgcgggtgcctgaggcctcccgcttctgtttcgctccactggctaccccagaagccggacctcgggagacttagtaattggagggtgggtgcagggaaggtgctgagccgcgtccctagcgacccggcagcggcgcgcatgcgcacacagatccggagcgcgcacacagatccggagcgcgcacacagatccggagcgcgcacacagatccggagcgcgcacacagatccggagcgcgcacacagatccggagcgcgcacacagatccggagcgcgcacacagatccggagcgcgacggactctcccactgactggcacttgcgcatgcgctgcctgtgatcttggagtactgattataagctgttttaagcgattcccttaagccgcgcactgttgtaaccactaaaaacaggactaatttagtcctcacacctctggaaagaagtgaagcaagtgcccaaggtctcacagctggacagtggtcgggtcaccatggaatccaggcaatctggtttcactggacaaaatgcctagtgcttcgtactcatccattggaaagctaataatgctgaggagttggctttatctacctgatattgccttt

SEQ ID NO: 46955 - DNA, 1807 bp, Homo sapiens
ctcgacttcccaaagtgctgggattacaggcgtgagccaccacgcccggccgatacatctgattttttaaaggccgttttgttgtgcgaagatcattagttagaatgcctggctgggtaaatacaaccgatgactgctgacgatatggaacaggcacaagacttctgaacgatatgtagaataaattataacttatctagaacacaaggtaacagtggaagataatgagccaggtggaagttacaaatgttgccgcaagtagtttctgttactttacgagttctgggagcttctctaacagctttgacaggagtgaatccccaaggctaaacccaaatccttatttgccgcctactcacgcctttgtgaggactacgattcccagacggcaacgctcccttcactcaacttccttagctggcggggagacgcagtttacagaactacctccccaaccgaatttcacacacctgtcacctaggacgcggccgggaaggcctcccttcgatccgcgttctccccattttggggtgtagcttggattcctgagcccagttttagtgcgtggccgaccgggaggccggcgaggcgctctaggccgagcggcttcgtctctatgaccacaaggggcggtccccggtgtcctgcgcgggggcgcggagggggcgggcgtcagttccgcggggggctgtcggggaaccatggctgccccgagaggtgagaactgggtctgctgggagtggggagtccgcggggggcggcggcgggcgagcatctgcgctggtcagcccctgtcgggcagcggagcaccctggttgcccagtgcctctggggcctggctgaggcgtcaggagtttgcgtggagccgctcccggcagtcagggcagcctgccttccgctgcggctgcagtctccgcggctgactccgcgctgggcaggtcggagtcagagaccgcactgacctccactagctgggagtgggtgggaaccgaattctgacaggccggggctgcggcggacccggagagaggccagggcgtgggtccggggctggaccgcattacccagcgaggcaggacagttcttcaccctggccccgcggctccggtctcctctgcgcctcctaccctgtggatgctcagaggcttaaaggcaggctccgggcgcagatcccatgcggcggctgggccatgcaacaaccactaaagacatcactggggcgtcaaaacagcactgaaatcgtaacgaaaggaagataacagtcgttaacagttcccacctgtatgctgtgtgtaattatagagaatgctgtatgctgctatttggggtggaagctgagatccacctccctcctcctgagggatggcacattcgggtgaaggcgtatttgttgactaattgacatttaaggagggcgagtctaattgactccgcaccactttttgctgagcagtgtgtgtaagttgggaccagaggtggattctttgactgtggtgcattaaccaggagaagttgggcaacacccggattcttgctccacccttcctccatagagcacttggcttcacccttgaataaatattgaacgaatacataaggaatatcttcttgcgtgggtttcaagttattttccctgttgcggggtccatgtttctcatcaggccctgcccaggggcattgtctttagttgcatatgcttctcttatgtcttctttctgtttcatttcaaataagtccaatcttaaaagcctttttttgtagcaacacaggaaataaaagaaaaagaaatagaattgttttgataact

SEQ ID NO: 46956 - DNA, 1891 bp, Homo sapiens
gagccaagataaattatacaccaggctaattacgtccactagtacatccattaatcagaaggaaatgggttagccaagaccacaatagaaagtttccttgcaagggtggccaatgagtcttaaaaattctttttgattaattccacatttatactgcaattttgcccagcgcggtggctcaggcctgtaatcccggctcttagggaagcagaggagggaggacagcttgagcccaggagtttgaggcctgcctgggcaatacggcgagaccccgttctccacaaaaaggaaaaacaaaacaaagcaattatattgcaattttgtaagcccttcctcacaacagagctgttcaaatacgaccctgaaccaagaaaaactgagtctcagatagctcttatatctttgggcgttaccaaaaacaattctagggtaggctgcctaagtgactgcaagagaaataagcagctttaaaatgaggtccttctgaagaacaatccagatccatcatcaatgtcactaaagtgtaaagaacactaacttctatggggtctaatcatggtctaatgacttgccgccacccaggtaaagcattcatagctgtggggtgggaaggagagaagaaagcaccaggtacctttcaaagtttacttttcaccgagacaaactgatcccagccgacgctccacaggacttctgaagctccaccagctccagagaagggggaggaggtggtagaaactaacaggattccgtgggacccaccctccagctgactgaggactggcccgcagcggtgaaaggcctttggggtccctagctcctcagggactcctctgcgcgctccgggatccatacctggcaagcaatagcgcggcgaaagccgcacgccatgtccacctctacggaagtgcgccgcagtccgccagttccggcctcgccccacctccttatacgacccgcctccccgcgccggaaacccgccccggagggtgatgccagccaatcaaggagccgtgtggctcgccactaacctctgccctgcagccgcgagggcgcgcgggaaatcccgagtgcatctggaatacgcagagtcagtaagaccatggctacgtcctcgatgtctaaggtatgtggtggccgatgcgcactgtggctctaccgctgcctcattcccctttgaagaagggatgaagccgaggttacgtaggcatcccttccctggctggagaggagggagggagcggcgtactgagctgaggcgtccttgctccagatcagttgaggccaactttgcttggggagcgaggacgcggatctgccttgtggtatggctaggaggatttttaagttctggttggtggaggtcggatgtcctgatgatgtggcccagtctctcatttttccatctcacaaatactgtgcgccaagcactccgttaggtaccaagatgcagtggtaaacaaaacagattcagtttctgcagtcaagaaagtcggtaaacatagataaactgacgatcacaaattttaagtgttagcaaggaaaagagttctaggcagacaacagaagagtgggaagaacctaatataggttgtcgggggttagcggaggctttttggagaaagtgaccctttcgctgagacctgaaaaatgagtagaagttaggttaaggattagggcgaggagggcagagagaacagcatgtttcttcggcccagaagatagaaataaaatggcatattagaggaatttaaaaatcataatcagaaagtagacaaagagtgggagcgtcatgaaaaatgagaatgaaaaagtaatgtggatgcgggtgtgtgtggtgggatatcttatagacctcctcatgttggctacctagatggcaagaaattgc

SEQ ID NO: 46957 - DNA, 593 bp, Homo sapiens
tcccttttaccaggcagtgaacatggtagtcactaaaaataattttgcaatgtgatttgccaattttaggccaaatgtcaggttccagagttcttacaaattccaaattgtaggctctgaaatcacatcagccgtttccctgtcatgatccttcacctaatatgtctgactttttacctttctgagcagttgttgaaataatgctcagtataattaaatgtgttttgttgtaaaatcacaaaatcttccatactaggatttagtgtctttaccaagattgtcccaggagggaagagattagaattgtagcatgttaaagctaaaagagacctgaagagtcagccctgtggcagctaaaggccagagaggggctgtgactcatgcaaggtcacacagtctcattctcctgacatctgccaaaaggccctctccatttctctacactgccctcaacagccacaccacagatgtctgggcagagcttggagttatggagaaaggatgtcctttaaagacaaatataagcaggagacttcaggaggcagagttcacagtataccatgagcagctcttggcaaaaatactggcaggca

SEQ ID NO: 46958 - DNA, 1244 bp, Homo sapiens
taagatcagatgaaggatgtgaggagtgcaagaccatttctgcctagaaacaaagaatggagtggccattaagtgattgaggatgactgagaggaaaaatttcagaggcaaaagtaagttttagacgtaaatttcgaggtgtctactagatacctaactgaagatgtcacatgaagacgttaatataatctgatgtccttatgatgagatcaccaagatgagtactaagagaggaggcaagcagcccaaggtcaagctcgggggcacacctatgttttagcaaaatgcagggaaatgaagattgggccaacagcaagacagagaaggagcagccagtaaaggagaaacgtcaaagcaagtgtagtattttgcaagccaactgaagagtgcttcaaggtcaaatgctggctgctgattagatttaacaatgtggaaatctttgctgccttttactaagagtaacagagaggagacgaactctaatcacctatcagatgacctaaccaagtgtccaaacttaacagcctggaaaagccgtaactgttgtgatgcaatatggagaccatagcatcaccttgcactcttgcacaacaagtttaacccgaaacttgcgaaaactttagacctttcagtttacagaaagttcaaagggatatcagaagttaaaattaatgacagtacaaagaaaaactcaacaagacaacaggcctagtatttccagaaagtaggaatcttaattgaatcgtgtttgggggatgagggtagctatttaaaaaagagacacatggaaaaatctgaaataaggactcgatgttaaattagggaagtattttaagtgggaaagtcaacttttctgtttgaatttcttttcctaataaaacaagttggtgaaaaaaaaggaaggggtaataaactggaggaagtttagaaaactgagttttgcttttataaaggggagcactaaaataatcactagcaagggatataggatcaaaagattttttaataacatgcttattatgcttttggaaatgatttagtagagaaagaaaatagatgcagtagagagaggagaggactgctggagctgtatctttgcctgagacataggtttgcatctcgtgctccttacctggggcaaatgcaggagcaagagaattgtgggagccatgtatccatgagtagacatagactattcgggtgcttttgtagaatattcatttaataccaattactgtaagagt

SEQ ID NO: 46959 - DNA, 2788 bp, Homo sapiens
taaaaactcactacaactctaaaacagtatgtccttaaattagaccaaatatttaatagcaaaaatggtagcttgcatattcgagggtcactccatggatttagaaaatatttttaaatgtgacaaaaaaaaaaaaacactaaagtcagtttcaaatggaagtcaccaaatacagaggtatatacttcggttttttaagctactgataacgagacatttaaatcaagctatggaaaggctttgtctaaagggtgatattattactaaaggctcacacagaaatctttgcatgctacacacaaaggaaacatttacacttctagtccacaaaagcctatcctaggattgtgccaggggcacacaaggatttcaaagtacagaaaaaactgggcatacacatgccctacaaagcagccaaaagacattccccagtctctctcaggaaatgtttcaagatgaaaagcaaaagtctgaagtcccttggaatcttgggttgatttcttcattattctcaaggctaggttgttttcccccagcatactttgttgggcaaaaataaaacatttccaaataaaagcaactcctcagccccaattttcaatgcaatatgcttattaaaagttcaacatttctcaaggtctagacttatagtgtgatcatattacagtactcgggaagagcattttctttgttgttgaccctgctagggaaacaggtcttgactcagccaaagtggcgttcttgtgggtgattaatgacaggcctagatctcgccctagtgacatccatcccccaccccccacccccactatactaaaatcagccgtgtctgaactgaaggaggggctgtagcctcgcctcaaaccacccagtcccagagttaatagctgcaaccaatcgattacggcaagcacacatccagattggggtgaaatgtgaccctttcgcctaaatttacgaataatatcgtcctctctgatcatttccgctggggctccagcgactacggaaacaattccaatcattcggcccaaagaaaaagatgtccctgttctacccaatacgggcaaggcaaagcccctacccacctccaaacactatccccttgacatcagcccatttctattgtgtcttattaggtcctcgggctacgaggacctagtgaaaaacgtggctgccctactactttgctaagaacaagaaccacacagtccggcacccccaccccaggggccgcatcccacaccccaggacccctgttcccagttctctccactaccccggcggccgcggggccgggtcccacctgtggtgaggcgggaggagacgtcgccgaagggggatggctccattcggagatacttctgcggcgaggcggccgcagcggagaaggaggcggcggtggccgcggccgccgacaacggggaggcagcggccgaggtgggcgccgacaatggcgcacatcgcctgcgcttcggggacgccgggctcaacagcgggtcgaaatccagagtccttttcagagtggctccgcacgccatggccgggggcagctgaggcgccgggctcgggtggggtcggggacgggtgacgaaagaagagggtgagggaaggggtgaagagcgggaactcgaggagagcctacccgacgggctcaggagccaagcgggtcgcggagcgccggctgtggaaaggagagccgctgccgccgctgcctccgcggcaggggcagtggccagggacggcccgggtgagagcgggaggggcggtggcgggcagaagcacacgccagtcgcgtcaggggggttcttccgcctcctcaggcgcggctcccccgagagaggctccggccgcccccgccgtccgctcgagctttgcgccgcgcctgaggcgcttctgtgctgagactagatcctttctgaagtcgaaaacagcaccgtggggtgtgaggctggaacgcggctcctaatacgcccgagtacggtcagtagcttgcgagcggcgatcgatgcagagagattgcgaggtagctgccgcagcaggaacccaagcgaacacgtccaaccgcttcccctccctcgtagaactctcccacccgccgccggccccaatatggcgtcaataacaacgccgccgattcaaatccggcggcctcagagcgcttgcgcacgggggcgggccaaaccggggatgcattttgggagttgtagtttttaggtaccgggaggaatcggcttgaaaggcgggaagggaggagtcacagaaactacgacttccgtcatgcaaggcgcgcgattccgagttccgggttggaatttaaatccccctacacagcttgagtgtaagaggaactaagcaaaagagaaaaaaagagaaggttctgagacagtgggagatgggaaagcgaacccgtggcaaaagcaggctaagcgacatagaaatcttttaagattctccgtatagttgctcccacagtgatttcagatctgggaaatataataaaccaatctctagtcaaagttagcttaatttcggtagcgacagtacccaaaacaagacctttcacatggagaggataggagataatgagattatgaaacctatttaggactggcagacagaacaacagtaatagtatcaggttacaggatccttgattcaactcgatgctctacccttcggaggtagctgcttcatccactaatgaaattctgtaaagccagctttgcttctgtaaatgaataggacttgaacgacttacagaatcaaattgttttgcgttgggtaa

SEQ ID NO: 46960 - DNA, 1728 bp, Homo sapiens
acttgagtaggttgagaaattaagatcctcaccaggataattgttacttttctaagtgtttccctttggatccttcctttcttcataggaacatactaaacgttcaatgccacaatggatttcaatggggaaaaactaatcttgctttgtagacaactttacaggaatgcctcagtttcatacactgcaggatagttgtattaatttggcatagatagaaatttcaattaacatagtcttttttctttatttgcagcagttcaccaacaatgcattttagagcattgctcaccctcagcattagaactgagtgaatcttctgttgaaatggaggcatctattcaccacattactttttcaagcctctaacaccttaacaggcaaacctcagaggaaggtctgctttcctcttcctttagaaatcccccctaagcaagaaacatttgctgaatgcctagctggggacttcaacattgttagcacatgtgagcagccttccaaaactgtttacagtaatggtaacgttggtaataatacaccattggacttactgcaaagacaattttttcaatgtttgttcatataaaacctgccaaattgtcgatattagagttggtcattccttacattatgagattcctaaaatgaaaatagcagtaatagatcctgagagctgtgaggtcattttgttcagtttacatattaaggacatgagtctttggaagattaggaaagttgtctatagtttcatgactacgaaatggcagattttttttttccaaaccccatgcatttttttttaatcacaaccgtgcatgcctctctcagccccatatctgccccagagatgtcaaacattccctcctccctacccatatactgccttggagactctaccccgctcctaacttggaagagagagtactacctgccatgtgactgtgccccatcagtctcagttactgacccaggagtagacatctgactcaaactgggttgatcgaattctctcccaggaatttggaatagggacaaagaggctgagtcatttagctgtgtggagccaagctgcaaggtcatgcccagctggcctgccacagcaggccaaaacctcatgctagccacagtgaagggaagctgagaaaccatgagtcagcagaaaaagctcatctgcaaacaaaagagcacaaagatggggccgactgatactcagagtcaaatagagaggccatgtacctcaaaaggcagaggagagagagagagagaaataaaatctgcataatccccttcttggccctataatgcccagcagctgtatctccagcgctggcttactgtgacccccataataacctctgcctttcaatcaaccctctttttatttgagttagtggaattctgttccttgcatgcaaattcttcctaagacacttcacaattcatattgaatatattttggggtagaaagactattctgctctttatgacgattatggaaattgaggttttatctcaaaacccacaacaggctgagcagctttcggcattctcgccactaattatccagactccggagactgagctttcaaggtgagtggttttcagaactgcaaatgagagccagccccattctgggtctctttccccaaggatatcttagagatattcagttcaggaagagaggtcttattgtagtatgtagttgccatcttgggaacatatgtcagg

SEQ ID NO: 46961 - DNA, 2961 bp, Homo sapiens
gtcaatgtgaaaccttaacaatgcattaattataaagctcaagcagttctgagataagatgattttggtttatggggatacaataaatttgagtctgcagcatatgaaagaattttcccagatattgcgctttctttttcatttttctcattttaatcaatagaatgtaaggataaagtacaaaatgtatggaaagaataaaactttcctgcgtcctcctgactataaaaaggtgagtgaatcatctgcttaaacaccaacccagtcattttatctcctgtgtccttgaatgagaagctgggctgggcacccctccagctggtaagaggatctttgagtcgcatgatagaagggagaagtctgaacctgcagctctctctttctcttccctctggtttctggcaggctttctgcgcagagaccatcctctgtcatgattgtgcacacacatttccagtgcaggtcccctttgccccattactgttctgatcagaaccctgagcctgtgtggagatgcctgtaaggacaggcaggtctggctcattacaaagaaacaggatctttaggcttcctgggaatggttcacacagttgggtgggctctgagatcaaggtgtctgcatgattcctggaaagagatgcagagtaggcatccctaacctgggccaggtgcctcaaatcataagattttaggacaggaattgtgtgctctggttcttgagaagaaccagaagagtgagaaaggatgcagtgatgcacaccaacacctccacaagggaaacacgtgaatgtgcctgtccttaggacagggcttagccgggccccccgcgcaaaagaagttcagcagcatgggtagtggaaatcagacaagcagccctgccctgcatgacagacagcccaggctctccatcagaagctgcaaaagtcctaatcactttccccacaaagtggacatggaagtccttcttttttttttttttttttttactttttctttttcaaattattctttcttttttgagacagggtcacactctgtggcccaggctggagtgcagtggtgcaatcatggcttactgtagccttgacctcctggactcaggtgatcctcctacctcagcctcctgagtggctgggactacaggtgtgcatcaccatgcccagcttttttttttgtattttttagtagaaatgaggtttcaccatgttgcccaggctggtgtcaaacttatgggctcaagtaatccacccacctcatcctcccaaactactgctgggattacaggtgtgagccaccttgcattttcttttttgcctttttttttttttttttttttttttgagatagggtctcactctgtcgcccaggctacagtgcagtagcatgatttcagctcactgcagcctcagcctcctgggtctaagtgatcctcccacctcagcagcctggtatctaggaccataggtgtgtgtcaccatgcccggctaattttttttatttttttgtaatgacagggatctccttgtgttgcccaggttggtctcacactcctcagctcaagcgatcatctcactttggcctcccaaagtgctaggattcagggatgagcccactgcacctggccgaagtcctttctacttcagatttccatcatgggtaactgtgaaatcagaaaggaattgaaatgaagaaaactctgtggcttccttggtgaagtaaaccagtttgggctagagagaggtgagcagccaatgttacagtaggaacaatacttcctgtatcctcttctgaatcattgcgtaataggtttctgacatgtagaaagccctgaagaaacatagcagggaaggaagtgaatgagccaactgcattggctcagtgcccgcggaacaccctacttcaaggataaaattgcacctctgctgccaacagttcaggcaagggaacctagacaaataatgcttggaattcaacagaagaacaagccaaaagaggtctaggcattttaaaaaatgacttctaagattgctcttttgcttggcttgtttgcgtgcttgctttagttcaggtgatgagaatagagagtaaataacccacctccttattctaagtagcatctgtttaaatgacacagagggatgtcatccaggtaaaagggtgtggagccctgctacctcatacttccctcctggctaaatgaaaagccaagggctgctataaaaagtaatttgtgtccaactctttggggagggaagtattctcatactgaaaatgtcatactccaaattttaacctagtgctctttcctgctcttgctcataaagtgattcacatgacttttagtagctttagcttcttcagaatggaggaacaagcaaccagtgatcacctgatggaattacacaacatggtttattttggagaaaacagaagtcagagtgaggatcatttatttcatcagcttcataatcacaaaagttacccaggctaaaaatgatctttagtcactctgccttttatgcatccccctctggcttccaaagtctcatacttaattttttttttttttgaaagctacttttaacttaaaaattcaggctgggtgctgtggctcacacctgtaatcccagcactttgagaggccaaggcgtccggatcacccgaggttgggagttcgagaccagcctgaccaacatggagaatccctgtctctactaaaaatacaaagttagccaggcgtggtggcacatgcctgtaatcccagctacttgggaggctgaggcaggagaattgcttgaacccgggaggcagagggtgcggtgagctgagatcatgccaggcactccagcctgggcaacaagagcgaatctctgtctcaaaaaaaaaaaaaaaaaaaaaatcagctaggcacagtggctcacacttgtaatcccaacactttgggaggctgaggcaggagga

SEQ ID NO: 46962 - DNA, 1084 bp, Homo sapiens
cttactgtggcgaagtttctccatttgtaaaatgtagcaggattggtaatactgatttccttatcttagcgtgagttaagattaattatatacattttgcagcatactttgaaagtatgtgattaggtgctaaaatttgtgtttgtacagatttaagtatttttgtagcacatacccatttaaatttaaggagtatttttatttttctaatggcttctttaaaatattttaaaatcagttgcataattctgacaagtgggatcttctgaataaatctcaattctaatttccctttcccatgattgtaaactgtgggacatttgtaataatctttgctgagtcagtttccttgggggagggatttgtttcatttcaaaacatcctaacaaaactccagcccattgacaagcagtaacttgcaaactagggtcgttgcccagggagcagggagggatcacagacacaggcaggaggagaagggttatggtgttggaaaatgctacctggaggttgccaaagatggaccaggtgggaaaactgcacagcaattcacataccttgagcaaatccagcaggcagtaggaaacaataaaaaaggaggaatcctctccagggacaggataaaggatgggtaaaagcaaagctgggaggattggttaataaagattcgaactttcatctggactcatgttttcctgctttgttcaataaagtaattattaagcctctgatgagtgtggagaggtggagaggctcaacagaaagcaatgagtcactcctgggagctgttggggaaggtcatctttgagacagtaggaacctgggaggggcaatctcatgatcctgtagagaattgcaacaagttttgcaactgccccacatctccccaacccttgggtttctatggtattgctctgtattccagctagtgtcaccaaatgattagcctggttctttgttaacctttatcctaaccttcaagtctgctaaagtgaagatttgtttaaggctagaggcaaagacataaaatttctctagacttcccaaataccatttaacttttctaaaatatttgaatgtgact

SEQ ID NO: 46963 - DNA, 414 bp, Homo sapiens
cccgaagtgctgggattagaggcatgagccactgcttgcagccctgaaaatcattcttactgctatgagcacataacttgccttactgacattgacaagttgtgcaagccttcccaatctttcctacagtgtggcatgccgagaaaatgataacatttgtagacaaacttgggtaacagatgaggttacttacggatagcgctctgtccagctgccctgaggactgaacattgtccagggcacatttctaaggtgggctgggtgttgttgaccatgagtagcttcattcaatagatttttattcatcactgtgctagccctagttatataatggtggacagaactcatttcctgccccccaggagctgtattcccttagtacacatgttaacagaaatgtcgaggtggcaaaat

SEQ ID NO: 46964 - DNA, 720 bp, Homo sapiens
ggaagcctggtgtggtgactgaagatcaggaactctgagagctaggtcaggctccattattaccagccctgtgaccttgggcaagtcacactggggtctgagtcttggtttccttctctatgttatgagcataaaccactagactagaagtattggtgatattggggtgatgcagatttgcagggacacacacacacataaatcacagtgtcaaaatgggagcagaaaccattttatgactagctggactagtgcctgtaccctgtagtaatctggactaccgcttgttgcttaagttcaggtaaacttaatgggtcttctccttttgcttgaaattcaactgttactgccagccagtccctggagaccagagcattcagagttcacacacacacaaaagaaagctagagaaatgccagcccactctcccaatccagacattgcgcaagcttgccacacaaggctgggtgcaacaggtcaaagggagaggattcgtgtaatgcacatgccttttaaaacacagttatctggatcaccagtaagcacagtccagtcagaatggaatttggagacagaggcaggagatggaggggtaggagatttccctgctaccaactgatttcaaagttctatggtggtaatcagatcagacagtgaggtgaaatcccttttctgaactgtaaagttctctagagatatcataggttatattgttattat

SEQ ID NO: 46965 - DNA, 1449 bp, Homo sapiens
acccaggttcaaattttgactctactgctccctagttgtgtgaccttgggcgagttatttaactgctctaagccttatttttaaaatggggataataacagaaacatgcttgcaagtgaggattgagagatttcaattaggttaagtaagtaagacactcagcacagtgacagtgcatattaactagcactcaatgaaagttacacagtatagccattgtccctaaaactattcaaaaaatctcagatctgtttaagaaagaatgctgctctagtgtctaagtggggacttaattcaaggtattttctctacacagttgtaaagaaaagtcttccattgggtggaatttgactaaatcttctctaagttttcttttttcattctaggactctgcaatgcaattgaatacaggaacttttgcccctttggcagtctctatagaatgaacactgtgtgagcagatgatgattatatacttagtaatttcattgtaattcaaagttcactggtcaggttcatgcctacaattttttatttcagttgtcctcagccgacctgattctcattatctgtgaagattcccatggaatgattcatcagactttgcaacaaaactcctaaaggtcagccagttggtctaggagaaaataagattcctgtgctgaattttattttgcctgcaaaagtgccatccttagtggcttcttgctgttgaggttcaaagtcctccccaagtgtgtcctaaattatgcaaccatgtttgcttccctctgcttccttctaactgttcactcaaggctccagaacatgccttcctactgttccttctgtgaggaatagaaccatcctcctcttcatctctctgttcttccctttaaagtctttcaaagggcagtgcaaattccctgcctgcccttgccttggcaaaacagatatctctctctcttctactccctccttctcttccctccctgtctcccacctgcctcctttccctccttttttctctgtctctctccttctctcttctcctctctccttcctttgaatctccatagcctctgtgatctgacccattcccttactgcttcagataacatgctttttattgttggaaaacctctttaatgtctatatgttatctcaactagactgtacattacctgaggaaggcactgtacttcttgaccttatcacggtctgagcatgtagaagaacttcaatatagatgttacttgatcaactcattacagaatacttccaattcagtgaaactatccactataggatccaaaaagaggaattattactgatattcaatgaaggctttttatgagctaggcactgttttaagtgctttaaaaagcattaatttgttgtctaaaagagttaactcactttatttaaatgtatacttgccacgagccaggtgctttgcctatgtgtctc

SEQ ID NO: 46966 - DNA, 1396 bp, Homo sapiens
taactgaatccaacagcatatttaaaaggtaatacatcactttcaagtggctttcataccagagatgcagggttggtttaacatatgcaagttaataaatgtgatacaccacataaacagaattaaaaacaaaaaccatatcaatggatccagaaaaagcatttgacaaaatctagcattccttgtgattacaaccctaggcaaaatcggcatagaggaaacacacctttaaggaagtagaccacctctcccattgtctcctatttcatgagaaagcaaaaggttaaaagaagaagtgagatcaatagccagatggcttggtgccaagaaccgtgcctggtagttaaacatcaactcctgacctaaccgcttgtggattccagacattgtatgaggaagacttctgaaactttctgttctgttctgctagcccccatcactgatgcatgtagctctcagtcacgtagcccccacttgcacaatgtatcatgaccctttcacatggacccctcagagttgtaagcccttaaaagggacaggaatctttactttggggagctcagatcatgagatgcgagtctaccaatgctcccagctgattaaagcctcttccttcataaaaccagtgtccgagaggttttgtctgcaaccattcctgctacatttcttggttccctgacctggaagcgaggtgattagtggacagttgaggcagcctcttaggcggcttaggcctgccctgtggagcatccctggggaggactccggcgagcttaagcaaagcagatcctgggagcactctcgcgtaggcaattgccctggtcaaatgccttgccacagcagtgtgcggcagacccccgtggagaattaacacagcggttgaacaccgggaaggaatcggcgattggagtctggacatctggaacatggtaagactggccttggaactggcccactccatctgagtggaagtgtgggctgatcacccacagcatggctttcttggcactttggttttggttttcattttgactagatttgaactgttttggtttagatttcactattgacttttggatttgaactgttctggctatgatttcggctctgacttggctcaaattgcttgatgaatgagtaattccttatccatactttgattttagtgtgaattgcttggtgagtgagtgaccttttgcccctttttcccttccccctttgtggtaagagtgttgttttgtctcctgagagaggaaaatgtgtaaaatacaaagtaagcctaccctgttaggaactatgttaaagaatttcaagaaaggattcaatggggactatggaattgctatgacacctggaaagcttaaggctttatgtgagatagactatccagcattag

SEQ ID NO: 46967 - DNA, 697 bp, Homo sapiens
cagtctagtcacatttcaagtgctcaacagctacacatcattagtggctaccatattggaaagtacaaacagaattaagaaactattttaactctatctttcagtcagcttgccatttctctattatatgtttccctcattcagccttgtactgttacagaaatgagcatatacaaagaagttatgctagaaactgtaagtagtgtattgtttgtatataaacaaatgcaattgaaattgcttaatgattctttgaaagattttgtttttctcttagcaaggctaaacatattttttgaaatgtatgtataattattgatttgttaagcaagttgctccacaaagtcaatacagaggtgaactttggagctgggtgcagtagagtgcacctatagtcccagctactccggaagctgaggctggaggatccctgggcaacatagcaagtccctgtctctcaaacaaacaaacaaaaaatagtgaatttctattcaaccagtgtgcacaccacatttggacttccaaaagggtctgatctaaaagtgtaaggttttatcatacatatgtatttaaatatactgtatgttgtctagcagttaagacaattgcctttatctgcctaaaatcctaagtagttcttaaaagaaatcatgactaatggacttattatactaaagaaagggaacgaaatataaca

SEQ ID NO: 46968 - DNA, 1301 bp, Homo sapiens
aaaaatacaactaaactgcataaatgactagtctggatgtcatgagggagaaaaagtagagagatttaaaaaaaaggaaaaggctaaatagttctaatttgaacattaagggaaaatcatttatttgtaaaataaaatttaagattttcaaataaagagtaatatgagaaattgcaaaaatataccctctgtttaaataggtgtgttgaggaattcactttaccaaagagagggcctggcctttgccctcagctactgggaaacgatctctaggcccaggggatatcctccttgataagagtacctggagtcactggagagtctaacaatgtgactcatgatgggagcttcctggaataccctgtcagctctgatctccaaagaaactagaaactaaatgtattagcctgaacttttgggaggagataaagactaaaggtcagacacagggacagtatgtgaacaaaatccagtataaactgtggacaccaaaagcttgcattaacttccctggactgtcatacatcatagccaggaagaggtaacagcatccatgactccaccaggaaagcacaaccagaagctttgcttttgagcccctcccagattctgcccacgtgtctctcctttggctggttttagtatgtatcctttcattataataaaactataattcttagtgctctgagttttgtgggtcataccagtgaattatcaaatctgagggagtcagtggggacctcagtatctaaagccagcaagtctgaagtaaaggaggccctagggacccccaaacttgaggctggtatctgaagcaaggaccatgcggttggcctaaacgtattccaataggtttttgtcactgtatttctctagttgataccatttcagctgtcctcaaagtcacacccatcagcaggaaagcttatgacttcccctgtgaggcattattgccaagaagctgttccggaagtgacagactgtagaatgatgcgatagttgccttctctgttaatgagtaaagtgacccagttagccatcacagatgagacctttagcttcactttaatagacattgatgtctccggatgaggacaacccacactgggataccaaatggcattttagctgtaaactaaacatgttctgcagcctaataaagtaacaggaaaatggaagtgagactttcagaaataaactttactttccacaatataaaaaagtataacatttccctattctttgtatcaattttaagctaggacagaaagagaaagctcaaaatcatataaaaataagac

SEQ ID NO: 46969 - DNA, 638 bp, Homo sapiens
actgtctttctagtgaaaaactacataacaagttgttccacataattgtttcaaatccctaaaaaatagttctgatattacacattagcaaatatttctaagcagtactgatttgactaatgaaattatactatctaaacacattttcttaaatgctgaactctgaattatgacagcacaacctgtgaaattcattttttaaaaatgaacacaaaccaaaggaatctggcttttgcccaacttttatactgtatttacaatttagaaaatgttctcataagagaacacagtttcagttaatagacttccaccgtggacagagcagatggttaaatattaactttatctttacccaacctattggacagggcacagtagtacacaggctcttgtaggtacccccttaatatccctgctgccaaaacagacacaaaaggcaagcagtgaacagtcgaaagatcatagcggcagaggtcaaccaaaattcccatgccaagcaggtgttacacaaaatcataataaaagtaggatgattactctgtatttgttgaatgaaaaagatagccactcaatagtgctaggattacttacagctaatatcatatccaaagactgacaccaaattaagcagactagag

SEQ ID NO: 46970 - DNA, 1378 bp, Homo sapiens
agatcacgccactgcactccagcctggacgacagagagagactatgtctcaaatatatacattataaatatatatatactttaataaataaaaaaattagccgggtgcggtggcaggagcatgtagtcccagctacttgggaggctgaggtgggaggatccccagcccgagcaagagaccctgtctcacaagaaaataaaaataaaaaactaacaaaaacaccctccagattcccagtctcaatgtgaccccatttcaccgctgggaaccgccccttccctccttaaccctcctccatctcaatactgatattcatcccttctttcgaggggaaggttgaaccctaacaggttcgcaaactactaagactcaaagtacgcccactgtattcctggatcctcacctcctgccaccaacctcctgtctaccttcacattcgcacagttagccttgcaggaatagtaacaagtgccccccatccgccgaccatcccctcccgttcatgttcccattcatccacgaagcgtaatccgacggagcatatcccgctcctgaaataccactaatgggcacagaaccaccaaaagctgagctcctcagtcggcccacccccgggcacgttggagtgtggggattcgaacgccccccagtccaggttacctgccaccggctggccgcgccggggacagttcagccaccgcggcgggatcttgttgtgagccatgtcttggggctgcgcagagctgccctccctcaccaacgttcaccgcgcctttggagccgcctccccgtggtccggtgcacaccggggtccgagacacccgaatcgcagccgtaatctgaattccaacctctccgatccgggtaacgtcaggggcggcgcgccactttcattcaggatcaactccacagctccaggagaacccacaatgcaccgcaacttccgcccccgaaagccccgccccctttccgaggtcagagggaaagaagaggaagctcagcggaaggatagcaaagagttaaggacgcgacgaatgggaggagcgggccttctctcgccccactcggcaccgccccgccccgccccgtcccgctccacggacgcgcccggacgctactggttcgcctttgcgcatgtgcaattgccctcgtaccgaactccgcaggacgaagcgtgtatttttttcccatccagacaacctagagaaacccaaaaaagagggaagccaagcgcctttccatgcgtagattgcccgccacttccgttaaggcatctattttactgatgaaaagaggccttctgagcgttaccacagctcaagcttggcgtcccagccggatctaggtttgatttgcaattagggaaagttgttcaagg

SEQ ID NO: 46971 - DNA, 1301 bp, Homo sapiens
aatatcattgactcacttctagaatggatatcttaaattgggccctagttttaggctcatataaagcacattcaagtctagtccattcaatctattcaaacatctactaaactttctctgtgtgaggaatttcaggagatacaaagattaaggcacattcttgaaccataaaaagcctattattagtagggagggcttactttaattattcatgtattggttcacttaaaaatatagtttagcaccttgctatgtgccaaacactatcctaggtagacaagaacaacaatgaacaagacaagggccctgacctcaaggactttacttggccagtatagaatacgggaaaaatagtggggccgctgcccaagttaccaaagaatcacagtgaagggtatctatcccaatcctgaagagtcaaaacacagttcccaggaggaagggacatttaagctgggccaagttagggtaggggaagggccataaatgcaaaggcctaggggctatggtgagctggtaaatgtttaataactctctagagagaagcaagaatgccctaatttgtagattttgccagtttccttgatttactcccaccatgacctcactgaacatgcaattgggaagagacatgcaccatacgctctcacactcccacacaaatcaactctagaacaccactgcttacagataaaagtatggtacttctgggcaatgtcaagcccatctatagaatgggaactgtgtgtgtgtgtgtgtttggggcagtgagcaggggagggagtggaggtagaaaagggaatggtgggagggaaggctagggagggagggaacatgcccacatgccactttaaagagtttggactttatctggggctgtgcaacttcatcaagtaaacatgagtcactgaggtaaatatggagtcattgaatggttttaaggaagggggtgaccttgttgagagtgatacctattgtttacagcaatagcctatttttcccttctagagaaagaggattttgtctgttttcatcccagccatatctccagtccttagaacacagcctgccataacgtgacctctccacaagaaacaagagactgcttccagtgctctggagtatgaatgagaagtcatgaagtcaacctagagagtggagacagtgagtgagataatatctatagcaaagggagcaaggaactaaagcagccactgtcagctaacttgaagtcaaagggttgattcagggattttttaatataaaagaaatgtggccaggcatggtgtctcatgcctgta

SEQ ID NO: 46972 - DNA, 2883 bp, Homo sapiens
tgagaaagttgattcgtagtttgcaccagcaggctgtcatggagacaggacagctatgcacttctcagaacaattgggagaggccattctgaatactgccaagtcctgtgttttgttatgcagggtgaaggaactggtaccttttgcctgtggcgtttgcagcatcttttcacctccacccttttgataatcatgtgacatgccaaggaactggtttttccacctataggccagtggttcttccctctttttgagacacaggcctttttgagagtgtaatgaaaactacaggccctctcctgggaaatagatgtattcatgtcattcatctacactactttagagagttcatttgtccatatgtctgctaaatatctgtggaccataggttaaggacctctcttgcagaaacaatgcatcattgaagggttttaagaaaggaagtagccagtcactgcagaagtgtggtggaagatggatttggaagttgagactaaaggcaagaataccatccatgagaacacagcaaaagtctgaaggtcaaattgacaagagcctgaactaaagcagcgtacatggaaaaggagaggaggtgacgactagagagaaagcttatgtaggtctttgtgatggagtgtgtggagggtgggagaagacagcctgagggagaggatggggttcaggaatcctcctttgtcttcactcaccatggttgaagctgtggactgccagtagagtaagctctaacctacataaagtttaggtctccaccatgccatctccccacaagtacagcaaccgcaaatttctaatctggtgaatgtgtatgatcaataatgttaaacaatgaaaataaccacagaatcaatttattaaaagttctggtcctctggaagtaccctctgtaataaatctcctgtgccaactttttttttaaaaaaagcaagactaggaacaatttctcagaaagtatcattttgtattacaacagaaatctattcttttcataatattagttgaagtagccacctagaaacaatcaattttagcagaacatagagtacttctacaaagatttatcaccaatatagatttccttttttaacttaatgactcaccagcaaaaacctttaaaactggaaggctctgtgctttgtgagattgccaaagttagtcactgatttattcccctaagtgtaatttggaagaacctgctatgtaaatctgaatactgtaaaccatgcaccatgaatcttttaaaatctagttttcctattaatggtgcctaaatgcttaagagcagactcacaaattaggagggggaagggagccctctgggaccttttctgtgagaaacttttgtgctacaatttctactgaacctgcatttggaggatcagcagcagattcagcaggaatggaagcagagaactgggtcctttggcagacagacctaactttccaaccacaataaagactgatgtcttaaggttggataaatactcctgaaattattgagtttatcacagaaaagggaccctgaaaagaaaagtcattcttgagttaaagctacaaacaactgtgaattgtaataagtgttctaaaggaaatgtgcacagtactatgatcatgtcttttttcctgtgaaaatgtctgcaatgggattgacttggtctaggagtgttagaggagttttcttgtttttttttttccaggcagggtctggctctagcacccaggctggagtgcagtggtgtgatttcggctcgctgcagcctccaactccggagctcaatcaatcctcccacctcagcctcctgagtagctgggattaccagtgcatgccaccatgcccagctagttttgtatgttttgtagagacggggtctttccatgttgcccaggctggtcttgaactcctggactcaagagatcctcccaccttggcctcccaaagtgctgggattacacgtgtgagccactgtgcccggccagaggagttttcttgaagtgactctttcccttatctaatattgcacaacaaactaccctaaaacataatagcacaaagtaacaagcttaaagaagacaaaagagatatagagaggaaccactttatttgcacacaattttgtaattcgggctgggctcagatggtcagtttctctggtcttgtcagtggtcactcaggaggctgcatccagctggcacttaggctaggccacagctgggattctctcatgtaatctttccatttggtctctccagcaggataatcagacctttaatatgttggctcaagccttccaagagcacaaaaatagaagctgccagcctttcctaaggcttaggcttggaactgacacagcatcatatctgctgaattccactggttaaatcagtccacccagagttcaggagaggggactatcacacaagggcatgaatactggaagatggaattcatcaggggccaccttgtaacaagctattagaatgaccttaggcagcaacctggaagatgagtaagagttaactgggcaaagagggaggaagaatgttccaggcagggcagtagtatatgcaaagcagttatggcagaggatccccaggcatttctaagtgactgaaagaaagccaagtttgctggagcacagagatcaagggaacagtgggtacaggcaggaaggggccagaccatgtggtgccaccgcattctttaggaaactttcaaatgcaagtggtagaatcccaatgcaaaccaactcaagcaaaaatataaacaaaccaaaacaagataaacaaaaataaaaagagaaagagaatttatgcacttatattcctggaaagtccagggcccagtgggttgacttcaagtatggc

SEQ ID NO: 46973 - DNA, 4670 bp, Homo sapiens
tacctacatataaaatatttcttacctactcattactttacggtttttcctttttgtgttttatttaaggctttctctaactccaagatcacaaacataggatcttagtgtgaggtaggaattttattttattttattttccaaatgactagacaattatcttgatgctatttattgaatacttcatcttttctctgctgttttgaaatacttttttagaatagtaaattcccatataaatggcaaatcttcagatccacttacatagaagtggatctgaaaccaagagaaggaggaagtccatgaggagagaattggaattggttccctgaactgtctacccatgggaatttccagcacaggaaagcaggggactttctaaagcatcagacaaataaactggcagctccatgccctaataacgttaaataattgaacaattgtttatatcattttgcctttttctttccaaaacctgtaaaacaatgttatctgctttggcacagcaaattaaggtgaaattatacaaagtgaaaatcagctatgtgtcaagtataggcctgtactaaggaagcagggctgctacaaatgtaattataagatcctagactcgccgggtgtggtggctcacacctgtaatcccagcactttgggaggccgaagcgggtggatcatgaggtcaagaaatcgagaccatcctagccaacatggtgaaacctcgcctctactaaaaatacaaaaaagccgggcgtggtggcgggtgcctgtagtcccagctactcgggaggctgaggcaggagaatcccttgaaccagggaggtggaggttgcagtgagttgagatcacgccactgcactccagcctgggtgacagagcaagactcctgtctcaaaaaaaaaattcctagaatttaattttccctcttcaatttattccccgtattgtagtcagaatgattttttggcaacatgccaatctgaccaggtgtggtggctcacacctgtaatcccagtacttgaatcacttgaacctgggaggcagagtttgtggtgagcccagaatgtgccactgcactccagcgtggacaacagaaaaagactgcctcaaaaaaaaaaaaaaaaatatatatatatatgagtggcatgatcagactgttgtttaagaaagataatggcagcagaattttggaggtaaatgacagagaagtaaattgaacgacagggagacctgctgtgaggttattataaagatgccaataagacatgatggaagccggaactaaagcctcggggagggcatagagaggagggccagactgcagagacacagagaggttgagtctactggatcttgctgacactcttagcttgggcaatgagggaagtcaagagggaagcgttaagaatgactcaagtttctggcaagggcaactgggtgtctgtaatgaagaagagaaatagacatttcatgtattaggctgtaagagaagccctctgttttgactgatgacgtaaatgagggctttccactttctgaaaaactgaactcttctgatgcaatgagacaacctccacatcatagtcagccatggtccgttgggttcaactcagtcccaatgccctgacaccctcgttacctgatctgatcctactgccccaacctaatggaactgaaaacagtggtgtcaacaaactaaactgcccaccaactgtgacatattcaaagcctgcataagcttgctctgtgaatggagaacacattctaaaaggatcccaaaagaaaataaagccttttctgtcttcccagggaggttttaggctaaggaaacaaaataaacaccacacgaaatagtgggcaaaggtacaagagagtttaaggttaaatgctaaattatgaagcaaattccaatcagaggacagtgatggtattgttactctagaacagccaggaaagataatcatctgtgttgaccatctactgccaaaccaccatccgtaagtcacacagttggtaagtggcagagccagtgcgtgaagttgggagagactgtctcagatcttcaggaaggcgaaatgtgagctgagacaggaaggtgcccggtgtccagcctggatgggctgggagtgcagctgggagcttggagcatcctgggaggagaagcagagcaacaggactggcacgtgatattaatcatcccggaatggaggccttctgactggagacttgcagtgtacctaccactgctgggtgttttcagcatttcagtttggcaataaacataaaaagtctagtaacacaggcgtaagcctggaatgttcagtgactggtcactgtcaggaataattattacaaaagagcagctgagaagacatgactcagcacgccccacctcagaacactccggtcccacctaagggctttccaaagtccgcaggaaccaggccagctgagtattcacatagccgctctgttcaagtcacactccagatccgtagtgttattggtgagaacaatgactaactagcaggatgatttacatgcatgcgagttccaacttggcctttttcctgtcagcaaaatttactactatcttctagctgtcttcctacgtcaggactaaaaatggttacactcctagcagtagagcatatccagccaactgacaagcaaagaaagattaaggacaagtacatagacaacatggggtggactttatcagaaaggacaaggcagatacagtgctggccaaggagtgttgcaagtaaggaatttcctggagccttatgcaaactccagtaatcccaggcaatgatgcagtttcacttctgtttcatattaacgagtactagaaacacataatgagtgacctagttcttttccagtggattttccttttattagaactatgctctggtaggttacttaattatttaaaaacatcaacactgagcactattttaagctagaccttgactttaaatttcaaatatgtcattatagtatttaataaatataaattcagttttttaaacagtttttgtggttttttacattccatgaaattcacccatttgaagtgcacaatcaaaaattttaagtacattcacagagttgcacaatcatcaccacaataagaattcatttttgagctttttatttcagtttttcaatagatgataatttcaagaggaaatgataggccacaaaaagtctgtaactgggggatgaagcaagatggcagaataaaagtccccaccacttatcccctgccgcaggaagaccaaatttaataactatctgcataaaaaagcaccatcattggccgggcacggtggcttgtgcctgtaatctcagcactttgggaggccaaggcgggcggatcacaaggtcaggagatcgagatcatcctggctaacatggtgaaaccccgtttctactaaaaaatacaaaaaattagccgggcgtggtggcaggcacctgtagccccagctacttgggaggctgaggcaggagaatggcatgaacctgagaggcggagcttgcagtgagtcgagatcatgccactgcactccagcctgggcaaaaacaccgtcataaccaaaaatcaggtgagcactcacagtacctggctttaacttcatctcactgaaagaggcactgaagagggtataaaagacagccctgaattgccaacaccacccacccctcatcccctcctgcacccccacagcagctgttgcgtggcacagagaaatgtgtgcttgggagacagaaagcccagcattgtgagattttgcattgaactcagtgatgccctgtcacaacagaaagaaaaaccagactgaattcagctgacactcacccacagaggcagcattcagaccagccctggccagaggggaaatcacccatcccggtggttggaacttgagttctggcgagcctcacactacaggctgaagtgctctggagccctaaatcaacttgaatgacagtctaggctgcaaggacttcaagccctagtgctgtgctgggctcggaactagtggacttggagagcacatgccccaatgagacatcagccagggcagctaaaggagtgcttatgccacccctcccccaaccccaggcagtgcagctcacagctccagaagagaacttttccttctgtttgacaagaggagagggaagaaaaggatgactttgcctttcatcttgtataccagctcagccacagtaggatagggcactggtcagagtcatgaggccctatttcaagccctagttcccagacaacatgtctagacacactctgggaccgaagggaaactactgccttgaagggaaagacccagtcctggcaggatccgtcacccactgactaaacagcccttgggccctggttagaaatttattcaaccagacacactcaatcatctttctcaagttcaaagtactacagatctctagggcaggggcaaaatgccagcagtctctttgctaaagcataacaagagtcacctttgctccagtacccaacaagtttctcatctccatctgagaccacctcagcctggactttattgtccatatcactaccagcactttggtcaaaaccattcaacaaatctctaggaagttccaaactttcctacatttttctatcttct

SEQ ID NO: 46974 - DNA, 1274 bp, Homo sapiens
acagaagggagctggattctcatacctacatctgcattcaatctattgagatgtgttttggttgaaatctgaccttatacagataggtgattggaaaagggaggacctcagagatcccagggtttctctgaccacgttctgaaactgctgtcctagagcaatagttgctgcaacaatgacaacaatcttctctgcaacacagccctcagccctccgggaaccccagattctaatattggcacagaatcccagcctccagcctctttgcttagaattgcacaattttccagtaatgtatgaaacagctggcagccttgcgcaggaaaactggatagaggtgagtccctgagggagtatgtttgtcctgggtaaaagcaagtggactagacatcctagaaaaggattgacacttgaaatcctagcattttgggagaccaagaagggaggattgcttgagcccaggagtttgagaccagcctgggcaacatagcaacaccctgtttctaaaaacaaacaaaccaaaaccccaagaaagtggggtgttgaggaaaagaaaacacatcatgcattctcaggaaggagagacaacagcttaagaagctcaggtacattaatgaacaaacatgtctcagtgcccaggctgaagaagaaacaatgaagctcagcctgctgggtgtgtgtggaaggagctggctctcagaaggggaaaagttggtgacataattatatatctacctctgtaacttcctgagtctagctggcagagccacagctttgcccacattcgttggggaactggtggaaatatagcagactcttaccaggtacagctgtaagatgagtaaatcctcagtatgttggagtggccttgtaaccatgggtagaaaggccttaggtaacaccttctggtttgtaagcccttccagccgtgggccagcacctttactacagccacgggccaaggacacctttactgtgtattttgcttacctgctttacagagaaaagatacagtcggtcagctgtcagtagccctagccaggccccaaataccactcaccttccttccatgacaagtagtccagctctgcgctgaaaaaatgagtgtatgtgactgctgctgcaacctgcaagagtcacattttagtaagcggataacaagtccaacctttgtgcttagaattttccaaagctttttctaagaaataaactatctctattgcacttcatcctatactaacttctgataccttttgcattaatgcctacattgc

SEQ ID NO: 46975 - DNA, 1064 bp, Homo sapiens
tgttcccctatcactcattctctttactaatcccctaaacagaatgctgctgcttcttcctcccacagcctttttgtctggatgatatataagtttctaaactcccctgtggagtaagtaatcactctgtgattctccccaggtaaaatttctatgccttttctccaattaatgtcttttgtgagctgatttttcagcaaaccttcagagggcaaagagcaagttttcccttggcccctgcagttcactggcttgtggacttccctatgggatgatctatctatctatctggctgggctctatggtttttgtttttgtttttgtttttgagatagggtttttagtctgtcacccaggctggagtgcagtggcacaatcatggttcactgcagcctcaacctcccaggctcaagtgatcctcccacctcagcctcctgaggactgcaggcccatacctctatgcccagctaattttttactctttgcaggggtaggggtcgcccaggctggtctccaactcctgggctcaagtgatcctctggctggactgtatcttaaagaacattagaaattaaagaatatgagtgtcaatatttaaactaatcacattatatgcacttgcatatgttaagaataactgtaatatgctaatttactagttaagctaaaatatcaccctcttctctcccctgaaactcaaaaagctaatgccatcattttagatatagcatttatagcaatgagtcatatttggctgtgaatcataatcaatgtctcaaataaaacttggcagaatatcagccacacaggttcatcctgagctttcctgtgaaggtggctgtgcttgttcttcagctctgaaatccaaacacacttctggtctttctctgtgtgttcaggaattttaaaaatgacataacttagggaatgtcagttttgtcttcttgtacaaaccttagatttttaaggatgaactaaaaacatgataaagataactcgctgggcgtgagggttcacgcctgtaatcccaggactttggaaggctgagacgggcagatcacttg

SEQ ID NO: 46976 - DNA, 792 bp, Homo sapiens
tttcttctcgcctctcctgaccctcatatttcctaccctgtctggtctcccagcttgaccaatgtcaccagttgggagggagggagggaaggaagaaaagaaggaagaaagggaggaagggagggagagaggaaggaaggaaggaattcagttttccaagagaagtcagagattcctagagttgccctaggattcttacttcctgaagttgccctggatttcttactttcattcctaaaaaaactccacctcataaaactactacattggcctggccaatcctctcaatgcttgtctgtccatagtttctgaaatggacctaagtgggtccttatagacaggtgtctcaccatcctggccagaagccatccagcacaggtctagtaaaagagttctgttgaatgtagatgatattgactaatcatccaattatcctgtctggaccaatccatattgaaccaatcagcttccctctctctggaatttgaactttaggtaaacagcaagctaggtggtggtgatagtagaagtagaaatacagaaaaagaacaaacagaaagagtagttgagtcttttagagtaaagctcaacaaacatctgctaagaagtaacaaataacctagtagttaaggctacattggatcttgaatcaattttgagtttccaaatgtcatttcaagtcggtcaggtactacatcataatttttgttccttccatgagttctgggtatgaaggttttcctggtatcttatgaggcctggtatgtggtcagtcttcttgtcttccttatg

SEQ ID NO: 46977 - DNA, 5555 bp, Homo sapiens
atcaagaccatcctggccaacaaggtgaaaccccgtctctactaaaaaatacagaaattagctgggcgtggcgggtgcctgtaatcccagctactagggaggctgaggcaggagaatctcttgaaccagggagacggaggttgcagtaagccgagatggcgccactgcactgcagcctggccacagagtgacacgccgtctcaaaaaaaaaaaaaaaaaaattaaaacttttgtcttgcagtacctggactggagatcaaattctgatgttaacttaccgtttgatctttgacaagtcctttagcctttctaagcctgtttccccagctgtaaaatgggaataaaatacagtactgtccctccaaaaagaagctgaggcaaaatcaggccaagcttgaggactgcaacccaggaccatagattcaagctgccctgaatatacactcggattagcaagttacaagtaggtttttaaaggaaaagaggcagctcctaaattgtttaccaatttacattaaaatatcgtgggctcttgactagctatacattgttctttgtatcttaaatttcagaaacttaaagataatgcgtaggcagctaatcaggaacaaaatgcctttaaacaattgccccaggcattagtagtgaaaggaagagaatgacagcctgcctacttcgcagagctgaggtctgatctatttttcttagtacctattcgtaagggttgttgtgaggttaaagtgagacaatctatgtaaagaacagttcctggaacataaatgcttgataaattatggccacaattcttttttgtggttgagcagtgcggggagatcgcgaaaaatttctatttacgcgcagctaacaaaatactctatgttgcagagctgtttcactttctccctttgagacgcaagccggcttgccgcctcctcaagtaaccaggcacaatgttctgatcccaaagtctcacaatccttcaagtatgaaatcagtaaaaactccaacttccatttatggatttacggagaactttttatacatcgaggggctaattcaatcagtaagtcactttgatttttactctgatcaccgagactaataagcagcgatgccgaaccaagtaaatgaaagaatcgtgagccatacttcagtagataaaatttaaatgtagactgattttcttcacgattgctagggaagaaatccttacagcgtacttagaaatctttgttttaaaatgataacgctgttatgttgggctgaaaataaaacggatacttccccaaggtcagcagcggaggaggcaaccgtggccttgccaaagtcatcccctcttcccagcccccgttcttcctgccgccctccccctgccccctcccttccccacccccatcaacaaactccgccgggacatttcagtaccaccactccctagcccggcgaagcgcaggggcgtgctggggaggagtaaagagggtggggcggaaacccaatttcattgttcgcgggaccgattcttcccaaaagagctcgctggcagcgcctgcgcagtgcgccctctttgtgccaggctgcagcaagctggttgtttgtgtgtgtctacccgaagctgcggaggcggagcgagggggcgtggcctgccttgtcgcactctaattgggctttcgcaggaaagtgggcgggcgcggggcggagcttccgataacaacactcggagctggggctgtggctatttgttgctgcgccgccaccgcccgagtcatgttccgcgatcttctcaggctctcctagcagcatccatcgccgccaccctatcttcactggcttcattcaccttctccttctctcttcgttgctgagcgacaagcttcctagcgctatgactgtcgtctccgtcccgcagcgggagccgctcgtcctgggtggccgccttgcgccgcttggcttttcctcccgaggttactttggggccctcccgatggtgaccacggctccgcctcctttaccccggatcccggacccccgggcactgcccccgaccctcttcctccctcatttcctagggggagatggcccgtgtctgaccccccagcctcgcgctccagcagctctgcccaaccgcagcctcgccgtggcgggaggcactcctcgggcagcgccgaagaagcggcgaaagaagaaggtgcgggccagccccgcagggcagctgcccagccgcttccaccagtaccagcagcaccggccgagtctggagggcggccggagccccgcgaccggcccgagcggagcgcaggaggtcccgggcccggccgccgccttggccccgagtcctgcagccgcagccggcacggagggagccagccccgaccttgccccgctgcggcccgcggctcccggccaaacccccctcaggaaagaggtgaggccgccagggggccgttggggagtcgggcccttagacggtcgcggccgagctctggggctgcagaccctgcacccggggggtcgggcgggtgggggcggggtggggggggcggctgtttactcgggagggaagtttccgtgacgcccgctccattcttgctttgggggaagaagggggaaggggaggcatgcgctggcgcttctgattggctcccaggagtcggccaatgagaagcgccgctgcgccccagcaacagccccgatttagaaggctggcggcgttccagggggtttcggcgttccgggcgcgcggcggggtgggggcagggacagggcccgcgggagggctgacgtcagcgcgcgctacgtgcccggcgctccggcgcccatgaaggaggcgaggccgggtgggggcagctggggaaggactgggcccggctttcggcctcccggctatcgggagccccagtcctagtcggtgaaacgcggagacggcctctaacgtcccgccgtagggggtggagtgggctccgagcggctgggtttcgtttggttggagttgtgccaaaatgtgaggtgcccggtgtgggacgcgcagtccagttggggctctgcccgcctcgggcctgacctacttagtggttccaagttaagagttggcaggagccgcacaaaactgattttattacttttgccactgtggtacttcgtgttagtgtgtccagagtaagttttcagaagagttagcaattgaattgacttagcccgtctgattgcagtgctattgcattaggataaaatggatagaagtttaaataggattaagtctacgaaatgatttcaaagtcttgtcagaataacgttttatggacttaagttcaatgacttaatcttcgtaataatgaaatgaaaaagttcccgttatttagtgaagaatgttgcattgaattagagatttgcggtttatctgtgcccttgggaaaaaatttgcccaccttgtttctttaaattatcgtctcaatgtctcccttttaaaattccacgacttttgaaatatccgtgattacctaaaagcttttgtgcttgtttcctggcctgttttctagaacaggtactaactagggagctctggcagtgaaccttattgacgtggaaagttgtggtcctctttcgtgtcgtgtcttgcttactaccgcgttacaagtgttggtagtgcagtgatctagtggattaccttacgcttttccatcctttcaagacttcctataaggcccacttaagttgggaaagattaaggtgagtgaagcagcgttcttgaagcagttactaaaccagaaaggaggtacacagcaaagattgtttctggcactcgtatttggaagagagctcattagtcttccttacagttgtagaaaggtggacttgggttatttcagactttttttagtttgacattttagaactggttcacgttgcatactggtaactagcagtggtgattaactgcatttttagtggcgaacaagagtgaacttaaaagtcaagggaaatttaagttttttgttgttttttttttcttgagacagagtctgcctctatcgcactccaggctggaatgcagtggcacgatcgatctctgctcactgcatcctccccttcccaggctgaagggatcccgcctcagccagcctcccgaggcgcgtgttaccacgccgggctgatttttatatttgtagtagacatggggtttcgctatgttgcccaggctggtctcgaactccttgagcttgagcgatctgcttgccttgacctcccaaagtgctgggattacaggcgtgagccaccatgcccaattaaagtttttgtaattttcagcttttattttagatcaaggaggtacttgtgcaggtttgctacatgggtatatttcgtgatgctgaggtttggagtatgaatgatcccattccaggtagtgagcatagtacccagtaggtccccatctctctctcaaccccccttctagtagtgcctagtgtctgttgttgttccccactatatccatgttgtacccagtgtttagctcccaaattcacttgtaagtgagaacttgcgatatttggttttctgtttctgcattaattcgtctagggtaatggcccccagctacatacgtgttgtcacaaagaacataattttgttcttttctatggctgtgggcaaacttaaacacaacaaaactagatatgtgatatgaggttcataactgatttttatctagaaactatatttacttttgtgttcttgtctttgtaggttttaaaatcaaagatgggaaaatcggagaaaattgcccttccccatggccagcttgttcatggtatacacttgtatgagcaaccaaagataaacagacagaaaagcaaatataacttgccactaaccaagatcacctctgcaaaaagaaatgaaaacaacttttggcaggattctgtttcatctgacagaattcagaagcaggaaaaaaagccttttaaaaataccgagaacattaaaaattcgcatttgaagaaatcagcatttctaactgaagtgagccaaaaggaaaattatgctggggcaaagtttagtgatccaccttctcctagtgttcttccaaagcctcctagtcactggatgggaagcactgttgaaaattccaaccaaaacagggagctgatggcagtacacttaaaaacgctcctcaaagttcaaacttagatttcagatttcagtatgtgtgtaaaacataatttttcccatatccctggactcttgagaaaattggtacagaaatggaaatttgccttgttgcaacatacaattgcaaaagatgagtttaaaaaattacatacaaacagcttgtattatattttatattttgtaaatactgtataccatgtattatgtgtatattgttcatacttgagaggtatattatagttttgttatgaaagtatgtattttgccctgcccacattgcaggtgttttgtatatatacaatggataaattttaagtgtgtgctaaggcacatggaagaccgattttatttgcacaaggtactgagatttttttcaagaaacagctgtc

SEQ ID NO: 46978 - DNA, 1794 bp, Homo sapiens
cacaaaaaaggaaaaaaattgtgaggtaaaagtttgagcagatggtggtgtaaaaagatgcacaacgctgaatcccagcactttgggaggctgaggctggtggatcacctgaggtcaggagttcgaaaccagcctgcccaacatggcgaaaccctgtctctactaaaaatacaaaaaattagctgggtgtgatggtgggtgcctgtaattccagctacttgggaggctgaggcaggtgaatcgcttgaacccaggaagcggaggttgcattgagccaagattgtaccactgcactccagcctgagcgatgagtgatactgcatgtcaaaaaaaaaaaaaaaaaaaaaaaaaaaaaaaaatgtacaatgtccagtagcttaagagaaatgcaagaaaggaagggaagtttttaaaaggtatattggggtaagaacacgaagggccttcagtgtcacgcggaagagcttcaactttattttgtaagcatggcagttctcaaaggtttatgagtaagggaatggaattcttgcttcaaaaagaaaacgtagaaatatggaggacagcttgataagggaaagcttgaaacagattacttaggtgaggatatttcagtagctcaaaagagaaaagggcctagagggcattatcagaggtatgggcttatttgggggaatgttttagagctagaattgaggattgagcatctgaatagagggtaaggaaaagacttgaaattgagcaacttgaaggataaatctaccaattaggggattgcagggggatcagaattataaaggaaggtcattttgatttggcatgttgaactttggggtgcctctaggacatccatgtggaaaggcacagcaagtagatagaaaataggtcagatccagaggtatggctttggtaaatagtgcacaaagcagtaattacaacagggaaatgagagtggaatattttatctctatccttttctttttgtctcataagatttaatgcttttaggccaggcacggtggctcatgcctgtaatcccagcactttgggaggcctaggggggcagatcacttgagtccaggagttcgagaccagcctgggtgacatagggaaccccgtctttactaaaaatgcaaaaattagccgggtgtggtggcacatgcctgtgttccgagctacttgggaggccgaggcaggaggaccgcttgagcccgggaggcagaggttgcagtgagccgagataatgccactgcactccagcctgggcaacggagtgagactccctgtctaaaaataataataataataatgctttaccagtagtcttgacctcatcctctctgcctcctatggactgtcaacttcactgtgatagtagttgaattataatttcctcatgaaacttatatagaggttgtttttttttccgtacctgtaaaagtctgtgttagcagacagttctaatttaaattctgaattctgatagcaggggcccagttggtgcaaaggaggaataaagtttccttcccttttctacaatttgaaattgggtgaaactgatcttttgtaactctttatctcttcttgcagctctctcatctcctaataaccctcctcatcttattgctggataaactatcctttgttttcgtgggtggaaggcaatttatatgcaatcaatatctgcttcaggttgaaggaatcaagtatatgtatccttgggtatgaaaggctgatagtcccatcatactcctatatttaaatttttgaaggacattgctaaactaaatacatttt

SEQ ID NO: 46979 - DNA, 784 bp, Homo sapiens
aatgacagcatggaggagttgagcccaaccagaaaatggctatttgactaagctgaagagagaaaagttaattcagggctaccaaaatgggtgggacacgagaggcaaaaactctagagaagagtgaattagagaccaaaaagtacctctaaaatttgcctacaaattatccttaaatcactggccatcttctaagttgtgtgtgtatggaagagattccaagggaccagcaaaaaaccggaattcagaaattcaagaactgcgctgaaatttttatcagacacacagtgctgagagagagattagagttcaaactcccaaaaggtcaatgaggaacattaggtaacaacccagaagggctacaatctagaggtaagggccatgccctaggaataaattcaaagccaaaacaagcagctttaacaacacccaaaaccaagccttaagatcaaagtgatctgccagtactctgtctaccagaagaaaactgtctttggagaatgataatgtcatgcagagcctctataattttttgtccatgtccacatgttatgttaaaaaaaaaaaaaacaggcaagaataactaaaaactaaggaaaataaaaggcaaagaatcattcccaaagtgatttggatattggcatcatcaaacaggaatttaaaaaattactatgagtaatatatttaagaaaataagaggaaaagacaaaacagataaaaagatcgttcagtggaaaactacaatctataaaaagaaacaaatagacatttaaaactaaaaata

SEQ ID NO: 46980 - DNA, 1093 bp, Homo sapiens
gtgctatatgaaaaagtcattccttagtatctgtgttcagacactctgtagacaaaattctcaacggaggggtggggcatcagaatcaaccaggtgagcctatactcacgcccttaaaaagggtgttaatactggactcagaactttaaagaaaaacgcactgatctcattcattgaagttattttttgtatgcagaataaaattgtgtgaataaaatgcaagcagcaccgtctgtaagtagaccagaactgggggaaagaaactgtaaggcccgagtacgcattatggtacaaaacgttctcaccagccccaattcctctccatctaggagggttggatgcgcgcgattttatcggggcacggcgacaaaggagctgaaacgcgggcactcgctggagcgcaaaccctcccgactcccggcggggagcgacctgagctcgggagaggggcgccccgtgtcccacggcccgccggctgcggtgctgaaccgcggaaagcgacgcgggcccgggacacgatgtgcgcggcgccggggctgaaagctggccgggagggcggaggcgcgagttccgccctgggccgcggagtagtccgagggctcacacctccccaagtggcgcagcctgggcccgcggggaggctccgcgcagctcccccgagcctccgccgggcctcggccgtgctccgcggcgcggctgttaccccgcccctcctccgcgcccccaacctgcagccgcggccgttcacctggtggcgtccgcgacgttcctgatgaacagggaggtgttggggggcctcgtgtagcgagacatgaccgcttcctccgttccctccgggtctgcccgcggccgctggactcgctccgtctcccgctaccgctgctaccaccacaggagctccgccggcccccggcgcgacccccacccctcggcctcagccccgccagcgcgcagccgcagaggccggcgcagagggggcgcagcgcggcgccagcctggacgcacgggccgggggcgggggcggcgccggcgcggcccaggggccgcgggaattccgaagacaggagcgcggccgttcccaggccctatggga

SEQ ID NO: 46981 - DNA, 468 bp, Homo sapiens
ctatctcttataaggacatttgtcgttggatttagggcccacttggttaattcagaatgatctcatcttgaaatcctcacttacatctgcaaagattctttttccagataaggatacatacctggagataggacttggacatgtatttttgggggccgccattcaaaccactacattgactttgcaaataaaaaacttgaccaaagaaaagaaacttgacctggtgggtagtcacaattactcatccctgacatactgttaagtggagaaaaatcaattcatgagacatgtaaacgattaacctatttagttaaaaatatattggccaggcgtggtgactcatgcctgtatcctggtgctgtgggaggccaagttgggaagattgctccaagctagaagttcgtgaccagctgggcaacataagagaatctccccatctctacagaaaattaaaaaaaaaaaaattag

SEQ ID NO: 46982 - DNA, 668 bp, Homo sapiens
tttttagaacacacatatttttattaatgacttatcacatttttaataaaaatttattcccacagaacaccttgaggattgtaaccctgtgaccatctatacctgccatccattcctgctagcatctttgaaatatgtagcaacaaattgaccaggaagtttgagaagtgaatccttagtaaaggtaattattaaccatggtatgtacacagtcgaggtgaacacattgcttgagggatcaatctcttcaaggactttaaaagcactgcaccgggcccaagctctagatgttgtatagaggaccaggggcagtcaaagttctccacccattttcctaagccataacggtaggagagaaatgttcttgttaaccacaagctgggttacgtctttgcagtgttgttttgtacacactgtggggaatcagggcaaaggaaaagcctatcctctcagaacctccctgtcctcatttccaggaatagtgatggagaacagagcagctaatctcactgccaagagaagggaagccaaagggagcctcaggtcatcaggtaccaggacattcagggctttaaagtcactgccttcactttgtgggccatttgaagaaatccgcacagaacttgaaaacgagttgtaatagaatcttgcccagcagaagcaagggt

SEQ ID NO: 46983 - DNA, 1755 bp, Homo sapiens
agaaaactgtagagagtagctgcagcttttagtaatacaatgtcaaggagaagaaagtgggggcagtaccgaaacttacgtacagtaccgtcgttagtacagcattgacactgacggcctccttcaggaaatacaaaccttgtgaggttttaattactaatgctacagagtggcgtttttccgaggactgtgttccacttggtctgtctctgatggctattaactaataaccgttctcattctgctgctgtgggaaataagcaacaacggaaaagtaatcgataatcttagagcataactcaaaggccagagcagccaaggaggtggaagagtcccgagccctgccttctccacagcacccccaaaaccccacggcggggcagagcgcctggtagggtacgagcggccgccagcgtttcccgcgcggcgccgggggcggccccgggactgggggtggtgccctgggagctgtgtggccgcgtgcgcgctccgccggggtcctggaggcctctgggcgcgtgcgcgggcggtcgctacctgcggccgagccagggagcgagagggcgcagagggcagcgggcttgggcagcatgaggcccggaggggagcggcccgtggaagggggcgcgtgcaatggccgctccgagctggagctactgaagctgcgctcggcggagtgcatcgacgaggcggccgagcggctgggggccctgagccgcgcgatctggagccagcccgagctggcctacgaggagcaccatgcccaccgcgtgctgacgcacttcttcgagcgggagccgcccgcggcctcctgggcagtgcagccgcactaccagctgcccacggccttccgcgccgagtgggagccgccggaggcccgggcaccgagcgccacgccacgcccgctgcacctgggcttcctctgcgagtacgacgcgctgcccggcatcggccacgcctgcggccacaacctcatcgctgaggtcggggcggcggccgcgctgggcgtgaggggggccttagagggcctccccaggccgcctccgcccgtgaaggtgaggtggggcccgggtgcgggaccctatccgactgcccgggtcgggggcgacccgggaagggcgggactctcgtgcgtcccgcgcgcctcggtgccctcccgcccggggcaggtgtgtgtgggaccgcgctaaacctgcggtcctcgcctcggcgcaggagcagagctgaacccccagtcaaagtcagttcgcgttgccgacctggcgacatcttgcagattattgtttcctcctctctagttataaacagctctgctgagttgttcccttaggaaagaacttacacccaagcctggtgtttgttacgggttatttttggtaactgagagaggcaacagcaatttgctgacaaggttgtgccatcaatctcaggaggaaataacttcttgtaggtaatcctacggcccctttttattcgtctccaaataaatcttttgtttgtggcagtcctagaaaatgtgattcaagtcattggtatttggataggaattttcagtcgctagaaccaccagacccctagaagtatacaaataaaggggaagtgaatgagcattatacatagatgagttcatccttaagtcttaatttttttgttttatgattttaagaaatacctcgactctttaaacagggaaatgtcgtttatgtttgtcgtagggcaagtttaatcctgttttactctgcttttccagatggt

SEQ ID NO: 46984 - DNA, 2005 bp, Homo sapiens
aaggatgctagtcttgctaattcctactgagaaacagctttttttggaaggaaattttaagcaacagcaaaagttggtgaaatcatcactaatatcctagagtttatcatgcagagttaactgtggagtttcttccccctgacaaaatgtatcaaggtacagatagaaaaaataccatttagaggatccaatgattcatttcaagcctgttttattaagctgagaaagctagttgcttatctttataatgcaccagaaagtaattagaggctaggattgctgggactgcttgtgtaaatataaagcaggatcattaaatgcaggaaaggaatcgctacgactgaatacagatacatttcatattagccagtctggcaaaaatcaaggttagctctcaagaacagggctcaacgaggtgtttttttgttgttgttttgttttgctttagctctatagttaactggtttagttacagaacatttcctttatgtctgtaattgtattcgcccaagtgctgcaaataggatatttaaacgaccaactcctcaaatgtgagtaaatcagccggcagtaaatagaagtaaatagaagtccggtggcagcgacagggagggaatagcgaccaggtacagcgagggggttgatgactatcgcccaccgacatcacctttacacctgttctcagggatgagtttctgacccagctctacgggaccaggcgaagatgagaaaagggagaggctgggtgctgcggggcgcgctggccggccgggggattggcagcggacgtccacccggccacctcgccctgcggcctgtacttcccgggcaggcggcggtctcgcgtagagcgcgaaaccaggagctgagccgcgagtggcgccagacgcgaggggaccgaggcggcgaccaccccggggtccagggtcactccgccctcctcgcccaggggccccagccctgctcacccggactcttcaggttgtagcgggtctccatggtgggtcgctggcttggctccggcctcccgggccgctgccacctcctctccacgcggccgctgcccgggtctcagcgcggctcgggcggacggggcctggccgaggagcctcggcaaatgccgcccagtccagcctggactgcgggcggggtggcaaggctgagtgcgggcgaggcgctcgcttcgcgatggcgccgcctcctccactgcgcccccgcctccctgagtgcctggcaggcaccggcgccggccggggcggcgctgaaccgggcgcccgggctggaggtcagcctcctcgggtagtcgcaggcccagccctgccgcggccgcccggcttgcgtcacccgccctcgtccgggatttgtgaagttgccctgacgtggcagtagcttcgtggcggtcggtcactacccagccgccgcccgcccggcgaagccggcttggggaggtgcaggagcgagcggcgtcctcgtcctctcgtcccggccctgcccgctgtaggcgaggtccgggacccccgggccctcgagagctcggagggggcgccgggctccggctgcaaagctgtccgcagccggctgcccgcgcgcggtcccgcagggtctgggaaaggctttgtttttagattcagttgctgttgcgaggggcgggggttaagtgaggagggggaaagccagtgacaaggaaatggaataggattttttttattttttattttgtgtgtgtgtgtgacggtgtcaccgctctgtcgcccaggctgggatgcagtggcgcgatcttggctcactgcagcctctacctcccgggcccaagcgatcctcccacctcagcctccagcgtggctgggaccacaggtgtgtgccaccatgcccggttaattttttgtatttttgttagagacacggtttcaccgtgttggccaggctcgtctcgaactcctggactcaagcgatccgcccgcctcggccttccaaagtgctggggttacaggcgtgagccacggct

SEQ ID NO: 46985 - DNA, 1565 bp, Homo sapiens
accgccagacgctgcggagagcttggggtgaggggcgcgggaggcaccggctctgaaaggggcagaagcgcgcgctcctccagcccagacgcttactccctccttccccttttccaccgatcctggttgcccctccgccaccagcaccgcgctccctcatttggcagctcgaggtcgggcttttggcgtccctccccaccccaaaccctcaactggacccgctcccctggaccccctccaagtcggtggctcgcgcacggccgggctgggggcgggaaggcgccaaggggaggaaaggggcgcgagccgaggacgcgggggccgggcgctcacctccctcctctgtgccgctgtccggatcggcgtcggaggagtcgggcccgtctccgtagtccgctagccccaccagctcatcctcctcctcctcctcctccgcgtcgtcctcgtcctgcggctgcggcttccccagcacctggctcatcgtgcccaccggccggccggcccggggacggcgggggtcccggggtgggggccaagcctcctagccggccgcccgcagcctatttctgaagcggaggtttgtctagagctcagcggggcccggcggaagcgggggccgcgcgtcccccggcgggcggcgcccaggtccgggtcccgcggttcccagcgcgcccgaagccccctcccccgccccgcccgccggcggaggagtcagccggagcgcggcagttcctcccggaggagggagagagagagagactgcgtgacccgagtcacctgacacacactgtcacatactcacatacacaccccgcacgggcgcgcgcgcgctcgcccggccgcgggcaccactcggcggggcgctgggccgaggacacacatgcacacgcacacgcacacgcacgaggagaccggggaggcgcggggcccctgcaccctcccagactcacaccgacacacgccccgtacacggggcccccgggacgccggccgtcacccaccgcggctgcgcgccaggggcccccacgcgcctctccttcacgtggtccccgcacaggcaggggagggggcgccgcacaccctcaatgtcccccccgccgtcccactcccacacgcccgcagagcgtctaccgtgggcggatgcctcctgcttacagtcctgagctagggtcccaagcgggtggcctcccaacactgtggcgcccagatcccccaccccagagcagcgtgcccaggacaccctgtggacgctcaagagccccaggcggagaactcagataaatgcacagtggaggcgcagtctccatagcaattgtcttttagtgtgcctttatggttcaaagtgcttcccaccaagaatatttaaaaagcaggcctacccagacgtaaatgtttctgaagaaatcacatgactcgtggctgcttagactaaataattcctctgcagccctttggaaaaggtctcagtgtataacacactcgggggctattcatggccacctcctcatgtctcattgttgcatagactgtaatcccacatgaataaaatatttcaaggcttttgt

SEQ ID NO: 46986 - DNA, 1690 bp, Homo sapiens
gttcagtttgtactgagcagccccagttaagtgagctatggttatattgaaatatccacttggccacgaattgagtgaaggtgggaggttcctcctgctaattctcctcccctcccaatacacttcctggcaacccccacgcggaaaacctcaccctactataggcccccttcctcccactcttcagaaggcggtggccccacccaggagagggctgcagatcggggccagccccagggcctccgcggtgccacctctctctcgcgagggtccctgccgtgccccggctcgccgctgggaggcgctgcggcaccggcgtaggagccgccggcaggggtggggcggggccggcgggacggggcagagggccctgcggcggcggacgcggcgggctcggccacaggtaacccgcaggagccgagagcgctgcctggcgcgcgggcggctggaggcacggcgctgggcggcgccgaggccctggggccgccggagccagcgggagccagtccccgtcttcgcccctcgccccccaccgtgtcgccggccttggtccctgcggcgcggacgtccggcgcgggagagaaaggtaccaggcgacctcgccggctccctgggacccccgcttacaccggggtgggcgcctcaggtcggggaggacgctgtcgggggaagggggcgctgctccctcggcaccccaggatcgccgactgcccgcggaggagacccggacaccgcgcctcgccccctggcctgcggcctccgaaaacgcccggcgcgagggggtccccccggggcgcctccctcttcgcctggcatcagttgcctccctggaatatggaacttcgggcgagggaggtggagaactttcttctggggctcgtccctcgttctcctgctcgcttgcagtttgaaggaagggcggtgggggcgggggtccgagtaccccgcggtctgcggcgcgtaggagggtaggtccctggcctgcggccgcctccgaatgaccccgtccctccccgccctggacgacagcactagggtgcagtcgcaggagaggggccgatacccctcaggagccccatcggcgaagcctcagcaagtggcatctcccggggtccagagagtcggcgtgctgtctggtttgggtccagacatcagctcacccaagcttatcttgggcttttaagtgtgttgcttccggtagatctcggggactggaggggaagtgcagcattatttgtgacccaagagggacttgaatgtctcaaagctggtcaagaatgtttcccccgcgaggtagcatgagatgggtcacgtggtagtaaagagccacttcgggcccgtgagatggagttctgactccaccacttgttaggtgtgtgactttggaaaacccacttctttaaaccttagtttttagaactctaaactgcaggtattgtacataacctcgtagtattgtgttcatgcagtgaagtgatgggaatgaaatgcttggcattgtactcttgtgtgttagacaccttttgcgaacctgttggatgttgaattcattcatgcttaggttctgttaggccagtgtaagtggaaagaacttgggcaatgaagacaaacacacctgggtccaaggtggtcccatccatggtatactgattgggggtttctcatccccaaaacaccaatagcagccttg

SEQ ID NO: 46987 - DNA, 1027 bp, Homo sapiens
atgcagaggtgtgatcatggttctgcagcctcaacctctcaggttcaagcaatcctcccacttcagcctcccatctcagccacctgagtagctgggactacaggcgcatgccactacacctggctaatttttgtattttttgtagagattttgccatgttgctgaggctggcaccctttaaataatttgagcccttatggcaatttgtcttttggttcctaaaaattgtttcgtagctctagataaagttcttgtctcaaccagcattgaagccttgcctacctgataggagagcttggaaccaagaggggaatgcccaatggcattaatcattagcttctgagcagagcagtaagcttgtcgtataaatcaaatcactcactgtgtgagcttatctacagagacctctgcagcttcgcttccgaatagaaatgatagaaaaagttggcactggggctttagtgaatgtgaatggtttatatcggagctcagtttgcctgttgatgctaagagaaaacaaattaaagttaaaatgagcactgtggccctgcattagccatcttttttaaaaatcaaggtaaaagttaataaaagaaagagctttgatgagaggaaggacctaagtccaggcactttaagaacaaatacttgtttgtttataattttctgaatctccagaaggtactatcctgagttacagaatatctattgaacggcttgcttactgaagcctttgttttcctccatttgctgttcaaaaacttaggagagagtggcagatcagtaatgaataacagcaaaatcccctggcacctgttggatttttatacaaaacagaaaaagttaaaacttgaaggaacaatgaaagaacctcacatctccagtactcaatatgattgaagttaggttgctactgtttagaagcactgttttaaaactgaggttttgatgccttaaaacatttttcatctttgttaccttgctgaaataaaatctaaaagttgcattgggtataagccaggatata

SEQ ID NO: 46988 - DNA, 572 bp, Homo sapiens
cactccacaatctactcatatgagggcaaaaatttactgaaaggtattcttaattacagccttctaatttcaatttcagaaactggtagcatttttgttcttcctgtttatctaacaaacttctgtttctggtcattaaacagaatgtaactttgtgggaagggtggggattttatttatccaaatgaataacctttattcagttaaaaattgccaaatgtctgtttgttcttggggttttttacggtacttaacattcagcctgcctgatagcagataggatttaggttgccaaatgtggaaatgcaaggaatgtcagacgtggcgaaagcaaatctgcagagattccttgatgccatcttgtaaaggaaaatatactactttttatgagtgatggctgccagctattattccagggacaacataccatattttgctttatagacttaagaaaaggaagacctatagatattatttttctgtggagggtgttctgactcttcctcatccagggaaccattttgagggtctgctagtttctaagtatatttacctcatttatatacttgggg

SEQ ID NO: 46989 - DNA, 918 bp, Homo sapiens
cccctccactgtgcagagtctcattgtccccgtctgtatgatgacggcctggaccagatgactgctacaacctctataggctttgatttcatgtgggtcagtgaagatgggtggtaagctttggagggcattgcttaccctgcgccaacagagaagactatgaaagataagagaccatactggccaaaggcagttttgtagcaaagccaagaaaaggcaggctccgcgcagctagagggagagtttaaatacactggcaaagtaatgctgatagcaagcacttattgagccctagtattgctgtaagcactttacagccttctagaagagattctcttctcattcctgttttggagaggaggaaacttgtccagggtccctcagccgctgagtggtggaaatgcaacttgtacccacagagtctggctccgaagcccaacctccagtcctccccagaaagagctgtgaagaggggcaaagtttaattttcatagaaggtcacctgttaacttctgacctcctgtggcagatcggtcagctcctattttcatgtttacttatgtgcagttttcacattccatgccggcctccagagaggtcttgagctacttgtaggtccccatggaggtgaacaggggtttgcccatagatggtgattggattgtttggaactgaaggtgaagggggccttaactcagagcttgtgtgatctacccatagcactttccagggcccaggcaatcacaaatgggagagagtgcagactctgtagttagggcacctgctcacagattttaactctgctttgtttgctaattgtgcaagttgcttaacttctttgagcctcagtttcttatctgtaaaagagggatagtaatgtcagcttttcagaattgttataagaacaataacttattt

SEQ ID NO: 46990 - DNA, 1546 bp, Homo sapiens
aaaaaaaattcactgatcaataaaaagggttaggatctgtcctcaccatgattttgttctcacctcttcggtggcacttttgtttcttctgaattcttctcttgcccaatctttcaggtatttgcgatcagaatcatttggaacttgccgaattgtttgcaaaatccttctgtagaggagaagaacttgttgccttcttacgaactgtaaaagggaggagtaaatagcaattactactgcacaatcgccagcctggaaagttctacttcagcaaaccaagctgtaaccagagtacttctcgttggtcaattttgaaaaaggcaaagaaaaacttttttttttctttttttggccagatgcagtggctcaggcctgtaatcccagcactttgggaggccaagatgggaggatcacttgagcccaggaggtctaagctgaggtaagccttcattgcgctactgcactcagcctgggcgagagtgaggccctgtctcaaaaagatgttttaaagaaagcatcacgaggttcatctgatctttttgcttactgctctgtcaaacctaagaaccattaaaaaatcaggagctgcctaccgggctgaaaagggctgccggtctcctagaagttgttattacaacgacagcactttttctaaattaacagttgttcaaatctttggtaatctcatttgctgtttgccacagctcagtgcaatagacttttaccgtgggcactgggcagctgaggcaccgggactcagggaaatcaagcgcctgacgctgtctcacgcgatcgcaccaaaccaaggaagcagccagtgcctcccgtcaggccccgcggagcgaagcaccgccccgcaggcatcgggccaatctcagagggcgcgcacgccgcatcaggaccccggaacccgccccgttggggatagggacagatggagaatccagctcagacccaggtaagctgctttggaaggcagagaaccgccggtacctgctttaacgttagcgtcgctgggggtaagcgggaagcagccatgtccaccagaggtccgccggagcctcagcgcgcaggagcggaagtggggttcgaccaaggggtgtggcgagcccggtttcctaggagacggcccgcgggttgctctcggactgagagcgcgaggcttcgggactgagccctagctgctgcgctggccgaagttttctcgtcggtaaaataggataacagtgcaccatagggtcgttttgataaagaagaaaggtagggcacttaacacagttcctggtaaagagagttcaaatgaaagtgaaggaggccgggcgcggtggctctcacctgcagtcccaagcactctgggaggcctgtaaggtgcctgtaatcccagctcctcgggatgctgaggcaggagaatcgcttgaacccgagaagtgaaggttgcagtgatccgagatcgcaccactgcactccatcctgggcgacagagcgagaccctgtctcgaaaaaaaagttaaggtttttttgggggaaagaggtgaaaacgtattta

SEQ ID NO: 46991 - DNA, 941 bp, Homo sapiens
ccctgtctctacaaaaaagtacaaaaattagccaggtgtggtggtatgtacctgtagtcccaggtacttgggaggctgaggtgggaggatggcttaaggccaggaggcagaggttgcagtgatccaagattatgccactgcactccagcctcagtgacagagctagaccctgtctcaaaagcaaaacaaaaaacagaaaacagtagaaaatatgattatcgtatgataaaggcaatcatgtccaacaccccacaacttctcaggttcacaaaattcaacacacataagctatttgacagattcttaggaaaggtataatccgagaagccagtgaggcaaacagtgcccagagcagcaggtttcacttacttgtttgcagctgattctaaaagggcaaagagctggtcaggctggtccgtttgtgggtcaaagtccatcaaatttctaatcatgtccagagcctgcatattccatcggggatccagagggatcacaaattcatctagtttaaaaacagaacaaaacaaaaatcagaaatattggagaaactccttgcctgggaagtttcagttgaatattttcattgttttactttgagcacattgaatcatgatggggaagaggttgaaccagtaaataccatgagtttcatcccataatactagaatagcagggtttaatagcttttacactctatctttaccaaatgcaaagtatctgtatgtcctgaaagttcatcccaatgcaggatataaaggtaatccctactagaatacaacattccaaccaatgaattcacttcctgagatcacactaatccatgggctaaattacacagtggtcaccattagcttaaaaaaaaaaaaaaatacgtacatggcagaaaatgaataaatacacctcactatctgttttcattaagaaaacaatgcagtttttta

SEQ ID NO: 46992 - DNA, 650 bp, Homo sapiens
gagcctattaaaataaccaaggtaaatgctgactgatttttaaaataatatattaatcacagaacatcattttcctggccacaagagggagaaacacaaaatccagcaggaacatttctctaaaaatgaagggagtgcaaataaggtaccaacccaggactgaggacctgaccataatggaaagacaggacaccaataaatataaataattgactattgaaatacttgccaaataaaaaaaacaaacaacaaaacaccccactttgcaaatcctagcttcgggcaaagaagagcaattagtgttgaccactgggtacatggttcaaggagaactgactcatatagtgctgaggtaatatcaaaagactgctttctaactgcaagggaaacactaggtgtgcaatacctcatggtcattatcttaacctagtactcaatcttagcaactaccagtgagccaaccagttatgtcttctgatgtgatgaaatataaaataccaccaaaaatggactgtaccccaaatatgttaaacttgaattcatcaagcattttttgtattttctatttacagaaaatatgagagataaaacaatgtaaaggacaccatgagtgtgggattgaaaccacctttgcaaagattatgacagag

SEQ ID NO: 46993 - DNA, 821 bp, Homo sapiens
caccgcgcctagcctgaggagatgcccatttctaattctcacttctcaaaggggaagtcaaccactgagaacacagagtggcacagaagtcatagatagcgaaatccaagaagacttatttaagactccaagtgtcagaaaagggcattcagtgaaagaattatgttaggagccactcccaagttggtctttaaaagttattttttaaagttaaaaacattaccctaatcgagccttcccagtcattaattataaatctgaaaaagggatctgacaccatgaagcaacctataatttcaaaacctgactatttacttctagctggtaagaactttgaacctaggaggcggaggttggagtgagccaaaactgcaccactgcactccagcctgggtaacagagcaggaatctgtctcacaaaaaaaaaagaaagaaagaaaagaaaaaactgtttagtccagtaccttagagataattctcttccctcaagggttggtcttttgttttctcttctggcttctgaaacttcttcaggtgcctgttcacatccaacagaactatcactccaagagtgatgtttctctccagtaagttggatataaatgtcaagcaggtgatcaaccactgccaataggctaggatatctgctctgaagaacctgacagagggggaaaaaaaagaaaatttaacagccagcatggtaatttttgaaagcacacaaactactgctgaaactggtcagccaaaaattgtatttctctatgaaatttgttcactgggggacggtagctcacacctgtaatcccaacactctgagaaac

SEQ ID NO: 46994 - DNA, 1799 bp, Homo sapiens
aaaaaaaaaaagtgtcttcaactcagatagaaggagtcaatgagaaggttcttaaaagcccgaagacctatttcccagaaaactctaattaaccttataatttgtatagttagttacagtgagtatgagctgtcttgctctgtacttcagctgttgtaagtgtttacgaactgtctccaaaaacagatgcaaatttccctcatggcagagatcgtaacgaatttatctatccactttctcacagcgccacaccgttccttacgcacagcaggaatgcaatcagtatttgtcgatggttccccaaactaacaggagtggctgcactacgcacacttaggtgatacgtacacttgtcaaaacggcagaaacgcaacctcaatttcagaaaaacaaaccacattcctttgggaaggccacctctgccacaagcagccaaagcgcttgcataggggtgagaggcgatgggaagggtactggaaggctcccccagataaaaacaaaagactccttccaatcgcctcaaacacgctcggaaacctccacgacctgcgccagcccacaggagggggccagcttgacctgaggctgcaccactccccacttaaagcggcgagtatcggcgggggagcgcaggaagcttactagtggggcgacccagtcgttccggcgctttccctctcccttcacgtcttacctgcttggccaagaacctgcccaactcactgcggctcttctcgttcttggctgcgattaaccgcagcggcgcggctgccacctccagcaagaagtgctccatgacccagggccctcaccccgagcggccacctgcgctccctacttcgcggccagcgtccccaagccgccgaggtcccagtgcccgagcagccagcaactacgcccgcaggaaaggcgtcctcagctccagcgcctacaccgggagaggggcaccacacgtgggtgagcacacggcgtttgacgtcatcagctcgggacggctacgctgcgccctcccggcctcagcccctcagcggcggaaacgccagtcttcgctgtcccgccttttccgggagggaaatggaaacaaaaatctagtcggtttggatgcaggagtgatggggactcgcgaacacagcacgtggtgggacagaaagaagagtgcgttaggccggggaggaaagagggggcgtgtgagtctcagcccaccgtgccttgcttctgccttaacacacggaaagatcagatgtgagagaaaagctgattctcggccgggcgcggtggcgcatgtctttatcccagcattttgggaggccgaggagggcagatcacttgaggttagcagttcgagaccagcctgggcaacatggtgaaacccccttctctactaaaaatacaaaaattagccgggcgtggtggcgcgcgcctgtagtcccagctactcgggaggctgaggcaggagaatcgcttgaacccgggagacggaggttacagtaagccgagatcgtgcagctgcactccagccgcgcgacacagcagacttttactgtctcaaaaaaagaaagaaaagctgattctccccttcttgttagcggtggcagttaccccctgtataggtaggggtcagcagtaaccttagttcttgcctcctcagaagaaataattccacgaagggcataaggcaggatagacctagacaagtttcagaatagaagtaaaagtttatcaaaaagctttagaacgggacggaaagaaaaggaggaaagtacaacttggaagactgccaagcaggcgacttgagaaac

SEQ ID NO: 46995 - DNA, 838 bp, Homo sapiens
ccgaagctaagttgtttgtctgcctatcatccaggaacgcgtctgagggcagggaacaaatttattcatcgtaatcgagcccagcactttgtctcgcacgcagctgacagcagaattttaagataaagtattaaataaatgacagacctctcaaggcttcctgtctttcactaaaaagcttctctcaggccacgcccctacctccactcaggtcagccccttcctattgaagccccgccccatcgccttccccgccaccttacaccccgcccctctctcttaaagccctaggaagattactggagtttggcgccaaccgtgtttttttttttcccttccaaaggcgggaactagttgtgggcgctgcgacgtgctttgcgtctgatatgattggccgtaggcactcagtcccgcctccataccctgatagcgctctggtattggtggagatgccagggagacctcggtgggcagaaaggaaccgggttgtcttgggccgggcagggcgggtaagttgtcgtaggggcccggtccgtgagggactgctaaggaagaggctgcatggcgcggtagtcccccgagtggaggtcggctgcccctgggaaaccagagagtcggagggagtccatctggagcggccaagtaggtcggggaagggccgcgcctgacgtctggccgcaggtagccacgttccctccgcccccggtgcagcttcagggcttgcaccctgcgtccctctgtggtccttcgagagggtctgggcggggactatgggtgggcgcgcccaggaattgtcccttcggcctctcgtcctgcccctcccccccaccatccagtc

SEQ ID NO: 46996 - DNA, 1541 bp, Homo sapiens
gactgcatgaaagagccccaagtgcggaaggtgagcagcaaaccactactctatctcaagagcctccttggcacccatgaggtgacacaggcttgcacctttgagcagtttgtcactccccttcccgaggctcttggggattcagcagcttctgggttcagtctggtcctgcttcagaagctcctggaataaaaaggttgtgtgctgccaggctaagagacaacgtgtgggttagctcagattgcttcattcttgtttacattcacgtctgctccggatgagccagcagatggcactacaaacctaaacttccttcaagcactagcccagccctgtctaatacaaacaatacgagctacatttgtgattttaaattttccagcagctacattaaaagaagtaaaaagaaacaggtgaaatgagtttgaatactgtatgttatttaacccaatagataaaaatacttccaacatatagctaatataattattaatgagatagtttacagttttttttttttttgtgctaaactttccaaatccaaagcacattttatccttacagcacatcataattcagactagccactttcaggggctcaacagccacgtgcagcatgaggcaaatggactggacagtgccactctaggagacagaataaatggactcaatgaatcccagcagccagaaaaacatatgggtctgggctgaactgatcaaaatgctcttgggtgaagaaaccaacccctcgatagtgttcagatgctgcagggttaagtctgtgttcttcaagggagtgaggatgaagacatttgatcctgagcccaggtttctctttggttacatcatttgcaggcagacacgagtcccggctgccggcatgtgtggctagtcaattcccgtgcacaaaggcaaatgtacaaaatgatcatttgacttttctgtggttgggtgcaagctctttgtcaggttccatcacagctccgagcttgtgcagtgtggcatttactgaaggttcccagcaggtgatctgattcaacttctacctggtgagctctgtcccatgacacctgtaaaattttggtccaagaaagcaaaatcgcagtagggcccatgacaccactgtcggcttggccctgctccgactgctaaagacaggcagccaggacaaacagttccttgttatgggctcgggaaaggcctttgtgcacggggctgtgtttgcacagggcttctaatgatatgaaagaatgtttgatttccctcttatacccgttggataacaaacacactcagatcctgcacggtgtctccggaacacagaggtctgtctgttggagatgtggatgttccaacacagcagaggtggtggcgctttgggggcttgtggagttttccctctgatgacaacaaagccattctgcttctgctctaaatgtgtttacttactctcagaaagaagatatccctatagttcaggccacagggaaagtcaaaaggatgtctataccaagagctactgtatttaaatcatccagaca

SEQ ID NO: 46997 - DNA, 589 bp, Homo sapiens
tctcctgcagagttctcgcagtcctcgtgtgggcgctggcacgcagcatccttccggcacacaaacaggccatcctcactgttcaggagctgggtctgcaggaagctgaagcaggagtcctccaggttgtgcatgcgcaggaactcagcacagcggatgacctcgcggatgttttctctgctgagtaacagcttggcagtgtaggcaaactgtaacagcggcccaaagcccctggctgtgacctgcaaaacaaacagggaaatcgccaacattaccatcagcactgctattgtcccgaatccctcaactgaagcaagataaccagacagtgctaatgtcccagaataaagactgcaaaggggcagttaatcttgtagtactgggtcagcaatgattctgcttccaataattagtgcctgtctcgtgcatgccactgttgtactccatcacagcacaggcagaattgaaaatcaccagggtcaagtggctaaacaagatgacaacgggttcagtgtttacactaatgaaatatcctggcaaaaatgcacggtgacaatggggagcctattaatttccctcccaatcagtc

SEQ ID NO: 46998 - DNA, 518 bp, Homo sapiens
acctggtctcatactgtgcaatactcattctgatacagatgagatgggatcacacattggggccagaatacagtgtgccatgtgggggcgagacctcggagaaggcagaaagttaaccctccaacctcccacagactgcttcctaggaggtgatgacctcagctagcagttggcacatagttggttcaaccctgaaagaaataaggccagggtaccgtgtccgatggtgcaagtcaacatgctgacaatgtgttgaaatttgacccactgtaactatgacccttaatccttcattacattggattctaacatatcatctctctgctgaaaggaagatgggctgatgaaaactcaatttgtagagaaagtttgggcactgtttgcaaagctggggagctcagtgttttggggagctcagtgttttggggagctcagtgtttcatgagacatccattttgctgcaggacagagtttatgaggatacttacaacagttccatctctggactatgataggga

SEQ ID NO: 46999 - DNA, 1001 bp, Homo sapiens
ataatgtttgtgtgtatgtgtgtttttctaaagaacattttatttctcagaaaggataccaggcatgtttcttttctgcacctgtacggccctttttcacttagtcaagctggactgcaaacaatgaagaaggaaatttgtttctggccccccccagatcttacaacaagcactgccgagctggctggcttctttgttcatatgcccaggcccccacctgggtggtgcgcaattctaggaatatgctctggctgaaagacagaaaagaccaggagagggagcacaagaacacaagatatttctatatctgggtcgcagggaaagtcacagaaagagagcaaggcaaagagaagcaaatgcctcaaaaaatatatgcgggatcttaacggtgtattttttaggtgcaataaaaagggaatttggaacttatggtttgttcatcacatagaatacatttttagcaaattatatttaatgcagaataaaggctattttatttattagtttgtcctgaatgatatcattactttatgaactgccaaatctgtcagcaattattaacactccacagctagctgccttcccctaggtgtttcagttcacctttgccacacagtaacatgggaacaactgcgtcagacgacaagcatgcagccccaggcacagatcagtgagtttcagtgacactacagcacttagctggattaagtttataggctgagaacaaggtaatgacaccaggcattctcctccacaggaattcacaatatgggatgtcactggtgggcaccttttcaatataagatacaaatcaccttatccctttaacgaatgcatactgaccactttgcatggttctattgtgtcttaggtgctgggggcataaaacaatgaatatgaaggaaacggtacttggtctgagaggttctaggctattgggacagagacaagtcaacaggtaatcacaacacagccatgataagaactgtcagtacggttct

SEQ ID NO: 47000 - DNA, 532 bp, Homo sapiens
cccacctccatgccctgcccccaacccccactacccttcctggcctatggtagctatccctcctactctctatgtccaggagttcaagtgttttgacttttagatcccatgagtaagtgagaacatgtgatgtttgcctttctgtcccacatgtgttttgtaaatcaaatcacatttaagtgtgtgaggggagggataatgctatgatgactcactctgaaagggaacaatgtatttcccaactcaggggaaaaaagattttctcttttgagtgtgtctaaaagcatgatgagcacacctgcaaaaggactgtagctgttgttttagcctaataacagcactattagtcacacttgttgaaaaccaggggcaaagaatggctggtactagcagctctggggtaaagctggcacagaataatggcatcaactgggctggacttccaaatgtgaaggtgctaagtgaaccttaaaactcttttctgagacataagtcagtgtattaagcaaagcattaaatttcttaatttaat

SEQ ID NO: 47001 - DNA, 2379 bp, Homo sapiens
ggcttgttgcatgcatccctagtccagcctgacatccagcaccaggctctttcccagccttctgtcctgagccacctcacttctttctcctgtctgccctctcttcccaggtccaagctcatggatgactcttggcaggctggggaagagaaagaatgtggaacagaggagagagaaagtcagaagcagcaaaagctgctgtgtgtccacatgggaagcccgtggactacatctgtccacgagaattttcatagtgttctatagattttttttaaaaatagtgagtttaaactatggatcagcagagctgaaagggaccttggagatcactgagtcccactgtctcactgtactgttgaaaaaccaacatgtgagtaatggaccgaggaggaagaaggcagcatttgtggagggcttaacatctgctttgggatatagggtcccaggtcccatagccagtgagtggcagagtggggaccatgcaatgcttaaatgagcacttctaccccatacacactttgccctacgacttacatattcataccacgtgtgggaaagggtgtggcatttaccacataaagatacttggaattcttgcctcaaagggtaagtgggttttccttctgtattagccgatatactttttaaaaattatggtaaaatatccaaaacgtacaatttaccactttaatcatttttaagtatacggttcagtggcaccaagtacatttgtttcgttgtacagccttcaccactatccatccaatacatttttaaagtgagtattttctaaaactatacatccaaaacaagagtgaaggaaacaaaaaagaagtagaaagaaaagacaggtagaaaataaacttttgggcatgcatttcagctgacaaaaacctttcatacgaattagcttctctgtgacatattcattattttcctagtaatgaaacgggaactgtgagacaccatgtgaaaaggcggcttttattgtttctctaggttctatactagctgtatccgcttacaaaaatgttatacaacccagtacatcacagccttccacgcctcctccataaaaggacaagtaaaatagtatttcttggaaagacaggcatttaccaatgcactgcatctagatggagctgtctccatcattctagtctgtttctaaacagggttttaaagtcttggcacagaacacaaagaatgtcccttagctattcagcatttagttcagctccacaatatatttagcaagatttctttgccccccccgcaacccccacccttcccttcttggtttaatgacctcaaatgtaccaacatcctgtcttacctaatcccctaacaagttctatcaaatgccaggacagaatcagacagcactgcaggctgtgagatcattcactaagaattcatttttattccaaaaattaggagtgccagaccatttaacacaatctatcacacagccagaaaattagcctagcgctttaagagaaacatttaaataacttttaaatatcttcttcctgacatagattctttaaaaacctgaagactctctccccagaaccagacgcatagacacaaaacatttccacatgatagcaagagctcaaggaccctttgaagacgatgtaggccccctaagaatccataaacctcaggttaaaatctcttgtaaaagaactccagtacttctctttgtctacaagcccctgtactggatcctgatccatggagcatccagggtaacttcttctggggccacttttgtctctggatgagaaacgacttgtttcagcttccggaacacccctacgtggcttctggtccaactgactgtcaacacggctaggcctctccccaattcagctggctactctgggaacgttcatttctcttactggtccatgacatgctggctctaccccagtgttaggttttgcttttcaattggcaatcttggatcctgtggtcccttctgtcttcctgtcactttccttgtggtccttgtggaacttttgttttaaaaattaaacctgttttttttttctttatcataaaagcaacggcctcccgtttgcacttaattcctttgttttttctccaaaagcatacttcagccttcatacctttgttcttgggaagactttgcccacctctctaagtggcaggtcgtgccactctctgttcagttcgggacagggtttctcctccaggagaagtgtggggcagtgaattaggaataagcctaaagtcagagagacccaggtctagtcccaacatagctgactttggccaagcaatttgaacaaaggctcagtttcctgatgtgaacaaacaaggaagattaaagccaacatatgcttttgt

SEQ ID NO: 47002 - DNA, 471 bp, Homo sapiens
agcattatctggttatcggagtcatcttttgaagagatcctggtatttcggtttgacaaaaatcgagaaacaatttagaaagaaaatcggatttgtgtgtaaatgaagaatattcctgaaaagaaactctgttacgaaactgaaatctggagaccgcggtggtgctaagttgagtcatcagttccctttacgccctaataattgacggcactttgatcacgatgactgctctgggtgatgcttttttgtttgctttttaaagtacttccttgtgtaaacaggttgtctcactatcatcttgaaaacatgtttacgtttgggggatcatggggaacatctgttagaaacagatttcatgcttttctgtcaacttagggaagtctgaatcctatttcttggtaatatacaaaagctcttggagagttaaatgaagttctactggaaaaaggactgactggatattttgattgt

SEQ ID NO: 47003 - DNA, 679 bp, Homo sapiens
aggctgctaagggttgccccagcagggctgagtaagtaggtggagtggaagtgatgcggatgtatgatttgagagtgtgagttcaacagaggtgtgagtccaaggtgatgctgggcttgggaacaagaacaaataagaacgtaagaaaattaggacaacagagatatgataaggggcaagtaacctacatttttttccagcgcttctatgtaaaaggctcatgtttactcatgtaatgctcaaaagaactcagaaaataccagtactcccaactcactgttaaggacactgaagttaaaataactagcattggtctcagggctagcaagtaacagagctatcatttgctctcaggataaattccaaagtccatcttcttcctaccgtgctacacattgtctcctctgtttgatctcctgagagaaatatctcgattcatacaggttacttatcagctgaggcatctggagtttctattgcatcaaacatctcagttggtgagtcaataacatgggggatgcccattgtaaaatccagcataaacgaaacattcaaaaggatatattcatggaactggaaaggccagctccccctgtgcatgatggagagaagggaagagtggtattacaaaaatccaattgctggatatataggcagatgaaaatcttttcatcctgct

SEQ ID NO: 47004 - DNA, 1703 bp, Homo sapiens
taattttttatatttttagtagagacagggttttaccatgttgtccaggctggtctcaaacacctgacctcaagtgatccaaaatgccttggcttcccaaaatgctggggttataggcatgagccactgcgcctggcctgctatcagctacctctgacttcagctggagcttcatctgtaagggctcccaggcgctcctggaaagtacacatttccccagctttcattcactttattcaatgattgagaaagagaaacatgcttggccagttcacaaatctgaatttagatgtttgggagttctccaatgtttcacttctttttgctgaggtaggcttgtaaacttggttaaaagaaactggtgtaacctctttgaaaagacaattgggctctctctccctgtattttacacatggatgtaaaagtcattaaaaagtacatattctttgacctagaaaatcactttctaggaatctagcctaaggaatcactggctatataaacaaagaggatgtgcaaagaggctgaccacaccgctgattataaaagtaaagtaggcctggtgcagtgctgcacgcctgtaatctcagtactttgggaggccaaggtgggagaatcacttgagcccaggagtttgagaccagcctgggcaacatagtgagaccccatctctacaaaaatagaaaaattagtcaggtgtggtggtgcctatagtcccagctacatggaagcctgaggccagaggactgcttgagcccaggaggcagaggatgcagggagtcatgatcatgccactgtactccagcctgtgcaacagggcataaaagtgaagtttaactaaacctctaacattaaaggattggttaaaaaacatggaaattcaaacaatggaaaactattctgccattaaaattttaaaataatgatccacatattattgacatgcaaagatttccacaatatattgttaacccaaagaaaacaataggtttcaaaaatatgtgtggttgtatataggggaaggtccgaaaggatctgtattagaggttcccaaatgattctggtagcccttagagtctcagtaatttttcacaatgcctccaggcccaaacaaatacctaatagagctgtctgttaagtagttagatccaaacaacataataactatttatgtcagaatgatttagcagctgaaaaaaaaacacacataaatgaaaactactatttccttctcaagtaactttgttataacttgtttatagaatgtatacacctgttgggcactgcataactttaaatcttggaatcgctggacaccactaccttatttcctgttccacgctggttttcatgtgatacactttttatcactaaacactcagcaatcactgaaaactcggttttgtaaagatatgatgtcatcaaaaggaatgtagtgtgatctaatgctgaaactgtgaactatctccagctaatagttggcagagtgttgtacgatgtttcccttaatgatggaaagtatctgtgccaaccctagagctgcacccagaatttgctgtggtgccccagagcatcttggcacacagtttggagctgcaggtatataacaagatgttaacagttgctttctctcaggttactggtgattaaaaaaaaaaaaaagattttctgaactttttcccaataaacatctgttatttttt

SEQ ID NO: 47005 - DNA, 1662 bp, Homo sapiens
tgagagctcggtcctcatgcccctcccctgcccccgtgacaatggtagcatttaccaagtgctctcagcaggtgctgagtgttaagtgcttcacttgcatgatgtaacataatactcaaaagagctctggaaggtaagcatttctatcagtattttacagatgataggtttaggaaaaggttagggaccttgaccaaggtctcacaacgcctctgtgtcagagctggaatttgaacccaggtctgataactctcagagtgcaaactcttaaccactaaggacttgttcacttcagagggctaattaagtgtgaaatcaaaagcaatgaataatcgcaattatgccacttttaatttgagtctgttgcatatacataattggtcttcctctatattaagaaggatgccctataaaaaattagaaattctgccaacaaaaacctcctgagggaaactaagaacatctactaaataaataaatcaagtgtcttattgagaacacggcaatactgagaggcttgggtgtggccacctgacagatctggaggaaacctagaggcaaaatgtaccgaatattctattgcacaacagaatctatctgtggaaagcaccccctaaacggaagtatctgtcaaagtaaaaataaatcagggtaacagcatctaaaaaatatattgtgagtgagatgcatacttctctcatttactatggtacacgaatatacttagtttaattgtcttgtttaaaaaagaaacaaacaacttttcagcccaatctataaaactctgacaaggactaacatcaccgtgcagtcatgaagcagggcgagccagctgaggcttttggtagggtcttctctgcaatctgcttctactatgtgatgggtcaccaggagcgcaggctcactgaggactctgctttgcatgatgaagaaatcatctggatctgttcacagagacgggtcattccactcaaactcataaaagccaggctgacagattaactgaaatgcttatcaaccaatctgagaaccagaatttcccagaagagcagaggattaggatcagattattctgttttttaaaaaattaaaacatttcctgagcacctactatgggtcaggatctgtcgtaggcacttttacattagtggtttcatttaactctcacaaccgatctttggtgtgagtactttttaagtacattttagatagaggctgtggcctggagaggcagaggaactctgctgaggtcatgcagttagaggagcagcaaagctcccagaagagcacaagtgccccagtgctgaggctacgggtctcactatgcggaaaatcacaaagttcagaaggtgctggcaagggagcccagtggtcataggttgctgtcatcaagcctaaagacttaaaatgcactggtgacatatggctgccagttgggctgtcataatcaggaacatccctaaaactttcaggctccccaactccttttggtgactgtcatacagaccagcagccagctgtttgcttttgatataaatgtgttctaatttctaaaatgtaaagtttaattatctacatttattttattttatttttcctgatagaatgtcagtagacacaccatgaatttgtatagaatgtcagtagacacaccatgaattt

SEQ ID NO: 47006 - DNA, 454 bp, Homo sapiens
attcttgttagaggaaagcctgccacatataagacataggcacagtctaactcagtcgttttcaaactcatctcacggcccttttacaggctcacaaatgatcgcagaccctaaagagcttttgtttatgtgagttgtttctatcagtgtttaccatactggaggttaaacccaagaaagttttgcaacatgaagacacaggcacacatcccagaagtgatgtcattgcatgtcacagtctctttaaacaccgttgtgtatagtcaagagagaaagggtgaaacaggtaaattgtatcttagtattattataaaaatggcttttatcttgcaggcagacagcctgaaagggtctaagggtgcccctcccaagggtccctaaaccatagtttgggaaccactggtctagttcaaacttgtacacatcggcagtgtctttgaacacgtaaatgaag

SEQ ID NO: 47007 - DNA, 657 bp, Homo sapiens
gatggtcaagtctgcatgagggtttgggagaatgcacaccctgggaaaatatgtgccccacaatttctttaacatgtaagaatttacaatggttgtcagaatttacaaccattaatgcctgtttacaatatttaaaaggtgaataaataaatatgaggctgtctactctgtgtaaacccatgagtttgttatcatattccacgtacactaacatattccctgtagactggcctcagggatgacagcagattcttgatgggccttatgcgcaggaatgccctctgcttctctttttagctggcactgatacaccaacatgcgagctatccaaagtcccaaagtacacccctttctggtgtttcctcagaccctggcacagataggagttcaagaatgtgaggaatgaaggccctacctgatggacagcaactcatgaggtatcagggtagtcctgttaaattagtgcggccaactgctaatccttttgtggcacgggatttgggggattctgtgttttctagagggatggtctctaatggattcaaaagagagctgtcaatgtctaactgcaatcagcatcgccctggcacttcaaaggaataacaaggaccctagaacgccagggccaccctccatccgaacacctccctaactgaa

SEQ ID NO: 47008 - DNA, 2538 bp, Homo sapiens
tctgttttcaaatattccctctcatccacgcggcatattttcattacatttgttgtaagaatgtacatttagataatctactcactattcttttatgcattcttttactccagccaaaaagggaaaaagtccctatccaaacaaagctaatgcatgtaagcaaatttgaaggaaaaaaagaatttcatgaatgagcgggagacaattttttaatggaatgttttaaaggcttgtggtataaacagtaaacaaaattgattcactaacattaatactgtttgccatgatgtgagagttggtctttttttttaatgccccagaagctaaaggaaaataaatactgtggtagggaaaaataataccttacttggcattttgaagtcattgctcaatccttcttgagcaagaaaaccatagtaatgactttgttttacctaccgcaattatggtacacctcgcagcaatccttcacaatattttcctccctctgttcaagtcctgctaaataatctctggaaaccattaactaagagtacggttccaattttcctgttctccctcctctgctgcctcagtgtcatgttggcgtcaggacaaagcaaacttgtatgacatcacagagcaaactcattttctgtaaaccagccccttggtagtttaccgctactggaacccaacgctgtcaacagtgtggtctttgtttggtgggtgttgctctaaaaatttttttaaagtttcccaacaccttcttcttttaaacagaggcaagctgctggaggcgccgtcctcgcctggcccgccccactctgtaaactagacattaccttatacacaaatgactctaggcattcctcagtctagctgcctcactgcaaaattcctatgctcctcagcagcagggcagcgcacattcccctggcttcccctctttcctcttcccccaccctcctctttttcttttctttcttttttttttttttaatttccactgcctcactgtgtttttgtgtaaatgatctcacatgactcaacaaatccatctgcctgaagcaggccaagtctggagccctcccaggagggaggagaagaattgctttgtggaaaggacctggagctctgccctttctctggctcgaattacccgcctgtcaggcctgacggatttggctaaaaataaaaggaaacgggccgtgaaaagcagatgaatgggctcagcagttccttagataacacaggcctgctgttgcccaaagctccccaaacagaaacttcaaatgcagggcctctgagtcagtgatgtggcttccaggtgaacgaggcctgtcaaatccactggagttgggggacatggcctgggctgtgaatttcggtttcctttccgtgtgtgtgtgtgtgtgtgtgtgtgtgtgtgtgtgtgacacagagagtgagagtgcacgcaagagagattgagagagtgagagaaccagtctagtattaaaaggttctcagaaaacagtagacttcagtggagtgaaggcttgtaaaaaaaagaaaaaaaattgttgtttccactacaaaattatccttctccccacctccaacaccagacattttcagcctccctatgatgtcacttctctgtttagagccagcaaagagctaaaagtctttcttgtaagtgtatgcccagcgcctgcagtgggtattaagcacttaggttggcaatgtaatgacacactgtaacaatctgtaatatgaggcagtcagcaaagccctggctctgaaagctatttctcccgaccattaaccatatgtttggctcctcagatagccaagcgggtgttccagcttaccatctggtttctatccacacaagcaactgcaaagcacaggctatgtccctctggagctgtgtgtttctttttctctctcttttccgctcttctcttcccctttcctcctcccagctcctttggttccttctgctaaagaattctctgccattcatcacgtacaaagaaaactttacctgacatggcagcggcagagccattaagaatgcacagctgtattgtaaacacgccagagggccatttaccatccgcggaatctgtacaagtcgggctctaccccttcctcatctactgagtgctgacacttgatccagcatgttaaaaacaggtacattcttgagagatccaggggttgctgtggtgcccttcatactcacttcatattctgggagtggggctttaaaacacatacacacacacacacacacacacacacacacgctcccgaagtttgcctctgcattcaatctgcctgacgtcagtctcacacaggatgacataccaccactgcaaataaccaacttaactacaggttttgattcttttttctgcactaagggtttgatcccaagtgtgtatttttctgagtttttttttttccgcctaaacagcccacattgaaagagatgacacttcagaagaataagaacatgcagccgcttgtaacaaattgacaacctgcaaaacttatgcttatttacat

SEQ ID NO: 47009 - DNA, 1699 bp, Homo sapiens
ggaagggctgggagatgaggccaaagaggtaactgagtccaggttataagaaactctaaatgtcatgatatagcttagaccagtgctggccaacagaaacacaaggtgaactaaacctgtaatttaaaactttttaataaccacattaaacaaataaaaagagagaaatttacttaatattatagaaaaaagtattattttaacatgctatcaatataaaaagtattaatgtgctattttacaaattttgttcatactgagtctttgaaacagggtgtggattctacacttacggcacatctcaatttggacaagccacattttaagagctcaacagccacctgtggctagtgactattatatttggaaagcacaggtttagcccttattttgcaggcagtgcagaccaaaggatatgcttggttttatttcatgagacaatggcaacaatgtgaagaagcagaaacattgggtctgggagaaggcttctgaggtggcttccacagtccatgcaagggacacagagaagaacaaggctcagagcaagtaggatggcatggaagagtcagagtcagaagatacttgtaaaaggaattcagaaaactttagaagactgtatgtgagggatcaagtgaaggactcacagaaccattacatttttttcatgctgaaatttgtgcttagaatgaaagctcactgattgtgtatttaatatgaagtttcattgttccttttgagcttgcttccttctgcagtagaatgcagtgtcacttatgtaggatatagtaaattcctcttcaaagaaccaatatggtacgttcagcatgttcagctctcctgttctttgttctccattttaaagtttaaaacttcctcgttctttatgtctccttgcccctagtttcagtaaacaaccccctcttagcctctatcatctgctcttagtcatccttagtcacctgctctgtccttagtcaactgctctgtccttagtcatccttagtcacctgcactgtccttagtcatcctctgtcacctgctctcaaacagtccttcctgccgaaactactcaacccgccactctggcgcgcacccctgctctctttaaaacagccaatcggaattagcttagactgtgtggtccaaccctagccaataggggaaagacacagcagtagggactagctgcgttaaggataagacccacttccccttccttgtccagtgtgctctcgccattgctccatccatgagacgcacccttctatagaagcaaattgccttgctgagaaaacttttgcctgggtgctattttcacttggtggcaccgagcatttacttccaacacttaataaacatgtgctgagtacccaccacatgttaggcaacgctgggcactggggaagcaaagctacgacataattcttactttcaaagagctcaaatacagtgtaggagacaaaacaaattacaacagagcattaagtaaattaataaacagatatgcaaagaggcctacaaaatgttccataatgtataacttagaactgtttcatataatgtattcaatggcacttgtgagatggagtggggctttcagatagtaaggcttctatcagctgacttttttgagacagggcctcactgcagttgcccaggctggagtgcagtggcgtgatctcagctcactgcagcctcg

SEQ ID NO: 47010 - DNA, 1805 bp, Homo sapiens
aaaatatttacactacttctacttttagattactaatatctacaaagaaaaaaactcactcctaataagaatgaatttaaaaactcttcctctaccttgccattgtttcctactgggaaaaagctaaagtgagggtggtgaaggcataaaacaggctgggacacaagacagggatctaaggaaaccagcttggtcttgcttgagagaaactcctgatggctttccaaccacagctgctaatattctgcaggccacctaactgaacagcaactctggtaatttgtttttaatcagactaattcttcaatctcattttcctgtgacaagatggctgtttctcacggtgtaagaaatgatgatgtgcttccttcttgggggagtgagttgtgatactgccttgtgtggagctcatctagtgtctcctttcatttatatttcataacctccctgctgtgagcccaagaacctgaagagcacacctcacttcctattttgaaaattaagaaaaagtatacattttaacacagagtcaaaattgcaaagttaaacgaccactaactcaaatactgattttaaggcaggagcagcagcaggttagctgctgcactgaattttactgactgaaagccactagggtgtttgccaatcaatgctaaaatgatacttgaattaaaatcaatacacaaccccatatgtatgtggtgtgccaggaacagcctaagagttgctcgacctaggatctaagatgtccacgagccacaaacctggtaatctttgaaattagggttggcggatttagttttctgtcagctgggaatgtcctggcattaaaccaaggacctcaatccccttaaaacaatgaattcagcaacaatcttgacttcccagacataagaagtaaatcacattaacagctgagaagaggctatgaactttctgtttgaaggtcaactagaaaacaagcgaaagatcagctgaaaatgtcatgggtgaacctgagccaggtgctggctctaaaattacagcaaggtccccatgaaacattaaaagaacatagccaccctgtaaggtgttataggaggattctcttttcactttaaaaattatttatgtatgcatgtacatgctttaataatctctggcaatatgcacatatttatgtatatagccatacatgactaagatataaatctcgtctatatgactaagagatggaccttatctttatatgactaagagattatgttatctctgaagggatcaaaggtcacgtttgtttttctgttttccccaagctcagcactgacatgcatgatctccatagtaagggggggggaatacacacacacacacacacacacacacacacacacacacacacacacgctgactattcacatacagaaatatatatttgctattaaaaaaattaaaaccacatacaagaattagccaaacagtaggaaaaacgaacacatgaatcaaccccagaaccaccactattttagacttgccaagtaaaataaagatctaaaaattcatcttatagaaaaagaaatctgagaactacttctatattgttacagaaaatacaaaaacagatatattttattatttgaattaagcattaaaaaaattcatcttacaagtaacaggtatatcctaatctttaaaagttctatttgtactagtcatctactaggtcaaaaaaagtttaatacaaaacatttggaagtaaatgaaaaaatactgcatttttccaatactatcttttttaatgaaatatcaaaaagtttaacacatgt

SEQ ID NO: 47011 - DNA, 1730 bp, Homo sapiens
cactctgctgtttcctctgactcgcattttctgttaaccttcctcttggaatcctttgacaatgactcacagggttatggggctacttagcaataccacagccctccgcaatagatgctgtgtaggagggacgcagctcagtggattgtagtctgcaccagtattttcctttctgcattcagggaggatttgcttttcagccacatttccctcaaacacagccccgacaggagatgcttagcgcagagatttctaaacgatgaaatgatctgagtttggctccttaatcataatgaaactaaaaacagtaagatgagaaaacaacagggggatcatcattcctacaaaaaacaactttatacttgggcaaaatcaagagattaaaaaaaaaaagctcaaactaacattttccaacctttcactaagagcaagggctaaaaccacatgttttgaaggtcttgcactgtgttattattagaagtcacaattctattgatactgatgagtcattcgtatcggcggaaaccaagaacttccatcaacatcatgttacacacagtcactgtggcttttctttattactggtcaaagctgcttcagaatgcttattgaaacttaagaaaaagaaggcaaactcctcaagggtgtgcaaagctttcccttccccagctgatcttactttaatcatcctttttcaagacagtttatgatgattggatcaacttgtatctacaaaaggaagtttatttagaagcctcagaaaagcaacatttcacactttccgatgaaaataagcaaaactgaactctgaaaacaaacagtgaaaccatctctgaaaatacatgctagctttaaaatgacctgaggtcaagttttttgttttgttttttaacctcaataacagggaacggatataaacaaaagctgtcatcacttagggacttcagccacataaaacaatgtcaggctagtcacttgcaccctcgcccctgcttccctactcaggacacactgctttgcactgagggagaagtgggtcaggtttcagttacgccaagaaagcctaactaagttaaaggtttatgaaaactctttctgatcttagtaggaaataacagcacattcccttttcatttattatcagccccttttgcctctccccttaaatattcccagaaaaataaagtgaagcaaaaaaaaagttttcctgaggcatatccagaaatgctatgaatctttatgcagtccctacaaaggtagaaatttgtccaattttctcccctgcaaccagaaggctgtgtctggctgctggcaggagaagaggacccagctcagcagtgaccacagatctgaaaatagcctcccagtagctaaccagcccagcagcccggagctctccaagggcggtgctggtactatgggcagtttacagtgcggccagctgagtgctacaacagctgcatgagtcagcaagcactgctggtaggaaagtgctgacatgctaaattactctcgtgtacttgagatgcacacacctacctggcaaaaacaaaaacagggtacatgcaaattagcaaacgggaacctctctacgcttgcagtttctattttccaaggttagaccaaaaatataaataatctatgccactgctcaaaaagaagtaacaactaataataattaatcatggtaataaacaactcactcttagtgttgctatgtgtggaacagc

SEQ ID NO: 47012 - DNA, 595 bp, Homo sapiens
atgctgaaaaataagcacagtactatacattcatacacttgatcatttcccaaattgagcttcaaatgtgtgcttaatgtttcaagtggctcctgagaatgatgcttcttgactaaagatgacaacttcggtgtctggcccaggcagagctgagtcagcattctaaacagtgaccctgcaaacctgaggtaattgggggttactgccataccaactgcctgagtcctttaaaaccattcaaatctccagctgagagttgcaacatgctaatctggcaagataatctcttcctgaaattgaccagaatgagaacaaaggttacctccttttatctgttactggtagctaatatttctaattaggatttctgatggaattagttctgaatgaacatcttcctccttggtagaatactctacctcttacaggtatagttttttaccttttcctacccaccaaaaaaacaaaaaacaaaaaacaaaacgcaaaaaacaaattccctccacctaacaagagggtaggagtgtgagttacaagtaaaccctggagacagagccatggtatttcagttatatgcctagtacttcttttgcct

SEQ ID NO: 47013 - DNA, 916 bp, Homo sapiens
aattaagtttcagttttagatagactgacatttgaaattaacaaaaaaaaaagtaaagggaaaaaattaaaagaccctgaactgacaaaaaaaaagaaaaaaaaaagcaactactgtcttttttttttaaattaaatgtcatcacaaacaaaaaaaaaaaggtgaaagttgagttgtattttgggcaatcttactgagtttacaaaatgtttagttcatagcaggtttcagtttggacatgaacagtttgtaaatatttacataaaatttaaagataggaggacagcagaggtcatatattgctattaacaatacagaagcgattttccgtcattcccaaggccttggtgctgcgttcccatatgtggccccagctctgccaaaagcttgtcttcttttccaaagaaattccaatttttgcaaccagcattgacttctgaactgtgagtacctctgacagggtcatatgtcgctgaaacttcttcaacatccagacagggaaaggagaaaaacagggaggcagatttacagcgtctgctatctgaattgcagattttgacaaatatgttacattttatattgttctctgttctatgtgagggcagggaccatgttctctgtatgtcacagtcctacaccatgcccagtcattgattcaggactggactgtgtaatggaatggggaaataaccttcagacattcaagaaaacatgcactatattcagattaagttcattccaacatgagattagttcttccaactctgcagaatgggcaggcacgacacctacttcaaagggttgctttgaggaatcaatgaagtacattcaggcaaggtagtcagcactgggtctggcacatggtgcggattcagtaaatcaaaactattattttggtgagtgttctcaaatgtca

SEQ ID NO: 47014 - DNA, 3837 bp, Homo sapiens
gagacactgaaagttaatccaagtaaaattaaactgctctcaacaatacagattggcttgagcccttttgttggcatcacaggagcctcgattaggaattctgagaaacagctcacaagcgctaatgaataactaagtcctgtcggctgtgcagacagtgggcccagaagtgaagggctggcctaggagagatctgaacatgaacctgaccatctggccctctgtgactcactttgatcacaaaatgaattgcaacaaattgaagagcacatggctagagttaattgtctcatctgtaatctgaatctacttttaagcagttattattaccctctatcaggtggaaacatttcctaccatcactgcaaagtgcattttcctgatgaactataatggatcattaaattccatatctgaataacaatactgtgcacttattcagtgcctttcatccagggatttcaaggcagtttgcaaataattaagccccttacacagcagccagaggtgagctactggaaaagaattgcctgaagatactaagtcaaagggcataattcaataggaaaataataaatggctttctcccaggcactggtaatacagaaagtgaatcctgatcccctccctctctttcacctcaccccttcttcttcatagcagatcctgacatgcaacatacaaagaaccaaaaaagtaactaacaggagtgttcacaatttagctatgagttcagacacacacttaactgagaagtgtgtgtctccatgtaatcctggcaaacacactaccaactgacatttcagtccacctgcagaatagacagacagcagaagaatttactcaacacattcatgattaccaaatggcaaacctgaagcctcctgcaatgcaaaacgaaaatacggctctgcaccaataaagttatgttctaacaaaaatactttattccatggttgtgtgttccatttctgggacttcgctctatttcaatgatattcaggtttcgagagtaaaaaaaacgttggaaatgggcaatcaataaatttctttcaaaaaccagaatactagaagggaaaacatttcagccactcaaagttttgtggtgaaattataaactccagaaaaactgaatttataatggaaatgctgacagacctttcagtggagcagtttgaacgcaacactgtaatttggcaatctctcttacagactaaagactaattctaacaagatgtcattttgactcacgtttattattacctgcaagaatgaaaaacgccgtttactcgggaggtgcccgagaaccagggtggggcgatctcacattttaagcaagacgcccgctgccttaccaaaatagccctctccgccaaaggaggggcagcctttcacgctcagcttctttcatgtcagcccgagcctttgcagcaagacgtgcctttcctacatgttacattttaatgatctgagaaaaccgttatcagcgttaacatctctaattttactctaaacagacaaaagcaaaatatctcattaggcatcatctccgccaaggttcccactaggcaggaaaggatttttatctaaagtaattaccctttttagttaaatacactcaacagatgaaatttacagagagtgagagactgcagcactagacagcgaaggtgaaaaccaggaacgccgcgtctcgccgcccgcgggcccgccgggagactgcgggtccgtctcgcgggtggggcgccccggtccctctcgtttcctggaggccacaggtcacggcgacggcggtgaccgggagagcaggctgcgaggcgcgcctcatcgggccacagacaaaccaccccggcagcggccgcgccggaacttccctcaagttaccaaactcgcctacgcgcgggagagtgctggggatgccccatgcgcccgcgaccccagaagccaggagtgtgccaccccttcacacactcactcccggccctgcacgcttcccctcacggtccgagttcctgcaaatgcttggccagaccgaggtcgccgagatgctcgctccagtctctcccctcgtgggcacctagggtagcccgtgagcgccgcccgccgccgtctccagcggcgccgggctcccgaacacccgccgggtgagcgaagcacagcggggccacggagcgcctcgacgcggggacggggagggcagtgtccccttcataaaccagtctcctgggtgaagcttctggggcttggagactggagtgtagggtgtgtgtgtgtgtgtgtgtgtgtgtgtgttgcaccttgacttcatggaggatctgtgggagaggaggtgcaaggtttccctctcagaagcctggcgcccttaggtcttagctacgcgggacgctttccgacaacccgatctttcgctaggagagattcgatccaggtctgcgccgcgaggcccccagctcgcctcttcctgcgaccctaaacttgggctttgattccccgccggtcgcggtggtccgggccacccggcggcggctgacagctgagcgcaaaggcgccgcggccaaggtcctcgcggagcagcccgggatgcgcacgccgagggttaaggaggaggccgcccggcctggagctgggatcgcaggctgggggccgggacacccgggcctcgccgggccgggggcagggccgcgggtctgacagctgctgcggctcgcgcggacgcgcgcctcctgcagcccgccctccccatgcctgacttattactctctgctcctcctccctctgctgttccaaaacacccttcgacgccagcaaaatacaatgcgcctcggccgccgtaaacagccgggagggagagcacacattcggcgcggcgcggccgccggctcggctcccacccccttcccgttcctagaaaatgccataaaagcgggcagggcgcggggagggcggctgcgcgcccggcggccggggctcccttcccgcgccgtttccccacgcctccccgcccgccccgcgcgcccgctccccccgcaaacttgccccgccaccccgcccagcggcggggcccggggcccggggcccgggactcacctcgccggagaactttgcgtccttttccgcctcctcttccccgcgtcttcccggctcgcagccccctcccggcagccggcgaggtgggcagttcgtgggtcaccgaaagctcgcggaggggacgcgcatcacatggcagctcgttcccagccccccgagtgcgccgggaagggggaggggaaggggcgaggggaggccggggggaaagcgagagcggggcggcggcgggagtgggcaggcggggtggcgagggcggcggccgctcacgttagcgctgtgcgaccgcagcccgggcgtgcacggccgctgctgccgctgctgctgctgctgctgctgctgaggcggcggcggctcggcgctgtttgctccgcgccgcgcggcttgcgctctccccggaacgcccacactctcaatcgctacattgttgacattcggcgctgacgtcacccgctccccattcacaataactttacgggagccgggcagcgcacctccccggccgctggggcgcggtacgcccggcgactagcgtaagccgctccgcgaatggcgctccgggggctggggcggggggcgggggacgggggcgggcgcgcgcgctccgctggctcgcgggagggggcgcgcctcatgccgccgcagcagcagatctccccgctttgtgcggccgcgcggcccggagagccccctcctcccggcccggctgaccgccccgctcggcctggccttcccggccacgaaagacgaggg

SEQ ID NO: 47015 - DNA, 1106 bp, Homo sapiens
cagaggatatttaaatttaataagattacattctatgctaataacttgaagatattgatgaaatagatgtttttctggggaaaattgctaaagttgattaagtaatatataaacaaagtaagttttacacacacactctcacacacacacatgccaataaccttgagaaggaaattatgaaatcatcaaaatatctcctttcaaaagctttctgggtccagctggcttgctaaaaaattcttcaaaatttcagaaaatgtatgatttaatatgttatagaaaccattcaagaaaataagtgaaatttaaaatttaacaaattttgtttatctattcacaagttagttgatggacattttaaaaactagatgaatcagcaattccacccctgggactctaccaagagaaatgcaaacatgtgaaaacacgaagtcatagtagcaggatgaataatggacccaaactggaaacaatccaaatgtccatcacctgttgataagataaaaatgcaatgcaggccaggcgcagtggctcacgcctataatcccagcactttgggaggccaaggtgggtggatcacctgaggtcaggagttcgagaccagcctgaccaacatggtgaaaccctgcctctactgaaaatacaaaaattagccgggcatggtggcacatgcctgtaatcccaactactcgtgaggctgaggctggagaattgcttgaacccaggaggtggaggttgcagtgagcagagatcgcgtcattgcactccagcctgggcgacaagagggaaactccatctcaaaataaaataaaataaaataaaaacgcaatacggccatactaaggaatactattcaaccctaaaaaatgacttaaatatggatacaagcttttacagcatgataaaacatgaataaacctcaaaaatattatgctatgtgaaaaagccagaaacaaaatactacattctattccatttctatgaaatgtccagaaaagacaaacttacagagtcagaaagcagatcagtggctacacagggacaggatttggagtagaggtggagggggatactaggaacctttctaaaattagaatttctgcaaa

SEQ ID NO: 47016 - DNA, 2420 bp, Homo sapiens
gctttggctatttgtgttctgttgtgacataacttctaagaagggatttgtataaaatgtgtacaacacgttatggtttattaactttctttcactggccttgtttaattttactctcaccttatctttttagggttggtgacattattctgattttgcagatgaggaaacagaagcacagagacgttttgtggcttgctttgctgtccttaggcagagaggagtctgatggagagttaactatagtattctccgtggcagatggctgtgcctcctgtccagggcaatttgccttagcaggctggagaacaaagagcactgagccaagagtccttggccccaccaccttccatataacctgaggacttctgtttcctcaatatggttcttggggtcgtttttaggatgaattgggttttgtgagaattgtgtattgccatgcaaatatatgttatgaataatacctttgaacagtcattcttcagcttatggaagcctatccatttaaggtagaaacttaagatgtatctttctcctccctgtatttggtaaagttaggagctagggcagcatagttgaaatgaattaaaagaacttttttttccatttttctaatttctatttccataatataagtacccattcatggaaaaataaaaattaggtaagtgatagaaattacaaagaaagttacaaatattcaaaatgcttcagtctaccaaccttgaagaataaaatattttcctattcaagaacaaagaatcttgtggttatgttgatagagaaaatatctttaagccacactttttaaaagtcatgcaaaaataagctctgaggtttatttgttttagtgggctgtgctccactggcatccttcctgggaacatcattcttctttccttttgttttcccctgaatttttgagcataggtttacagtttgaagggggaaaaatattttcagcttacatttactgttttttttttttcagtaataagaccacataaggttgagatccaggtatgagaaagcttaataaaacttaatgtcttggttcttgatgaccagccagtgcacatgccactaagtaagtgagattcatcctctaaggattcacagtgaatctttaaccctgcccttgagaaagtattaaagaagatccagagacgggagcaaaacaaaatacacaaccagagacactgtgtgctgtcagcagcaggcatgtactggtcaaggaattagatgactcaaggtggtgactcattcagcaactatgtagtgtttgcggttgaagagaaaccttggccagagaatgactaaaatctattggcagcgtctttaaaagaatcatgactgggcctacaccagcgaatacgcaagtgtgctttttttcttcgtcttttactaattcaagactgagagtaagaaaacaccatccttgttgacgcccactattacagcatgctctccagggcattcccagcaactacgctcagtgagactgagtccagatacttatctctgtgtttggacgtggtcatatgtgtgcatgtttgtagttagtaggatgaacaagtcagacttatacaaattgttagaggcacttgttcttgataattaaaaaaaaaaagccaagagaaagtttccaaatttagttattgtattagtttcctgggggctgccataacaaaatactacaaactgaatggcttaaacaacagaaatgtattccctggcagttctggaggctggaagtctgagatccaggcgtcagcagcgttggttccttctgaggtctgtgagaaagaattcgttctgtgcctccccctgagcttcttggtggtttgctggaggtccttggcattccttggcttgtagaagcaccgttgtgttctttatcttcacctccacatggcgttctccctgtgtgtctctgtctccaaatttcctccttttagaagaaaccagtcacattggatgaggggcccactctgctccagtatggcctcatgttaactaattgtacctgcaatgctcctatttccaaataaggtcacatttctgaggtcctggcagttaggactccaacataagaatggacaggagggggacagaattcaacccatcgccttctccatatcagccagagctaatttattacaaaactagtggatccatttgaaattttgtgctaatcaatgttagtctcttttttaagtccagaagaaaatttcagttttaaaaaagtttgaatatatttcatattagaaggagtaactatttaaaaataatagagactcactagcctaaaacaaagtagttaaccaaacaatttattaatcatctgggtataatgccatgtaaatacatttgcatttatgaatgcaaatgccacacaagcatgccatcattaacagtgc

SEQ ID NO: 47017 - DNA, 900 bp, Homo sapiens
agctgacaggagcctaggaaggagaggaagctgacccagggacctaattctatttagttactaatctgctgtaagcaattacatttgaagatccaattttgcaaaagatcaatgagaacctctggatttctctcttgtagtagttgtgtaatgatctgaagctcataagcccagggacatatcttattttcccccatattcccaatgcctgagccagtgccctgctcaaagtcccgaataaatatgtatttgttgagtggacaaataaacaaacaaatggatgaagtctcgtagatagagggtgctttgtaggaaatcatttgagtagcaagattctccaacccacgtaacacaggacctgatttgcagaactttgtttagacatagcatttcaagagcacgttttctgaaccataaaggaaagtagggttctagatgaataatgccttttcacagtgtctgagtcacctcacacccctcaccctcatctgataacggcccttggcagatctgcccttttgcaggggattccccaaggctctcacctcttgcctgcccctgtgtgtgtgactgcagcaggcacagggttgccaggcaccagaatataagcacagagctggaggaaatgggaggaatgatagggcaagtttatggcagtgaaacttcctgacagtatgcatttatgggaatatcatacacatttcaccttatgatggtattttttatgctgacaggaagataaagctgggcaacaacggaaaagttgactaccaaggtagtgttgaaaaggaaagagtttgtttcaatgagacattctcattatagatgttggcttagtccaagcttctgcctcctctcccatcacagaggttctcttcttctaatatattgtggaggagg

SEQ ID NO: 47018 - DNA, 1512 bp, Homo sapiens
taaaaggcatctcaacaagtatcagagaactatccaaagctgatgcatatttatctgaactcctttatgtcaaatctcttatcatcattgaaatctttagttttttatatatatatatataaagtatatatgttatataaatatatgttttatatatgtgttgtatatgttatataaatatatactttatttatacacatataaagtataatacattatatatattttatatatattatacatatatacgcacacatatataaaacttgggtgtgtttacttataaacaacactaagcagagtttctgctgacagacctgtcaaaggctggcttcctgaacattaccaccagagccctttaataagcaaagcagagagtattactcaccatagtacagaagagcaaacaccatctaggcagagctttggcaatgactcagaggagaaaggtgacatcagaatttcttgaaaattggaagtttgttagcagtaagatcagtggaaagaggaaggtggggattccgggaggagggatacaaaaaaacttagggtgaaatgatctgctgatgctttcctttgaagggttgaggaattttttgtgaagtttgggcagcggtcctgcaaaagcaaagtcgcgttaatgtagacagtgagaagtgctttcagctcttggtgcccaggctgagtgtggagtagattgtcttgattctcacacctaggagaagatctgcttccctggggctggagtcctggggacttcttttgtcacaggcttcaagttgcaggcgtgttttgattgggttggactaatgctgttttgctttgggctggtctattgccaccatgaacaaaatcaagcttctactgcaaggaagaaagagggaatgaatggccattgatcaggcaactagtggtgtctgttattgtgaataggtggggagataattgacccacagagaggtcctgcctgctacaggccatgtatcctctggggcctggctgtggtaaggctctgcctcggcactgctgctgtcttttccctaagcccagtgcgctgacttccagggtcacattctgcggagttgtagcctcttatcagcaggcatgccctgtcaagatgataactgtggcaggatacattggcttgctctcaggtcagtccagcctggtgctggtgggtttcttcatctcattgcattacctcatctcataccaacttctgctctccccacactccagccacactgcattcttgtgcctctaacactttgactcagttctgcctcagggcctttgcactcgttgtgcatctggctgggaacaccctggctagggttgtctgcaggactcccatcactcaggtcccagccccactgcctcccctgcagaggggcctttcctaactgcccttttaaaagtggcctctgcccccagaacattccgcttatcacccttctttgcatcaatctttctctgagattatattgtttaccacttactaatttgtctcca

SEQ ID NO: 47019 - DNA, 986 bp, Homo sapiens
accatgttggccaggctggtctcagactcctgacctcaatgatctgcctgcctcagcctcccaaagtgccgagattacaggcatgagcccccatgcctggtcttgcatcttactttaatttgatatatgatacacatcacacacacattacaagatcttcaattagattataaatgcttatcctcaaaattcatctgtattagaagacattacctgggactttccactccattctcaacatcccagccaagtcaatatctatctacaaacacaccattctgtgatcatgtctcatcctacttccccttatcagtgtgaccttaattcaggcatagtcctaccatgctgctgctctcccaggcctctgtctgcccatgggagtgctatttcccttggaagttccctttgccattctctggcctttttcatggcagtcccactgcttggaggccgcccttcctgcacgcccacctgcttccacatgtttggaagcgcttattcacttagcaggagacattaagtattcatcattttattctgcaattattcactgatgcccggtgcccattatacagcaggcctaagtgctaagaaaacataaatgagaaaaacagacatggtgtttgcctcctgaagcaaagtctcctgagagacaaatctattaatcaaagaatcaactgaatagtgagtatgatgaaggagttactggatgttatgagagtatgtaatggtggcctgatctagtctagaagagtaaggcaaggcttcttgggccttctagctgagatctgaggatgatttgcggtgaactaggtgaagatggcagagggagttccaggcaaagagaagaatgagtgcaaaggccctcaggtggaagagagcacacgaccttccaagaagtaataagaggccagagtgactgagctcagggagcaaggagaagagccctgagaggtgaagtgggcaggaactacattgagcagggc

SEQ ID NO: 47020 - DNA, 682 bp, Homo sapiens
caccaagaaagataaggacagggattagccacttggaagtcactggtgccctcagacccacacaaatagctccatcacaaagtaggatgtggtggaaaacaaaatgaacaaaatgcaagttgaaagggccacgtgaacccaggagaggaaaatcatttaggacgaaacaatcacggaaagcttcatgtccaaagtagcatttcacttgggtcctgaaggatgggtgatatttttaaaatgaaggccagagaagtggaggaagggagggcacccagctgactatagcatgagcaaaagtgcaatggcagagatgtttagggtgtgttcaccaagaggtgaacagttcatgcttggtctgatggctaggggccaaatgtgagtgctggctaaggagaagggactttctctgttcaatttacaaatgagtcagctgtaatttaccttcccttaggttatcggcctgaatatgtaaatgagggatagctgtcactagaatgaaactgacatctagaaaagcgcctccctataatcttgcctttccatataagggctccctggcgtgcttcacaggtgaactctacagcaaacgcattcttctctctcctttcagccttggtctttcctctgactcaggggcctggcttgtggtgctgaggcaccttccggctgctgagaattggac

SEQ ID NO: 47021 - DNA, 472 bp, Homo sapiens
tccccaccctctgcccagcatagggaaagctcaggtggctggaaggaggtcagaaccaaagttcagaaatacagaaaagcttaaagggatttcctgagctagcctgggaacctaagcactgtcattcactggttttaagtgtgaatgtgtttcaaatttcaaatagtagcaatacacttggcatttcagaacataactgctagcaagttatatgctgcctgcttgtgcaccaaggtccaaaaactgcttctctgtgtttcaattgaagatgactcaggtgaattacagaacaccacatggttgaaattccttttatatgtggtcttctgggtttcagaagggctgtccacatgcaggccttctaaagagccaaccaccagtttcctgtataccccagccttggggctttttgccatctctctgctttgttattaaacagtcagaagtgggctgggggtggtggctcacgcct

SEQ ID NO: 47022 - DNA, 1033 bp, Homo sapiens
gaatgaagctctaaggaccaattatagcaacaatgcttaaacatttcaggcagcaaaattggctcagctacaagcttgtttaggcaagaaaaaaatgcatatttcctatatttttgatttatagaccaacccaaagagtgtgtgatttctgttgattttaacataaagtcacctaaattaggagtatgcagttttaactgcaatagttggcatggctaatatgggaaaaagtagattaacccgatgcctcccaaatgtgcaaatatgctaagccatgtttaaaactaaggtaactctctagggtaatttttctggtctgctgtgatgtccccaagtggctggcaagtgtcatctattggcaaggcctgaacaagagcacagcaggaaactttccccttatctgtttgaatgaatgactaagcaaagtttaaaggccatttcactctgctcttaaaggtatgtgagcatgaagatgacatgctcctttggttcccagtttcagtgtctgatcagttaggcataaaggtgcttttgtctacacaggtttcatgtgtgtgttctgttgatgagtctgttgacaactccataaactaagtgtctccaaggcaggcagagattgagatttgtttctcagagattaatgaatgtgcctccatttctttccctcaaaagagacaataccacttcctgtagctttccttgcgtgcttcagattgaaaaccttattgggctgcagaaagatttatgattcacgtatatgtcggtggctattactgtagaataatctggaaaactgctagtcacaatttgttccctctcaatggttaccgactgattcattatgctgggctcttgtgtcttctctccttccttcacatctctcctcaaaatgttagattctttgccacactatttacagactgtggtaaatatagcaggttgatatcagggtcacttgtattatatatgctataatgcctacaccatgtatttttatgtcaagtgattaagaaatgtataagaaaaatggtaa

SEQ ID NO: 47023 - DNA, 1384 bp, Homo sapiens
aggcgcggtggcgggcgcctgtagtcccagctactcgggaggctgaggcaggagaatggcgtgaacccgggaagcggagcttgcagtgagccgagattgcgccactgcagtccgcagtccggcctgggcgacagagcgagactccgtctcaaaaaaaaaaaaaaaaaaaaaagaacattacgtccagcggactgaaactccagaacggctacgatcttcgctgaaactactacttacagatacgagaactggtggaccacactatctcaccagttcattctcctgtttatcaccggaatatcaaatccaaaatcaagagtacccaagagaggaaaaaaggcagctactcccgagcagttgagctcagagagtaacccccactcccacgttactgagggctgtggggtctcccgggtggaccccgcagggtcccgcgaattagaggggccccgggaggcaccttcagagccggcaccaggcagaggcgggggcggggcaggccgggaccggcgtctccatgccgggcctcgctcacctcttccacctcgatctccttgtagtcgatctcttcaaagttgaggacctgggaaggggcttcgatcatctcaccggccgaagacgaggaggaggaggaggcggcagaggctgtagacatgatccctcgcggcgcccggtggggccgggaacggtgccacccggacaatccgggtgagacccgcgcccacccgcctccggaccgaccctcagcctggagccgcgcagtcctactacccggcgatccgtggcgggggtagaggcagcggccacagccgtgtccggctctggctccgctgcgttttccgccgacgggccccgcccactacacttccggttccgggctgaaatcggaaacaggaggagggccgtaaactccggggtaggggaggggagaattttgtgacttggaaagaaaaggagggacaggttgggggtggggtggagtaagctaagaagcaaacttggacctctagaacaaatttcgcgagacctttattacagggcctcagcaaccggatgataccgcgagagaggacgcctgacgtaattaaagtgcgcgaacggaagtggcgcggaacatgacggaaaatcagtacggttggtcccttaaggaccagcgggaaagataaaagctggggtttagtctgtgctgcgtgaaatatgtcttggcctcacttcctgtcctctgagctgcctgcagccgggcgaggtggtgttgaactgtgttttttgtgacgaagcttacttttaagtttcatccctaaactaagttgacctgtttctttaagacggcttgcaaaatgtgttttcctcaatgtgggatatggaaagaagcagttgctcctgt

SEQ ID NO: 47024 - DNA, 766 bp, Homo sapiens
ttttagtctaacttctaaaacttctatttcacacccctcttttgttcaacaactattcattgaaagcatgtactgtataacaggtacaatattagccaacactttgcattattgagcaagcaagatattaatccagaagtaatataaaaccaagggaaaagtgacctgcatgctccatgaaactgcatagcaaagggcctaagactggtgctcctcttcctgaactggctgacttaaatcacaagagtttgactgtggctttaagagttattcttttagttacaagtttcctttctcacatctccacatagtttttcatctgcaataaagcacttattttattacatccacatttgcttcaaaaaaagcagatgtttttaataccattattggataaattttatctaaatgcagccaaaacaaatcctgccattgatctcttctgaactcttgggcaagggtcacagtgctctggggtttatcttcctggtatgagctcatcgttcagagtgtgtacctcctttaggggtgcagaataccatatggtgtgcagaggaagtgctgaaggagcaacatgtagtgagtcagtgtttctcaaccttgtctgattttaggagtcacttggggagacttaaaaacacagattcctaggcctccctaaactaccaaatcacaatctccaggggacacatccacaagtcagattttttgcaagctccccatatgattcttttgatcagacatgtttgtgaaacactgtagtaca

SEQ ID NO: 47025 - DNA, 436 bp, Homo sapiens
tatagaaactaatttgaaaaaggctgacctttaaaatactgaaggtgacaagagggtaaacgaaggaggtgaagaagatacaactgagcagatctcaaatcatatttgttttaaaagctaccttatgagctattcacctctcacaatttagctttttaatccaaattttaacttcaaagtagcccctgctgactcaaaagtgttataccacgcagtggccaggtgggggagaagtgcagccttattcctttgaagcttggctgcccaagatcaataggagttcacaggtggccatacttcaaaggggaagcactatgtctctgtttcggtccagcccctgtaacagttattttcgccccctccagtggcttggaattggctttcatgttatattttcacttaagaaagtaaatgaagagcattagaggcagatctt

SEQ ID NO: 47026 - DNA, 937 bp, Homo sapiens
agaagtacagtctaattgttcatcccattcaatctgtactgcacctgtatcttctgtgactgatagaagtaataatgtgccaatttggggcctagtctttaagcagcttccattctgttctttggaatatggccgtcaggctgccaggcagccatatggagagacccatgaggcagacaatttaagcctcctcttcagtttccctcctaagttctcagataaagccagaaccaacttcttagccataaaggtgagccatcttcaaattgatcctcccatttcagttaagtctccctaccgtagaccacatagagcaaggatgaagtattccttcggagccctgtctaaactgcaaaaccaaatccatgaaaaaattagtgatgcttgtctccatattagcctgtggcttccaaactatatatcgagacaccatggggtactataagaaaccctttaggagttccatgagatattttaagctttagagagaaacacaacagtatttgacacctgacagatattgtatatttactagtttcatgcagttcactgtttcaacattagaatgtgctgcaattcccagtgacatcatatctttaccaagctgggttttcagctcttccaggaagaacatcaggtgctgtgcaaaaatcaatattggaacagaaaatgagggtagcagggtccaatatgattcccaggtttgcgtattaggcagtgctgggcaggtttatacattcaatttgtaattgattgtagttatttaagaataaaataatttcctatttttatgtgtattattttttcaatgacattactttttaaagatataaacacttattaaattatatgctcttaacttcttaataaacagaactgtgtttttttctaagagtactgtcaagaaatactactgagacactaagagtttcataaa

SEQ ID NO: 47027 - DNA, 774 bp, Homo sapiens
attcagaatgtaataacattctatatgtgataattacaacaaaacattgctgactttccagtgatgtcaagtaaaaaaaaaaaattctacataaaaacactgtgaaaaaaagtgatgtgaaagaaaaaaagaatattaacaacattatttctatcattgccatctcaacattccctgacaatagcaggggataggtagagcagtcagagttacaagatgaggcactagcagcaattctaatccagtttataaacaccattgtgcaatgaatagagtgtgatgcaatgagaatctacttgcctaatttatttacactggcagtcataaagtacccagtttttaagcaagtgagcatgcattaacatatttataaaataaaatcctctccctctcatttgacatcagaaaatgtattaatcattcccataaatatattagaataggaaacaatgattatctcaataggtgcagaaaaagcatttaatcaattaaactgtcactcatggttaaaaaaaagcaaacaacaatacattatgaactggaaacagaacacttaataatcttgataaagtatttaccaaaaacccacagcaaacattgttatcattataaaatgttagcagtattgcagtaaagtgaggaatgggacaagaatgccattattacttccattaaacattgcactggatgctctgttaataaataaaagaaaaaactgaataataagtggtttgaaaagagagaaagaaggaaaccattattcttatttacaaa

SEQ ID NO: 47028 - DNA, 1612 bp, Homo sapiens
cttgttttctgaagctaatgtaagatggaaaccttcagttgtaatcctatttcaaaagttcttgctcttcacatctgacttatcctcaattatttctagtacttcagtacagatgtgattttatagaatacattcgcaaattaaaaacgccatctccatctgcctaccttgggcttccaagtaaagttctatttttacaaaaatcaaaacagttcctcaactttaaaagtttgaaaaccagtgtacttgtaaagcacttgatgcaagcaacttctgaatgtttcacataaaaacaaacaaaaatgtgtcctctgtaatacagttagagcctcccaacagagcctcagaagaccgtttctaaaggcagtgagttctacttgcagaaatagggcgggagtgcagtctgactccaatccacacgtccttcccctctgacagaacgccccaaaacgcagtcctctctttcttccgcgccgctcccgccctagtcctcttagacccgcgaccggaggctccggaagaccccgagccccgcccgctccgtgaccccgcccccacccgtcccgcccctgaaagcgcccggaacgctgtgcgcgcgccttcggggaggaggggctgtctgggctcggggcgcggcggcagtcagctctatgttcgcggtcttaacctctcctctggccgagtccttgcaagaagtgaattacccgaccctggtgagtagctgcaggagtcagacctcttggaggcggcggcgccagcagcggcggcaggcacgaggtccaccgcgggcgcctgcgcgctcgcccgccagccaatctggtggccgctttcctccgggcgccctttgacccggcgcccctctggcaggcgctggtggcgcccagcggcgagcctgtagccccctcgattaacctaggctgtcactcttaggcctgttttagtctgcgttagttttactgccttttacactgctttatccccacctcactggcctcgtcgccgcctcctctttgaaacggtacctcctgtcgcctcggattttccttgtctccccgacaaggtggaaatttcgggtcggatggaagcctttttcagcaccttctccttgtgcccccagactgcctctgggccttgagccgaccgggagagtagaaggatcgaggcctgctgggctctgggtgcaacggaaaggtagctgtcgcctctgggcatcgggaggagaccgcccgatggcgaggccgctagagatggtttttcagttcacctgttaacgtgtttggcactgtcatcttagactcttagcctttgctaagtcgggatgcaacagtgctggattagtgtttttgttgttcctttttccaaagaagcaacttgaagtacaggcaggtataactgtttggttttgttgttgtaagaccctacggataagtgttaggagaaaatgtggaagtgctataaaacaacaacaagggggggataatgttgattaagaacttgaaaataagaaaaatgggactggaataggctgttcacgttaaagtattgaggcagtagtttgaaacaaaaatataaagtaaaacctagatattggtgatactgtatcacgttgttt

SEQ ID NO: 47029 - DNA, 520 bp, Homo sapiens
tataatcatctcctttctctcattaataaatatgtatgcatgattattagactatgaagatacagctgtgaggacagttggacatttataagtctgattccctgtctacctcctccactgctttctgaaaagagaccaagtgtggttcattgtgttctccagggccaagtgagtgtgcagagttcacctaacatgtgttgacttttcccccaaaccagtgacccagtggcatggaagttgaactgtgttctctttgcctgagaacatgtggaaatagtgtgatagcagcactctgccaagggagggatcactgaaggtgaaccaaagaatctttatgaatggaactgtttatttaactgaaacaaaactgaagtattggactccagctatactacgcaaacaccaatttttcccttctttgtgaataataacagacaatactaaaatacaagagctttatataataaaaagtaaatgtcacatgtaaatagtttcactgatagagtcacaagcaaaagaa

SEQ ID NO: 47030 - DNA, 2065 bp, Homo sapiens
gacatgcatttatctcagtgagcagaggggtgactttgaatagaatgggaggcaggattccctaagcagttcccagtatgacttttccctttagcttagtgatttgggggtcccatgatttattttcaattcataagatataaaaaagatataaaaaagaaaggtacacctgagtaaatatctactcaacagggaagcaggatacatgttctctttgctttccctgtttccttgatagccatgcaccttatgtttatattcctcattatttgatgaagttaatcattgcaataagagaaatacgaaagactctagaactctagacacgaaagcaattatacagcctttatgacacgcaaatttattcactctgtaaaaaaaaagtaattactttcggtagggtctcccatgtatcttccaaaaggcagactgctctgggtgcatgtaaaaattaacacgataccctatacaaaagggaatgctcagagttaacagctagagaagagaggcgccaatcttagacacaggcttattcctccgcaccctcccccaaaacaaatggaggacagaagaaaaaagaaaagtagttaatacaactattactctacggaaatattaggggtagcgcaaacaaagttctgacactaaactttactgagccctgcatcctgcccacgacccccccagaaacacctacgcaccactctcctagccgccgcagccccgccagtctcgccgggaggaacccccagcgccgcggtacaaccacggcacttccgcccgccccccgcgcctcgggcgcaagcgtttggtgtgtctgcgtcgggggcggagcctcttgtccctctgcgcggcccgttccgcctctcttctcccaccgcctgtcggctgacgtgtctgcagttcctccgcgtctactgcgagtcaggccgtgatggcggacgcctgggaagagattaggcggttggcggccgacttccagcgggcgcagttcgccgaggccacgcagaggtgcccgaccctccctctcctttgtggagcccaaattaggccgtgggcggacacgcctgtatctgggactttagacccgcggccctgcatcccgggtcttctcgctgcttgtcaccattctctcctcctccctctgtcccgagcctggatcgcagttccaagtccaaggctcggcgggaaagtcctcagcctaggacgccctggagccccccagcccagctgcagcgaaatgctggcgcgccccgccccaccatggacggggccggtgatttcgagctgcctttattgagcatttctttgaccctccctcacccaccaaccaccaaatcactgtgacatcttggctattatacacttcctgatctagaatgagctcgaaaggagaggctaacccccgcccccagtacagtacttggcaaatagtatgttgatccttaaaacttcttgcccttttatctctcgtaacagacctagggctagacccctgaccccatctgttattcagggcactgacattttctacaagcccactaacctttggaggatgtgtccagaggagcctaactctgctttttaaaaataacgctaatagaagcctttctattctttgactacttcctacctgcgatgttttattccttttgagccggaagacagcaatccccttatgctgtattttctaccactgatagcaaactcgtaactgcatgggtaactaacgtgggtaaaagttatggtttcactaggccacatcccctgcctgcttgcagaccatgtgtgtaagtgaggcaattatgcacttaatttaaaagaaaattctgattaaactggaaattagggcattttttgttttgttttgttttgttttttcttttttcctacctaaataaatgtcttcaattttcccttcagatttgaagattggaagcaggcctgtaagagacaacagacttgaaatttgtgatgggatgatgtgtaccaattaaataaatgatttaagcatatgtaaacctacttactctgaaaggtttttttttaacttattgaatcagtt

SEQ ID NO: 47031 - DNA, 2555 bp, Homo sapiens
tgcagtcgcgcgatctcggctccctgcaacctccgcctcccgggttcgagagattctcccacctcagcctcccgacaagctgaggctacaggcgcgccaccacgcccggctaatttttgcattgtttgtagagacggggtttagccatgttggccaggctggtctcgaactcctgacctcaggtgatctgcccgcctcggcctcccaaagtgctgagattacaggcttgagctaccgcgcccggcctaaccactttaatttttttaaaaaataaacataatcatttggactgttaggaaaatactttagatggaaatcaaaattccaggtcaggctctgcgtccatcgtccagtgaagacccctagagaaagctctgtgaccctctcggattttgattccctgtatcaagtccgtgacagcagccggcgagggcctggttagcgggagcactggctgctgcctctgggtctcggaagtaggcggggccgccgacctcaccgcgggcgcggaggacagtctcaatgtcaccggcctggcggctcccccttccaacgctccgccaacccgagcggctgcggccgagcaggctgacgccgatccctcggcctccggacccacgctagggacagccgggcagcacagggactccgcgcccccgggccccgaaacgccctcgcaccactcacgactaatctgctctcgcaggaggctgttggtagaggggtgtctgggagcgacagagggcttcatcttgctgatttcccgttccgctcggttctctaggttgaaattcctgataccgcgaatcactagtgctcccatctcctcataacattatgcgctcaggttcaggccgcacgtgggaacaccggcgcaggacaactccgggacacccggagcatgcgcacaagtgaggggaagccccgccgcgggcgcttaaatgcgtgcccgtcgccccctagcgctcgggaggccacacaccgcttctctgcccagggcatttaaaagggagcccctcccttcggggcgagtgacggctcccacgagggccgcttccggcgggaggtggcggggcttaagtccccagacccacggttgcttttaacgctggaactccgagggagtcacccgggaagctctgtaaagttctgtgccgggccctaccccagactttctgatttaattcttgtggagtgaggcccagcattggataagactccacgtgattccaaagtttcagtgaagagctgaaaatcaaagtcgtaaggaagttgaccttgaagttgtttcacagggcaatgccaccaaagagttagccgataaaaatggaacttactgaaccagggtcaaactgggctctcaagttgccctttcctgcttttgtgaaaggaaaataatgaaaggatgttccctttcgatgagtatttgttctcagccgctctcatttaaatgcctcttattttcctgtccccccgcctgatgcattttcaagccactgtattctttttccattattttttacatcccgttctcatttgacctaatggtatcgattttagttatactttcccttatcttatttttgctactaatttacttctccatgctactaaatgctgagtcattccctctcctatttctcttctctcttgccttcttcattctttttaagcctctgtgtaatttaatgaaaggaacagacaataagacgtcagaaaaaaaaaacaaacaaacaaaaaaacgagtgttacattcaccttctccgtctctctccatttcctgaatgggttactgtagtgctgcttttatttaagaccctttagaaatattgttattaatctaaaataaaacccaccaggaaggaagcagtaggaaggaagttacagtatttctcttactgtggctgcaaaatctatttttagtgttctgatctctgcttagcaaaatgaagtagagtggatgtttttaaccagcttaaagtaagaaaatattgatgtaaagataatcgaatagaataataataataaaacaagaatcaaagaaccaaaatgaagaaagggaaagttttttaaaaagaaaactaatgtaatcattaagtataatgcttaatcagagcaaaagcactgcaaggaagacggcttcagccactctaatttaaatgccctttatttaattatactgaacatttttacagggattggtatttggaatttatagaagctgaaatcagtgatctcagatagcattaactgggaagttatcctgaaggtggcaggctgctccaagatttctatctttgatacttttaagcatgcttgtgattcagggctttttaggcacggtatttctatttctatgggtgctaagaaattttaatctgcctcattatgtctatgtgctttaatcatggtagcaattcgactcactgcctgttaaaatattttaaaagtgaaaatctcattttcatagaaattccaccgaacttcgggcagtatgaaaaagtaatgttagaagtgactgtcaggacagtagggattacaatatgaaataatta

SEQ ID NO: 47032 - DNA, 1538 bp, Homo sapiens
tagatcagggcactgttcctagcccaactctgtggcagaacataaacctgcaagaaataggattaacatactatctttgcagtaagttaaatcctgaacttctacaaaatacagtttactccaatttagttacactcttcctgcttctggtgtcttacctccacgttggactaaggttttcaattcggtggtggaatacttacctattaaaattacccactttgctttagtgtgagtttctcagcatgttttacacaggagtgacctgaatgactcggaagtggcacttgagtgtgccaggccctggaatttaatggtatggttctgtggttgttgtctgtttgcggttttattgctgaattagtagtaaccacagtaatcacaccctttctcatttctcaggcttggggatttcgtccacctctggcgggttggttcccctgacgtttcttaaagttactgtgaatttgttctggtcagtaccatagagtgtattatcctaaggagggccactgtagggccgctaggactagaggcaacttgaacttcacaagttagcagagcaaggactccctggaacaccgagttagggccacggggtctgtttgctcagattgcccgccagccctgggaaaggagtctgggggcgagcaggctgggttcccgggtctcagtcgccgcagtggtggctacagactgcgcatgtgacccaggggccggcgacgcaggtgccggagagcgaggaggagggcggcgtggaggagggtacttccgggaccggcgggcgcgcgctggcagctcgccgacggcgggggcgggggcggggggcggcaggggagcgagcgcgctggcggcgggcggtggcgttgcgcgcggggtggcgaaaggatgtgcgcgggatcgcgggggagggggagggagcgcgcgggctagctggaggcgggagggggcggagccctgtggcgtctgaacccgccccgggggtgccaaggtgcgtctccagtctgacgcgaccgcctggggcggagtcagcgggacgtgccacctgcagtgctggctagggctttttatttactagggagcagtttccccgcgcgacagttcgggagcgcgcaggcagtcgcgcgcacacacgcacgcaggcacacacacacacacacacacacacacacacacactttcgcacacacaaacacgctaggacgctcgtcttcgctactgcatccccgaaccagcagagcgaagctactgcgggttctgttaacctcagcatcgtggggcgaagcagagccattgtgcatcaaggagaggccggtgcctgcgctgccgtctctggcacctaacccagcagaccgctcaccccatcgggtaagccagtctctctccttgtaacctgttctgcagacctgaggaagagggtgggaggctgctggtgcgccaagtgggggcagacccggagttgacatttcaggggcttgcagcccatgcagcctctgcccgtgtcgtctaacgggagcagccactactcaggttactta

SEQ ID NO: 47033 - DNA, 578 bp, Homo sapiens
ccctatgtcaaaccagatgcacatctgatatcagtgctgtgtctgtcacaaacctcaatgtcataatgttccaagcactgcagcactagttcagaatacttcatttgcaatgtcaaccctatgactggctaaaactctgaagtttgtaaataaaactgcattgtactatttggaaacatgaacgttgtttctacttatgagctgggaagagaagccttggcagggagccacattctttcctggcattacttagatgacctttaatgcgcttgatcagggtatgagtcacagtttctgagaattggagttcttgccaagtggtcaccttgttggaaggaaactgaagatgtaattccttagtcacacctctatgatctcagtgtcggctgtcaagttgatagaaaaaaaattaaacaaaaataaaataatccaaaatttaatacttgagggaataaatattgcctgtttaaacaaagaaaatgctccattatgaaatatatctttcattttttgtagcaccttatccataaagaattaaaaaaagaaatcaagctgttggtctcttttccagctttctg

SEQ ID NO: 47034 - DNA, 857 bp, Homo sapiens
agttggcacatgctgctgtgtttatttattgtggattcccatcaggaaagaggaaaaaatacacatgttctttcatataggcaaaatttaaccacataaatttgcactgcaagaaaattgaagtttacgtgaacaaattcatgagcatattttctctttctccccaccgttaatttgggagttgccgttttgggggattttgttttgctttgctttattcatcggagagagttgaagccagctcttggccactctccatttctaatgttcttgtgttgccccttcttcgtactgtttgtgaactttggttaccttcacattccccttacgagggtgtaacatctatttgttcctcttaccaaagcaaaaggattggcttcatacaaaatagacaattctctgatttcaggaaatgtgcatggtctacccgctttatcgaaggcaagaatccggtttggaatataaaaataagcattggttgttcttaccagccacaaagtaaacttcattttcaggcagtgtttctgggggaggttatggagggaagaaaaaagaaaaatcgatagtgagtgactgattgcttcattttatcaggcgggcccattgtgaaagagctcaggggaaatgtggaggttaaatatatttccagagttgtccagcagaaagaaagtggcactttgaagagaactagggaagtacatatcttcagatatccctatatagttctctaccttcagttttagtaacaattatgaagaattatttgtgctgacagcagcagttaaactttgtttctctaatagctttttttttacataaaaaaagacccaggaacttaatagtgtatgcataagact

SEQ ID NO: 47035 - DNA, 1527 bp, Homo sapiens
ctggatgaatctctctctactcaaccaacagatacaatatgcggtacaggataatggaggcaggaagtgagcctgaaagaaaaaaatatatacctatagctgaacttaagaaaccaaggagtgcacgcaagaaccagaaaaggcagcttgtgtctgtgaacagaccaaagcaagcagagatccctgcacctggtggtaatgtgccctccggagcacaaagccagacgggcatcctgccaacgcaactacctgaccacaggcttataccatcttcaccttctataatagttatttgtatactgtatttcaatctgtgaatgcatctcgaaggtttgtggcaatgattactgggaaatcaaggaaatccaaaaccacccgttataaatatgtcgacaaggaggccaagtagatggtcatcatcacactctaggggcacccctaaacctaaacacagaaacaaggttgtagctgggcaccctgtagcagtcctgaagaaagaaaacaggcctggttaggcaaaaaccatcggatgtcagagggaaatcaaggcagcaggcacaggaatcacaagcacaggcgggcatgtggccgacgcgtggctgccggcgcagcactgagcgcgggtgtggggcgacccgcagtcccccgcggtgtaaacaaccctgagccgcgcacacgtccgaacgacgcctcacagcctgcaggcagactgtagcgtagaaagagcccgaggcacgtcagcagttctcaagggccccagcaagccccgcaagcgtgaagcggaggcgcgggggcgcggggccgcgggcggggaggggcgggcagcgggggcctctgccaggcgtccagactccccaaagcgcggagctgcgcgctggctcggccccggccccgccccggcgccaaaggaagaagacagagacccacgggagggagaagtaaaggaagggccgtaccctgcagggtccgggagaggcgcgcgccgcgggcttcaccagcgaccaggcagcgcgagaaggcctgggtgcgggggcggctccccgactctctagatgcggcacaaccgccgcaagcccggcctagcgcgacccggaaggaagacgcggaggccgcgaggagcggcgggcccggggaggcggggcggagccggggaggaggggcggggccgcggggttggggcggggccggggaggcggggcggggcctggagggaggcggggcggggccagaagcaaagccgggcgtttctcccatgggaggtgctctgggtcctacggacagcccgctcccaggccagggggaggagctttctgctggcttcctagctccagtggtgcccgtgtaaagggcctaggtcatacacagcgggtagtgtctacaaatcctcttcggaataatcccttccgagtaccggctcgccatgtgtagtgtggtcctacaaggacttcttcagtccagacttggtggatcagatgatacataggtaatacggctggtacgcatacgtagaggaaaagtataatatac

SEQ ID NO: 47036 - DNA, 1307 bp, Homo sapiens
tttttcactgtatgatagtaccaactaataacctttattaatgggcggttagattccccatttttttgttcattatatcctgatcttaggtttatcctaacatttttaaagagatccttgcggtgtcattcatttttaaattcccagtgctcataccagtgtctggcatacagtatttgttaagagttccatgtgaaagatgagcttaagtttctacttaatactgagagttcgaaaatcagactgctgtctacaagcactgagcagtgcattattttcttgatctcatttgcaaatgcagtctgttggattaacctattaatcaaaaagtaatacagctgccttaaattctttctgaaaaaaacagcaagctttgtgcaaacaaaacacagatacaaagctatgcataactacgaggcgtgagttattcctgccccggcaaaggaaagatgcatgaccttcagactgcagcacacgcagagcgggtcgccggctcctggggcaaggagctcagccacaagagacccgcggcctgcgcttttccagacaggaccactggtcctgagctcttttccccggcgtccgccaacgggactatgcgaggtttacaatggagagagatggggccaggaccaagccttaggtttcgcgctgacccctcgcgaggtccagagacaacccaccgccccacccccggcgcatgcgcagagacgccagcgctcgcaattgactgcatgcgaaggacctccgcacacacactcacccgccgaggaaattaagggacgcgcagcttttgtattacagcctccaggccccagcactcttaaaaaccaacccccggaggagcccagcttacggccactccacatcgcgacaaacgatcccacctcttttccggtccctcccgaaaaaagatccccaacataaaggttccgagatcactttcgccgtctgcagccgacttttttttttttttttttttttagcagagtctgttctgttgcccaggctggagtacagtccccatctcggattctgggatcactgcaatctccgccgcccgggttcaagcgattctccatgttggctggtctcgaactcctgacctcaggttatccgcccgccttggcctcccaaagggctgggattacaggcgtgagccaccgcgcccggcctgcagccgactttcatgattgtattgttgagtgttatgtatgtatggctatactttcacgctcatttagcaaattgcacatggaattaaactgcaagatgtttttactatcataaacaactttgaagatact

SEQ ID NO: 47037 - DNA, 1901 bp, Homo sapiens
aggaattctaagtttattttgttttacttgggggcagggggaagtaaaaagatgtaaaagattaatgttgaattaaaatcttaagctagaatgttaatttaacaacccacaaacaaatttgtctaatgctcaatttgttcagatgacgatactatccaccacagggtaaaaaactgaaatattggatactacctttagcgaagcttaacacataatatccatcattgggtaagaacacacgaaaaacacaaactaaggaactgcgcctgcgtagtcagagcctcaaagggtataagctccaggtcgcgagcccccgcctcctccgcccccatgaacccccttcccacaagggggttcccactgcgcacgcgcagtgtttaacggccggtcaggaacccaacaattagtcccttctcgtccgagaggaaactctgtgagaagatgggaccgtgagcactctctttaacaaggacatttccttttcagcgaaagcagcgctctgatttaccaagtctggcggaccgcagcgctttaaaggaatgaggttccagcggtcgcgccaagcagcgtacgcagcctattttaagttatgctaccttcgccacagaaaccaagaacgttgtaatggtccggcaagtgcccacgtataattgttctccatcacttacccactctagttcgggaacacccttgtcgccgccgttccggtaacacctctccaacgctttcgatgcttctacttcttcgggaacaagacaagatggcgcccgatttgtctcacccggaagtaaagaataataacatccgtttgtcatctgaagccataccatctctcatccaggtttgtgaacacgtgattgtgcggattgacatgtttcggcgccattttttttgtgggcaaaaccatctctactctggtcaacaccgggcaactgaaccattcctgcacgttactttttaacgtagctggcgccattcccgacccatctttatagtggccagaaagccaagaacgtaagtgttctacacatagggcgccttcaaattttttactttagcaacgtgatcttcctttaaggggaagtatgttccctcctagaaacactcccgccttggagaaggggttgagttcgcaactccacttacagactacggaggaaccccagggtcaaaccaaaccaaaccaattctggccagttgcttagcgcagttcaagttacttagtgcgctggaagcggcatttcaggcaatccaacttctggctcgaaccttctcggagtattccaaggatggaatactctcacttgagcgctgccgagggtgccgcttgaggaaaacgtgagtttgtgaaggtgagcagtctgggtcggtagcgaaagcggagaccttagctgaccccgcagctgtctttctctttgttaacctcaacacatcgcgcccccttccgggaacacttgctcttctctccttggcttaactagtcccggtttttcattctttatccgtgacttttagggaaccgtgggggggaagtctggtttccgtcctgctgctttccttcaactacaagatggcttctcaaaaggacgcatgcaatgccattcctcaaagacagtatgttgatttcacagtgtttttatatgaacaacgttcaagtgtcaaaagtatcaatttccaggctaggagctacaagttaaaaggaaaacaaaaatgttccaaagatacagtgtttattagctacatcttgggaagtgcctttccagagagtaacatgaaaacttctgcgtgacaaagtgcacgaagtatctgaattatttcattgggcaattgtcgtgcaaaagaaatagcaaattaccgtagaaacaaaatagtaagagcacagctagatggataaagataca

SEQ ID NO: 47038 - DNA, 422 bp, Homo sapiens
ttcacagcttaatcttcagaaaattttcttcagctattgcataaaatcactgattaaaatcatcacacatggaagctaagaactattaaatacagtaaaatagctctgttggtacatttaaaataagagaacaggcatcaactattctttgaattgataccaactgtcttctttttatttatttttgagacagggtctcactccgtcactctgcaggaatgcagtggtgtgatcatggttcactgcaccttgacctcctgggctcaagcatcttccccactcagcctcccaacagcatgagccaccatgcctggctaacaaattgataccaactatcactcttctcagctacctaaaaaggtggtcttcacaagttttaagaacattaaatgacaatattggcacataatcaatattttatc

SEQ ID NO: 47039 - DNA, 1947 bp, Homo sapiens
agaaaaaaaaatccttttttcctactcttgggcaattatttatgggggttggaaagagaagaaaaggtcactatctccttttatataccaagctcaaaaagatgagcagcacttatggttttgctgtgtatcacgctcagttctaagcacttcacaaatattaacccacgcaaccctcacaaccaccttaggagataagttgctattattttccgcattttacacttgaaactgagaaagagaagtgaagtgacttgcagaggtcccaaagccagtaagcggtggatggagatgcggacccaagcagtccggccccggagctcctaatacacgacgcttccagaaaagtcattagacaggcttcctccggtcaccaacacacacacaccccgaggatgtgaagagaaatgcgccgcgatgaggcggacggaaaggtgtggggccgccgcgcgcccaggtcaccaggggactcgggcccctcccaggccagccccgacgcccagggcttctcccgcagccgcatggacccggagccggcagagcggcgctcacacggccctcggtgaccgcccggcgcccccagggatcaggaagccgagtggggtggggagcctctcttccagcctcgcccacccacaagggggtcaaggtcgccgaagcgaagaccgagaaactgcggcgaccataccgccgctgcgaccaaagcgccgcgttctcaactcaccccgccgggccgggccgcagcgtctacaacctggggagactgcgcctgcgcgctcgtcccgctcccggcagaggtggggcctcgttcgcccgcccccagccaggaccgggagggttccaggcggcgcgcccggggcccgggagcgcggggaggggtgaaagggcggggccggcttgcgtggcgcctgcgttctgcgtgtccgcagagcccggagagtccctgataatctaagactcatagccaccgactagcaatttgttaggatcctgggccagcgtgcgcacctcggatgttgcaggagtccggcttaagtcccacttgttgctgggcaccttctgaaacagcctccgatttccctccgttaccctcctctgaactcttttttttttttttttttttttgagacggagtctcgctctgtcgcccaggctgcagtgcaatggcaagatctcggctcactgcaacctccgcctaccgggttcacgccattctactgccttagcctcccgagtagctgggactacaggcgcccgccatcacgcccggctaattttttgtattttgtttagtagagacggggtttcaccgtgttagccaggatggtctcgatctcctgaccttgtgatccgcccgccccggcctcccaaagtgctgggatcacaggcttgagccaccgcgcccggctccgcccccacacccccgccgccccctgaactcttaaagtcacatctaacattcgtcatatattattgtggtttttcccccattgctgttgtcttacctatccttctctcttcctagctagatagtacatttcttgaaatacacctatacctcctcaaagcccggttatctgttgaagtggccagcacattgcatgtttagtaaaagtagttggtttgaaaatattttgtttcaatcatggatattgcaaatgccaacactggttatggataggttctaaaagtctcctgatctttcacaactcttcagccaagggacaaatgtggctttaaggataagagcattggcgtagaaatcagaagatacgagagttaaaattgcaaacactaaatttttctttaaaaactcttctaacagtatttacatgtggagaacttggcaaagaaggttgatatttgcttatatcgtacttaacaaggaccattcatttaacaaacataattgagcacagatatgccagttgctgttacaggtataga

SEQ ID NO: 47040 - DNA, 1390 bp, Homo sapiens
ctgttttaaacaaatccagtgtatgaaaatcatgttataaggtaaattggaaacgtttatttcctttaactctttaaatgtgtcacactttttgctttctatttttaaactttgtgtctcctacaaaataataatcaaaaacaaaaaaagtaagcataacccgtagtttctttccaaatgcctttaaagtttcaaagcagtaattacaccttgcggcactacccggttcggccggtgcctggctggagggcgccggagagcctggagcagggcgccaggaggccggagcaggaggagaaggagtaggaggaagtggtcactagcgcggcggccgccggcccgcaatggtgctaccctggttgctgctcgagactgcgcgcagggcggtcctcgggtccgcggaggctgcgctctgcggtgagcttggtggtccctggggaaagggagagcgcctaaccttagacttcaggcaagggttaacattggtgggggtgctcgcttctttagacttccagttaaaagtcagacccatcactcttggcacctggggatgtaacacccacctggggaagatttcgggctacccgaacctgtgggcgctctggggacgcagggacagaggtaaacattgctccagcgaggtcgtatgggagggcgtttatattggtagtggtgcttgactgagcaatacatgaaagccaatttcgcgactcagaggagcgagcaagatggccactccctgccggcgagagtcgtaatgccgagcccagccttgcgagttacatttgtgacccgctacagagcagcgctcggcgcttcatgaaacagccacctagaactataacgtgttagaactataaaaataccacccctcattttaccgatgagccagcagaagccagagaaatgaaggtggttaccggaggcgttgggtctagaactcaaagcagtcccttcttttcgctttgcatgctgcctctccagcaccaacttttatctgtggatgcagctacagggacccagcattaacacagcttacccccagccccacctacctattttaactgttggtaagtcctctgtagtttaagatgtgcttttctatgcaaattttttttcttttctccttttttttctttctttctttcttaagaaacagagtctggctctgtcgcccaggctggaatgcagtgctgcaatcacagctcactgcagcttgaaactccttggctcaagcgatcctcccctcagtctgcacgtagctaggactacaggcggaggccatcaggcccagctgattttgtttgttttgtttttgtagagatggggttttagctatgtttctcaggctggtctcgaactcctggcctcaagtgatcctcctgcctcg

SEQ ID NO: 47041 - DNA, 1758 bp, Homo sapiens
tgcccaagcaatatttcagtgtgtgaaaacaatgcaacatatatacacacacatatatatatacatacacacacacacatatatatacacacacacacatatgatcagtggtaaagcttctttaacatgtcatctccacagaatcactttatagcaagaggaaaacctgcttttccttaaataggttactgagttcattgtttctttttttctctttgcaaagggctaaaaaatgaacatcaggaacagatcctattcacagaatcgaaatttaaattacttactaatgctttcttagcataaaaaattataccaagataccttgtcaaattctgttcatctttcaactatacagtggaaagcctactcaaatgttcaatttaccccataacgcaccttcctgcctgcttaaacaaatgtatttagggataaatgtttttaatattattctagctctcacatggtcactgacagaaacaagaacttattcatgaaaaaggttaaagaaacaggtaaacaaagtcactggaaaaataggcctttaaaacaaaatataaagcacaggctaatgaaatggataaatttagagggcacctgccctataccttatcaatataaaactccatctagacataaagtacgcgcaagaagcggttagtaggcagaaacaagccagactctctcctctcctcataatattaaatccactcaagatatacagtgaatgacaaaagaccacgacgccgatcacccgaagaaaccccaggtaaaagcacgccacaactgtcctgaacaggtagcctcacagtcttgagctgagtcacacttcccgtacctgtgcccactctatccgaccccccgcggcctagctaaaccaagaatccgaaattaaactccgaaacgttccttcccgggagacgaaactctctcccacccctccccctcacagatccttccctccccgaaactggggctgggggcggggaggggagtcgcctcagaaaagcgcatcttgattctgaccgctgcggtctcccgtgaggaccccggcactcggaactgagctgggatccaggcccaggggagtcacaggccccgtcctcacagctcccccaaaaaccggccccaggtgagaagacggaagatcgcttactagtgggagctctgccaaaagttccctgccatggaacacagcttgccctgataaaaaagcaccagccggcggagcggcccgcggagcgaccatagacccagcccgtccggtaaccgcgctcctcgatcaaatcagctcggctcgactccgctccgcggcggcgacggcgaaaggaagaggatggccccctagtctccttcacgccggccgacaacactcaactgtgcaaacccgttcctatcgacaaaagttccggcccgcggtagcggagggagccggaggggaggtgctgacccttggaggtgctgagattgaagagaactagtgttcacgagagctcgcggcggttggaaggctctcgcgagagcgtcttgagaattctggccgggggcccaagccgctcggtctcctgtcttcagcacgggagttgctgagtgggtctaacctaggcgaagtggctcagatacggggttctgttattacctcttccaggacttcaaaaacagaacaatgtggcattgtaataaagtacaaggttttgtgacttatttttcctgtgattggaaagagaaataaatgaagatgactttgttctcagggatcaa

SEQ ID NO: 47042 - DNA, 920 bp, Homo sapiens
gctgctgacagcccccatccatgaactctttcagggtccttaatttcaggttggttacaaagaccaataaaatgctgcatttttatatataaaatttactttgagcaaagatcctaaatttatgaggtataatttactgagattattggatataaattacctatgtaacaatgatttaagtagaaaaaacaataaatcatatttttaacttctcacataacttattcttttattattatgcaatgccagtatatattttgctttagttttctgagaaaacaaacaaacattatttagctgtaaaatttggtggacatgctgaaacataaattgaggtttcatctggatgaatgaaaggatttttgaataattataactgttttaatcagttgctgctttccagcaagtactgatcatatttcagttgggtggggtgggaggacttatctttttacctattacgttatataagttaattcactaagtcagtgtattaactgcataaggtttatttcctctaataagtactaaaaggcttcagtatttagtattttctggaatatggatttattacactcttttggttttctttttttgttttaccatgtatatattcgcactgttttagactttgatctgaatgttatttcaaactatagtgccacctagtgtttatgcaatttatctgggccaccctttctaagaaataaagtgataagaaggataagtattttaaaatatgaaagcaacattatttcccaaatttttcatatcaatgggttctaagcaaactaaacttatgtcttaaataaaaccaaccttctacttttaactaaaaaaagccaaccagctatttttagtaagctttccctaggtcatgcttagtattctacagacttaactgaaatgtttggaattca

SEQ ID NO: 47043 - DNA, 615 bp, Homo sapiens
ctcctctaacatctgcaccaaacaactcctatgtcatctgagagtcagaggatggtgacagcagctcctccagctccctgcctcctgcaaaaatgagcagaaccttgtgcattcaccctgacagataaatgtcttgcatttgctgcttttttctgggaaatgtggtgcatgtaaaatgaatatacttttatttgggacattagtcatggaatgtgggggagaaggagatgtttgacctacttaaatatacttaagtatacaagttaatttcttcacaaactatttccaaacttcttttgtttgacttggcatagaccccaggtgacaccaggcacgcacaggaacatgggaaaaaatgctttgttggtggtggattccctcatggtttcacaaaggaaaggcattaaaactcaaggaaggttttaagactcagtgtttaatttatgaaaccacattttaaaaatccaagcagagtagtcatttaatgaggtcagaaagtaagctgtaacaactttaagctggaattttactgttgttctatcacatgaagaaatgaacgttttctgtctgttaaggatttgagataagcgcctcccaccagttgatacctgacac

SEQ ID NO: 47044 - DNA, 779 bp, Homo sapiens
tcaaatatactttctaaatgaactcattgcaaaggatggttcatgaattataactttgttttgtgcattatttaaatataatatgctaacaaggagctaaccggtaaattccaggttcctgctgtgatactatatttcaaatatactttcaattcctaagaaagaaatgaagacattttctgaaatcaggctgcaaacatgcttttattcatctatagtttttgcttttagagagtatacattttaaccaaaaagagagtgacacataacatcaggtttgccaaaactaaagttcataaaagtgacacacgatctggtggcactctctggaaaagcgatttggcaatgaggtcagagtgcttattgtaggagccttggaagttgacctttgttcttcgaccttccactgtgaagaggatggccaaagagagagacctaataactaacaaataaggcttttcctattttcccctgtcctgccaatttaggagaagaaagagagggaaggaggaaaggagggaaaaacaggcagacagtctaattaggtacaaacctccatcatcagtcacttcatggtagaaagccattaaagcaaccatgtaggttattaaggaatttttcaaatctcagatgggaatttgaaattcatattcttgagtcagtaaactagcctgtcttatgtttacagatgcattcatcaaacctaactgaagttatgtttactattcatgaaataactattacatttgctaaatcacacaaaacattttatgcacccc

SEQ ID NO: 47045 - DNA, 639 bp, Homo sapiens
tatatttctttctatccatttttgcaatattttgcacaatgaaaatatttaatagaagggagagattattttagtttagggtacccaagcaaggatttatagaggaagcaagatttgaactgaatcttgaaggttaggttaaatttgaataagcaaaatattaaatcatgattttaattcagattcccagaaagtgtgcctggaatggtgagtcatcaaggtggaatgccttggggacactcaaaggtctggccatttctcaccacaggattctagagctgtgtcaccatttacccagcctccagcagcctctgctggaacagcttattgccccacctcccccattttctctttagccaattctgtgaggtaactccagtccttcaagtaagataggctctgccaagctgattctatattcccaaagccacctacaagctttcctcaaattggcctggctgctaacccatgttctcacgaagtagataaaagagttttgagttggagataagaacatcccacctcttatcaaattcctcagttcaactagaacaaaactgaaccactgtagtccaatgggccacacagtcatcccagtgtgaaggcttgagagaggaataataaagataataataatgg

SEQ ID NO: 47046 - DNA, 1041 bp, Homo sapiens
ttctctgcctacaccaaatccatgtaaataatagcaaatataaaaggcataaaagtggaatatgactgaatgtcctattgaatgaatgaaaggacacatagcaacaccgaaaaaacagaagaagcatgccatgcaggatttttttttaacacaaatgtggtttttctacactaacaaccaattctcagaaaccaactggttgtccaaccattcagtttaatcctgacattaattagctaaagttagcacagatcccacaggttaaggctcgttcacttcagacacttaaactgcaaatggtgtcccaggtactcatacttctaccaagccaactaccaatttgagcattccctcaaccctcttctcagatttcatgattcactagaataacttggagaattcaggaaaatacttggcttatgtttactggtttattaaaaaggatataattcagaaacagccaactggaaaagatgcatagggcaaggcatgggaggggcgatggcatagtttccataccttctaggggtgtaccaacccacccagcacttcaatgtgttcaccaacacagaaactcagggaatcttgttcaagattctttataaaccaatctccaatcccattccgcttcctgggggtcggggaatggggctgaaagttcccatcctccaatcatgtttttagtatttctggtgatcagttcctatcctgaagctatagtaggctccactttgactcacctcactagcataagttcatgtgtggtggaacagcaaaaggcatcctatgactcaggacattccaatggctttagtacttctgtgccaggaactgaggacaaagatcaaatatattttattttatttatttatttatttattttaagacagagtcttgctctgttgcccaggctggagtgcagtggcatgatctctgctcactgcaacctccacctcatgggttcaagtgattctcctgcctcagcctcccaagtagctgggattacaggcacctgcctccacgcctggctaatttctgtat

SEQ ID NO: 47047 - DNA, 860 bp, Homo sapiens
tcaaatccggtctttctggttgtttgcacatctaaataaatctaacgatttccccaccactctgcaaacactgatgctccccgcccgcactcgggactcctctacctctctggctcccggtcaactcatcccgactctttagcccgcccgaggtttcctccccggagtgactccactgccctggtccctggggtcctcctggaccgttctggaagggcccccgccacagccacctgtacacaccccttggccttatcacatttatcgctcttcccctttcagccaacctattctccttcgtttctgtcacgacctgctcttctctttctaaatcccggctccgacatacccactcagaaggagtgacaggagggattggctgcggaggccacacgggggaaaggagaaaggaccctattgggaaagccgaggacgccggcgacgctggcccttgggcgctctggggcctacggaggccttaaaccccaaagattggcggggacgaagggccggggcactcgagcgagcctggagcgggcaaagactgcgttgcgactggggacaggtctcgcgcggttcccgaagggtgcgaagactgcgctgagcattttgaaggcctcccaaagcggctggaagacaccccgaagcggcctcccaaccagaatgatctgaaaatcccccaggctgggctcgggataaatactagttctgaactcccggcgccagcctaggccatttgttgtttcgggtttcggcctcattagtatgcgcctacgagggaaaatgagacttccccacaggttaataaacaacctgtccggcacaggttaacaggagcctctctcgccctctcctgcccc

SEQ ID NO: 47048 - DNA, 561 bp, Homo sapiens
cacaggctaccttgtctaggtgacatgtctgtttattgtctgctttcaaagcccaatactacttttaagtaatcaagaaaccaaaaaataaatttgaggaattgaacacctgatgggctctcatagctccaacaaagctctaatcttgtttagccagctccagccctgtcccaagcctggttgtagctgatcttgtgtttaatcaggactatagaagtctctgtttctctcccaccaaaagcaaatatttacctttcgtattcccataacacttcacagaaaccctgatttagaactgaccatgttgactttgagggcaaggacaaaccgtctgggtttggctttggtcccctagtccccagcatgcagagccagtttattttaccccagctctgtggaagctcagttgagtgtctaggttgaagagtggctggagtaggcatggatgagaataaagggcaatgaattgcaagctgtggcaaaacccatgtccatggtacaggaggaacctggtggacctgtgtgcttgcccttgtcagaatgttacagctcacagggcag

SEQ ID NO: 47049 - DNA, 735 bp, Homo sapiens
catggattttctcctctgtcttttcccctggctctcactgactgcctttcaggactaggaaatacattgtaaagactgctctaattgattcctggattaaaagggatggtctgagaatgctgtgataatctcaagaggagagtgagaccctgtcccaagtaaacgctttcctttttgtttttcatgttttgatcttatgagccttgactaggctcagttaaaaacagtggcagcctcttcaaaggggaacaccaagccctttgaatgggctaattctgctccaggttcccgccatctacccgcccttgacaagcgccagtagaagtcaacaggtggttgtccaaatataaatgaaaaggcttaactctaaaacatcgctgtctgaggggatttttagaagactttactctgtggttttggcagtgaccgtgtgtttctttgccagcacaaagagaaatttgacctgtgtctctcaggagttagagattttcatcactgctgtccccacactagacctatcaaccccttctccaccccaacaaatcaggagactcaaagaagaatagtgaggagagagagaaagagagaaaggctgaagaaacaagggatggaaacggtacaggaatgcttagtgagtctatattttattccgttattaaagtcacatttgtatgtgtcaaaaacaggatattttgatgtgtgagcagagtgggaggagaggtattttgcaagcag

SEQ ID NO: 47050 - DNA, 3079 bp, Homo sapiens
ctgcaccactgcgctattccagcctgggcaaacagagcaagactctgtctggaaaaaaaaaaagaaaaagaaaaagaaaaagaaaaaagccaaaaccctaaactgcttttcttgatacagcaaacctagcttaaaaacaaaacttattccttccagatccctggtgaaattgtgttctaataggcaaatatcatgttttctgataataattaccacctaaagtaacacaggtagagatgcacattcctggtagacagcctgtaattaggccacttttgtatgtacttgagcttatttgaaagctcatttgaagttactggcattctttgttaaaattactattagacacttccatgcaatatcagtttcagacatttaaagaagtatgtaaggatgggcttcgagtgtgtccaggagcccagtggaaagagacagctatgttgaggcagattatgtttgacaaatgaagatctccatcggtagcttgcttgttcattattttaaaattgtgttgtgaagattttgtatttttttttctctcacttcaatccaaactttctcttctgtaatttaaatgtactttttttttttttagtggtccactctggtgacattttaaaaataagtaataacccatgcatgcaatttgactaaaaagcaattgcaaacctagaacttacacattcaaataaattgagtcattttaggtgaataaacttttaggtgaactttggagcatatgcaccaatcctggtgtgttgacataaagaacatttttagaaccttctgactacagttagtgtcatcagaagaaaagcagttttgttttttatggtagtcagtattattcagtgtcattagctgtctaattctcagaaattatttatttcaggatctccattcatccctcaaaggaataacatttggcatcttctaggccttttggaaaaatgaattatcagctgcaggtagttccaaaactagctagaacaatcctctacatcctggaaagtacagttctctgaggccaagagccagccacacttgggatggaagctcacacatgaaattcatctcagatcagctctgcaatcctcaaatcattacaaactccttccaatataacttggagccaaaaagtatgatcattcaaagtgactgtacttgttttcaatggtcaggagtggcacctacatggcttagcaagttccagtaacatcaaggacacccaagtaataaaagtaacaagtaaagaaatgtggatttgggggattcaaagaacttttaattagaagttgtgattctgctcaaccaacatggtttgatctatagtccatcatgttcttcaggaagtctctatggaatggttaacaacttacagccacagtattaggaaactttaatcaggtgcattttaaacaaattctccaaatcacagggcaatcgaagaataacgatacaaatttaagtatccattcaaatatgtctgtctttttagccaaaagcttgaccttgggtcagcctgtatctaatatctgaacagcacccctgcaagatctttctcaaattggaatgcaaagtcttgggaagaatattcaagcaaaatagaatccctgaaacttcatttaaaggcctcaaatttgaacaactctatttttcagagatagtactgaatgctccatgatgaagagtggaaggactgaagctgaaattgtgggactaaatctttccagaactcatgatagctgttcctccactgcttaaaaaacaggcttccagggcaacatggaatcagcattcattcttggcatttttgagtacctgaaaataatataactaaaacttatgaaactcaaaatgtttttatctcctgtgttgcttagacttagaatttctatttctgaagccagaaaaagaaagctaatccaagggcttaatccacatctctgaagccaagttctatattcagtaatacttaattgaaagatgtgcaacttaatttaggtttttcttttaagaagctagctcatgaaataatttctgcctactcattttggattatttctaaaaacagaaggcccaaaattattatcaatctatattcttaactatatggagatcctatttgggggtcttttcactgtaaatagcagcagtgatggagggaaggaaagggtctggtgagagaagacagagagctaaaacttcaggtgagaaagattctacaatcattggaagttttaaaatatctgtaatgcctaagatccattactacacaaaaactcattctccttttccataacaatcatcatcataaaactaccaattaagtatacctttcctctgttgacaaaagatacaagatggtcagttagtaccttgcttttggtgagtgtgagagtacttgtaatccctagaagaaaaagtggttaactgtgtgtgtggaggcagtggtggtggtgggggcggaggtagtttagaattcccgtatgcctctgtgttcacttagtcattcagaaagtatttatcgagtgaccgtatgccaggaaatgtaagtccttctttgtagcagtgaacaaaagtgacaaaaatccctgctttcctgaagcatagtcagaagagactaataataaatcaacacatattttaatagtgttgataaaacaatggaaaaaaaacaaacaagagagggggatagggagatttggtgggtttgccatttaaaataagatgatgagacatatggagattaggggcaacagtcatccaaatgagggagtagaaatggcgagttcaacaagcagggaggtgactcctgtggttggtgtgtagcgagtaggagggtcagagggtagtgaggggagaaggcaacactgtgcaggacttttggtactgtaaggattttggcttttattctgagatggaaaggcactggaagcttttgagcagagtgaactcatgatcagacctatgtttcaaaaaacaaattgttgagtaaagactgaaaaggggaaagagtagcagcagagaggccagccagtaggtggagtggatagggtggcagtggggaaggtggctg

SEQ ID NO: 47051 - DNA, 648 bp, Homo sapiens
cagacttgtatctaattgccttgaaatctccacttgaaagtcttagatatacaaactaacatgtccaaaatataacttcttcttttaaaaatgaatactttacagattctgagaagggctgcctatggctttgaattagaggactgctatttttatggatattttggggaagtaggaagcgaaagaagactgagtgcccgactatgtgataccaggtgaccttgcaatgaaaactgttgatcataaactgagtatttcactgtcactttactggaaagtagagatgatgcaagttgatgattcacattttgccctgaaggtaaccagattagccagatggtaaggagtttgacaagagtattactggaggacagaaaggcacaagttttaggtggatgaactcttagaacagtgccagaataaaaggctacctgtatttcacgaagattcgtgacaaaaagttaagagcattgtgcaatatgctggtaatgatcaaatgggcaaaataaccacctcttaggatatcggacagcctccttcccaggccacagtgttttatgcaataggttatgtactcagtggccaaagtaaaagagatgaaaattatgcatgggtgaaacataaacttccttttcctcacgaaggccc

SEQ ID NO: 47052 - DNA, 647 bp, Homo sapiens
aagaatctgaagcttaccctgaaatgcaggcttgttcatactagccatacgaggacagtaatgttgacctggaaagccttgaatgtgaacttccagtggaactgggcgtactgatggtcggaagttaaacaagcccatctagagtaaatatgagagagaaaccattttcaatttttatattgaattttataaggttataatatctcttaaaaggaatcatcaaagtaacactactaaataaatgcataatttatcaatcttctacatacctgcttaatattgagccaatcagcaaggtctctggcattagctaatgcagtagatagtccaactattctaacaggcttttctgtgtgtgatgagataaaatttgttcgagatacaatgacctctagaacagggcctctttcctcccctagaaaatagggaaaaatcaatgttaatcatttaacaagcctgtgttggtcattgcagcaaccacaaaaggaagagtttgtagcttcctcaaaaaacaaaaacaaaaaaaaaaacaaaaaaaaagctaaagctagaactaccaaaggattctgcaatcctactcccagtgcatgatgtcacttagatgctgaattaaaaaaaactgacctcatggaagtagagtagaaacg

SEQ ID NO: 47053 - DNA, 1980 bp, Homo sapiens
tttctcatataaataggattatttagcctaagcttaagagcatctttaaggatcatttttctcatgcaagactattataaccatcattaaaaaaaagagacaacataaactggagcacaatccatagtaaaaccaaaagcttaattctcaacatttgagaactttgagaatcagaaaaaggatttcaatctatgaaacataaaatctggtgatggagaaaatggctgtcaatctcacctaacctagggaaagaaagaaaatgtaaccatgagtttgaatgcacaagtgacaacacatcaaacttttaccagcccctagaattatgcttcttttaaaccaaagaatagcaaataccattagcacactgcattccatgagtaagttaatttataagaaacctatttgaaatgactgcccagtactcacaaaacctccctagcacccacatacacatttatttatttcaaaatgacattataggctccttgattgcgaaattcacccacaatccatcacggtcagctacctatttactttccagtgtgttgggggaaaaatatgaggaagatttctttccccaaatctacgtgaagaaaacgaagttatcaaggctttgtaacagaaaaaaagaaaacaaattacccatgcatgggacagaaaaacctcatctggtcacgttgtggcttaacacttggacaatatgtagcttaggttaagttttctatccccaaccccacctacaaactctaggaatgggcggtattgttgcgagaccccggactcgacctcatgccactgaaaaggatgacaggtcgggacttgccccggaggcaggaagagaatctctggcgggtcgcgtagcccgcctcgccgtccccgcctccagccagctcccctggccgcggcgacccttctcgtcctcccacctccacctccacctcctcacctctcggcctggctcacgcgtttcccatcactctgtcagctcctgccaccgcgccttcttccctttcggttttactttaacttcccacgccgggtgaggagctgagcgcagggccaaagatgcgagcgggcagctgtatcgccgcgccccgtccgccctccaagccgcgcttgccggggtcgcgcccagtcacagggaaccgcgtgtgaggaccatcagtcagacagacagacgcaaagacgcacagacccggcgaggagggacagagtggagctggcgccggcctacacgtcaccgccccgctgcagcgccaacgtcggcacgtcgactcgtcgactccgggccctctgccccgcccgcgtgcgcgcgccgctccgcctcccgcctccagcctctagtccgctgggttcggaggagcagaggcggaaggtcccggcggcggcgaggatgcgccccagggcgggagcgggacgctccactttaccctggctgcccgcaacgggccaggcctgccgtctctacctctctacctgtgagttttttccctgcatttacttcagtctgccgcgtcttctccccgcccttctctgtaaggtaaatatgtggaggaaataattcctattaaaggtaaaggaaaggagagcaatttgaatgaagaaacaggtagttgctatcgtcgttttcagccaaagccctctggctgctagagagtatacatggttctctggtgtcaaggcctgttttccataagctttctggattctcagcttagttccctcaaagtgatctctgcaagtcggctcttcggtcagaagacctcctccaaaaacagaaagcccaaagattccctaactcgattgaaaagataggaagatacgaagaaaaactaacctaaagaattgtgtggtttatctgcaaagagttctagactaaaagccaacaatgcaaagatagtatgagttaatatgtttgttgtggctctcttctgccattcccgcttcctcaaggtaatgtgccccgatgcctggtagaac

SEQ ID NO: 47054 - DNA, 1038 bp, Homo sapiens
gagtcatcactatggaactattatagtaaaagtgaaattaaaatatttaaaagttaaggggctacttagtattattcatgtcaagtttctgtttaaaataattttcaataactattttgatagatttagcacccttccaagtttagatatgagttgccaagtttttttttcttcttgttaagatatttaacaagttctgtgtttctacagaacttaaatggatgaaacaggctggagactgaaatgccaccttagcagctcaagcaggactggggaaattgaagtcaatcaaatcacaggccaggcaggcagcttttacagaattatgggtcaggaagggcaaggttcaagtcaggcatgagattcggatttcataggctcaagaggctgaaactaaaatatttatttagctagttctcttggttaatttgaagtttcatccattcattcaattgatatatattgagcaactactatgagttggcaaagtaacaagacaagaaaacgatgttgcaccttttacagatgatagctgacttgctgaacacttaacttgctgtttgccaggcattgtgctatgctcttctttctgatagttaagtttattaattattacctaggttaaacaaataaggaaatcgagtctctgacacatttaccatttagctgaaagaaaacatctcagagccgcttggcctatgctctaaagtggaaacttcttcccgtcaaaggcccttgccagttgtggtggtcacagtttctcagtgttagaaaaagtatccttatcttctctatcactttcagcttctgtgctggatacaggaaccacatcttttggcaaactatgaaatttcataaagaagggcaaccctcaggactgatgatgaaccaattatgggttactttattttcttctttattaaaaaggttttgttttttccacccaggatatcagtattttctagaaaaggagatgctctgtttggttacagctctatcacttgttgtttattttgccattatgcagaagaaagaaaa

SEQ ID NO: 47055 - DNA, 431 bp, Homo sapiens
ccaagtaactgggaacaaaagctacttatcagaacacatggagctgaaatgtgtcttgtgcatagtggctctcatagtggctctcaacatgtttatcagaacacgtggagctgaaatgtgtcttgtgcatagtggctctcaacacgtttatgtaatccaggaaatatcatgcagctgttagtcattcgattgcttattatgaaatagaacactttgtctagttgctctcacctgccattatcttagcagtttgtgtaagggaccacacttaagaaataaacactttccacatgagaaaggaggtgtaaaatcaggctccataatcaaacaccaaggttttattgcactcttgctgtatatttagtatggtgccagagataggactgggtaaaaaaatgtgtaaggcaccacactcaatagtgtcttacccc

SEQ ID NO: 47056 - DNA, 783 bp, Homo sapiens
agaactatccaaagacagttaaatggttcaaagaactctaatattgagtgtcctcttttgactccatctagaaagatcatagcattcagggagaagaggactgctggatcacacattagtcttttcaagcatacctgtacacagaaatagtctctagggccactatctttgaattccatggctacaaatggaaacaatgtgaattgctgggtggcctttgtggtatgtctggtgctgagcaataataaaggaaaatgaagggaaagcaagaacacttaagtctgtgtgactctaatgatttttagtcatttcttctttttttttccccatgcagctattttaagttaatacaggttcccctaaaggcaaatataactgactcattaggaaatcagttgggaaaacaatattttgcaattgtggccccaccccttcatttctccagagctcatgatagcacacatgctctatctctgttggctatatttttagctttcccacattattttgcaatattcctttccagactaaaaaattaacaaaactccacactgaagcaacaaatcactatcttacacaataattcactaaaataggaccttaaggtattttgcctttcttcaaactcagactgaaagcttttctggtcacgatttttcaaggttatacttttataacaaaaccagatgcaaagattttacctaatcagattttacaataatgcccccatttccctccctccctccctccctcccttcctttcttccttccttccttcttttc

SEQ ID NO: 47057 - DNA, 837 bp, Homo sapiens
attaaaaacgataaaagtgcatacagcatttcaaataaacctatggagttctaggcccctgtctgatttaaaagaaaaaaaaaagctgagcatatcattattggaacctcatgcttgaatgaagaagctgaaacttaaagaaataagatgacctaacaagaatccatatttaatcatagaactggagccagattggtgaccgcctgcagtgcaccacagtacgaaagcaacatttagccacccagtgacagaactttactttcacaactgtaagtaaagttcaaagtttaagtcttgagcatgcaggactttaatactcgtagctaacattgggttttgcggtttttaagaggaatctgtttcttcataatatttaatgttactttaggtattaggttattcttttttatctttttttctttcttcttttagaagatcttaaaatggtttcaatccataaaatatgactacgacataaactttagagttctatcagctatgtagtgtgtagcaatatgctacattttagtttttcacttatttcctcatttatcctttaagacattaagtagacactaatctttgtgcattcactcactgtttttcagggtctttggaattttcttcctcctctccccttttatcttcctcctccttcttcattttctgtaagaatgaagagcacatttctgaatttcccctttctttctcttcctactgtttcagtagttactgataggagcttttcagcatgatttggccactgttttttcagtcctacatcattctgtccgagctgtcatttagtaaagattaaatttagaagaaaattttatt

SEQ ID NO: 47058 - DNA, 515 bp, Homo sapiens
tttctacaaactttctgcttatgtatgctgccacagttaagtgatttatctcagaaaatgcagcggaacacaatgcataaccctacttactattagatgcaaagtgtgaaagctttgacacagaacctccttccatacttcaaaacatctgtgtgtttattgactccatctgtgaagaatgcactgcaagtctgcctctatgtgatcagatgtggacaatcattgtgcaacctggacattggctgataaaacaaatctacaaatgtttcaacatgacagataacaacatgccatgtcgggtcatcaggaccctgatttattgcttagaaaatgagaaaactacttgaaaagcctatagaggctccactgcaggcctggcagagcagaaagataacataataaaattcttagtcctgccacagttttatcaagagggtatacaacattgattagcttgacactgattatatgtacacacttcatgaatactgtgcctaaatcctactggcatcatg

SEQ ID NO: 47059 - DNA, 716 bp, Homo sapiens
gcagagccaatattttgctattgtatttaaatataaaaaagacatgaaatatttgtctttaaatgtcttttttttctgctttattttttatcaaagtgcttaagtctaggtttaatacatgtggcaaaaattgcctcacttatagaaactctgtgctctagatgaaattaatgattaacaacacaggaatgaaaaaaggccacagaattgtttctaatgttaaagactgttagaaaagtagtgctataacatctcatgtatcaagcactgtaaaacaataggaatagttaacaaagataaattttgaaaataactgaagcatccaagttaatttaaattaccatttcaacacacgctattttacacgtcttaatacttcactttatattgcattttgctcttaggttcttgtaccttgtacttcctcaaattatcagctagtgtcaacaactgaatttccacatatatttcaaagccagctttcctatttctactaaaatcctgctgccatttttactctgatagcatttaatctttatatacatttggagaaaattgacttctaattcatgaaaatataaatgcatccacttatttaggtaattcagtatttctaactataatattccattgtttcctgtgtagacctgccttttatagctttcatttgataagttttgtatatcaccttcttaaagttatcatttaaaaaaacc

SEQ ID NO: 47060 - DNA, 444 bp, Homo sapiens
acagttgctcagactttgtttttgatgactttgacagctttacatgaccagaataaatgtggccatatatttggtataatgtctctcagttgggatatgtctgatttttattcatgattaggctaggcttatgtgtttttagggaaagaccacagaagtaaagtgccattgtaattacatcatgtcaaaggtacatattatcaacatgacattgctgttgatgttaaccttgttgacctggctgaggcaatgtttgtcagatttccctacttcaaaatttcctccttttcactttgtactcttccagaggaaatcactgtctgcaacgcacagttaaggtgtgaggatttatgttctaccttctttactgtggagtatctacataaaacatttggaattcttctccacaggagatctattctccctcctcaatttatatcttta

SEQ ID NO: 47061 - DNA, 1000 bp, Homo sapiens
tttttaaaacaggaattggattttagcatactactatttcattccccttgatgctattgtttcttctgttaaattcccgagtccattcagaaagaggaaagagagagatgcctagattccaaaatacctttcattgttcttcccagaagacaaatcttttctatccagattctactggtggtcaatgttacatgaacgcagagcagagtggtacctcaaacattgttattgacttagcagtacattgggcacagatcaagttgctattaaaagcaatgtactcctgcctccttcacatatgcctggggtcacttgtgtttggcacctatgtgtccttatgttattacaaaaccataccctggagtcttgctaactcagtttttttcttcactacattcgatgtaattttcacatcaaggtgtttctatagactagacagagttagagttcagcttcttccacccaaagtgtttaaatttgactagacagcagcaattgctttttaatctaagcaaactgatctgtcaaagacaatcaactcagggaagttattccaggaggatcctaataatcccgatgagtcacgctgccctatgtgaaactcagccactgaactcttgacatagcgtgtcacaagtacttagtggaataagtacatacagctgaactctgtgttgacacacacactctagcctctcgtgcataatgatcactgcatttagtctggtagaggagcacactcttgtgtgtggtgatgtcaattcatgtttaatgatgttacagcaactgggcttcaagttgcataacccactgtcctcacaagcactgatcaacagtatgcttgattctcctagatgaaaataaagggttgtggttgttgtttataatgacctcctagctttttatttatgtatttattttgaggcagggtctcgctctgttgcccaggctggagtgctgtggtgcgagcatagtctactccagcctcaaactcctgggt

SEQ ID NO: 47062 - DNA, 546 bp, Homo sapiens
atccgaaaagtcacgtatgtaaaaaggcggcaaactttgtaacccatggagattttgttttaactgattttaggttgggttttaacattattcaaagaaaaaaacaaaaacaagtctcaaaaagttttgcctttccctgatatccgtgaaaggtttttctatgatttctcacccctgactcccagagccatgcatatgggactgctctactggattattacaacacgcaggtctggagctcaccctaggcaactctccaaggttccacaagtacagagttcaccggttcaaccactaagtggtttgaaccacagagaataagtgcactgtgctctaagctgctatggctgcctgtttttttccaaatgtgactcaaggtgccaaagtaagtcataaatggcttgggctcaagatgtgttttcaccatgtacctccaaggaaaacaaagtcagctggtgtgcacctgccagagttatcaaatgtctgcagcaggaagctggagctgcagttatttgtgaccctggggctttacatataattgagtac

SEQ ID NO: 47063 - DNA, 2220 bp, Homo sapiens
aataagcaagcagctgagcagactgagaaaacatggttaccagatggccactggtcaaagaaaccatgaatgaatgcatcagtgtcacttggaagtcttaatttaaaacagtatgtcctttactccgaagcgtcagcaccctttaccccaatgtagcacgtgctttaaagtaaacactttctggcataaattgggaaagtaaacagaaaaacattaaaactgtatcacacaaatacatacttattctgattatattttaagtaatctgagaaatgtagctattagtaagagaatcacggccacaacatgtggatgcaatccagttcctaagtcgtcaaattcacgtttacacaaaaaaggtgtctgcccagaattccgcctactggatctcaacagttaccttgagttcatctgcagcttaggcaaatggtggtcaactccgccactagacaaaacttactcattctgaaaaaggtcaacccctctcccttctaagacctcctctcaccctctctcaactccttttcttgtttaagaaaacatggatcagcacggccacactatggggtcactgctccgccttccccatttctgtccgggtctctggcatccccagggcccagtgcgcctcatccgacctgggacagggtaggcgctcaacacaccttttaaaatcgaacgaatatgcttcaactctaaggactttaaagtgtaagttttaaaagtttgttttcgtttttaaatgtgacatcacacacacacacacacacacacacacacaaacacacacacacaccccagcggacactttctcctaccaccatatttaagcaagaggcttcgccagtcaaaaaagcagtgacaccgtctgtcttcccactccctgaagacacccattctacccgggcgtctgcccttgaccccattgattctaggaagcggccgggcggcgctgcccacaggctccgccgccagcactagcagagtgaccgcccgcgggaccccagcgctgcagaggagccccgcgcccccggcccaattctcccaaacaaaggccgagggggaggggagggacgcgggggtcgaaggcctacaggaagaggagctgcgggtgccacgggtcaggcaggctgggcacctttgcccgggagccctctgggcggaggcagagatacttacggcggtctcgtcgcggtacacgtcggggtactgaagggacagcatggccggggacaggcagggggcagcgtggaggggcgcgggctccgggagcggacctgagctagccgggctggccgcgaggcgcggctggggcgcaggcagctgcggggcggccggcggcagcgggcggccggctcacggccagagctagcacaaacggactggcggcgcggcggcgaggacgtgcagaaagcaggaagccgctgtctgcgaggccgggagcccctccccggcgggcgggcccagcggcggcggcggcggcaagagggagcgggcggcaccgagcgtgcgctaaggccggcgcacagctccctctgcaggatcgccggccgcgcccgcgccgcccgggcgcacggaggagcacgccggctacgcgctcgcccacgcccggccgcccgcccgtcctctgcgccggggacaagtccttccaccgaggccgggtccccgcgccttccctagcgccctgcctctctttggccgcgctcgcaggaccgcctgtaggagagtgaagccccagggtttccttgctgatggagtcccccaccttccccagccttcctgttcccgggctggttacggcggcgaagggagaccttgcctctccccagccttggaagcagagggctggaggtggccttatgtccactgcctgcgactctggacttgaagggaagaagtaatcgatcatgatgaccgtgaaagaaacacgtctcccttcatcccaggacccctggtggacactgggtggtttagcatccggactatggagatgctttggaggtgttggcaggactacggttgagcccttatttgatatttaccgattgagaaagaaccaagattaagaggcctggaactcatcaggggtattttatttatcctgccttttcctcatttcctctcctgctgtcatgcttgtttattgagcacctactgtttatgggaagaaaagataatagacaagatacttgacctcaaacccatgaaaatttaatagtt

SEQ ID NO: 47064 - DNA, 631 bp, Homo sapiens
gaacaaataactttaatttactaagatatcagatcccttgatctggagatttaattacattatttattagcaatgtttataaaattctttatattataaaaatcgcataagtctaaatcaaccaccatcatcaatcatcaacattatagtagacaaagagtggaaaaaataagagatacgatcttgttggtcaatttgtatgattcatacaaaaatctgaaaaatgctcctaagcttttatagaagtaagtacattcttcttagatgagtcacaaattcctattttacagctgaagagatttaatggtgaaatgactggcacaaagccccacattctccggacttcacatttggtattttgtacctaaactggctcttaccctgatccttgctgactgttcctcctacttcttgcagagaggttataacccattggtctgtagctgcactgcccagtgaggtacccactagccactatggctttcaaatggaaattaaatacaaataaaatttagttcttcagttgcttcagctacgttttaagtccttagtagccatgtttgactagtggctaccagattggacaacaaagatatagtacatttccaatattacagaaagttctgctgga

SEQ ID NO: 47065 - DNA, 3658 bp, Homo sapiens
agggaagtttgaatctagttcagactagattggaggaaaaggtgatgcatggcacctgtgcagaggaggaaaaattgctggaactgggtcctaaaaactccctctcatctgcaatacggacaaatccagctaaccctgccctgaaatgttcttttgcactgtagcaacagcagacacctattggtgccccacggatgcttccagtccctcccccaggcattctgacagtctagagtctccagtgaagggagaagaatgtacaccagagggcaggaagtcgacacacaagcccaatgcccagatgaggaagtcatttgcccagataggtcatttggcaagttgctaacaaaagatcgacacagagttcatttccacttaatccaaaagattgtcactaattcagagaatcctgtttaccctaggagggacttggagatcatcttcccttgcctccccatttttcagatgggaagatcaatgcctacagagtcttctaaactcagcaatatcaatatcacctgcattgcttactgttcaggaccaatgcatcgggaaaatgttttcctaccacctagcctcctctatgtaagtgcagtttgctatacacggcagaccaggcacttctcagaaatgggaaggtcaagtgatattatcagtggtcaatatatcactctattgctgactataatatgaacacccaataattgtctccatttcaaccaggaaactggttgggtgtgacaaatgtgcccttgttactccagaggtctctgaaaagctttgctctgccattcatggcttttgaaaaccagaaaatgactcagttggatttgatttaattaccttacagaaaccacctttgagggccagacacggtggctcacacctgtaatcccagcactttgggaggccgaggtgggcagatcacctgaggtcaggagttcgagaccagcctgaccaacatggagaaaatacaaaaattacaaaaattagctgggtgtggtggcacatgcctgtaatcccagctactcatgaggctgaggtaggagaattgcttgaacccaggaggtggaggttccagtgagctgaaatagcaccattgcactccagcctgcacaacaagagcaaaactccatctcaaaaaaaaaaaaaaaagaaagaaagaaagaaagaaaccacctttgaaaccagtgagcctgtgaatggcaaaggggaactccagcagtttggaaggaggcaggaacaggctttctctaaagagagccagtctgtctgtgaccacggagaaagcaaggtctaaagttcagggaccagttcatgagatctgcctggcagtgctgctgcggctggggaaggagccactcttcttatgtaatgggaaggaggcttacaacacaggccaccaggagtggctcccagtgaaagcgacctgtgctctacagtggctgtctgccatgggaactggtttcacagtcaggtcctgctgtgttggcatcacgtttcacgaggagggctttagagatctttcattattattccagaaagaaagattattaatcaggtcagcaccagtcctcccatttaatcagtggagaaactggggtgagcatttgccagttctagctgcattctaaggtgagtgactttgaagcatcctgcctgggatgctgcggcccagccccctgggcccagccagggtcccctaaattgtggcgaatggtcaaatgtaagaagtgagggagacactctagatctggaaggaattcttcttctggtttcagggattttttttttttttttttttggtgctgggaaaagggaagggaactggggtggtctctactgtttccgaaatgtagatttttttttaccttaaattgtgtcaacccagaatatttttgcatttttaaaaattatcatgggactatattctgcattatgaacaatttccaagtgtgacttcaactggaaactttattagctcattcaggcatgactcgtgtcacttagcaaactgctgcttcagtgaaggaaataaatgtactttcaggggtgcactgcgtctgacacgcagaggagttcttaattctgcccacaaggaaccggcctattacctattatcacatgcttaaaaggaaggtagcaactattcaagtcaagttttgcagtgaggaaaaataaaatgtgacttgccctgtagaataaaactattcacatttgtataatagacatttaaaaagcattttcacatagcacaaacataataccaagcataatttttttaaaaaaagcatttacttaacatcaactaaagtaaaatatttgcttaatctaaaaaagcatttttatatatagctaatgtaatcctcacaaccatccttgttttatagatgaagcaccctaggctctggggtgtaaagtaacttgcccatagcttctcacatgctcatgtcagagcctgaacagtcctcaactccagtgctccttcctcctcacctccacttccccaattaaagagggagtcaggctttttccaactagtactcatctctaattatgagacaaaatgccttcatccccctttcccaaacaagatcttcccctgctctgaatttttggtgaaataataattccataatgatacatcttcttccttcactactctctccccaaccaagtacagtgcctgtctcctattgcaatggacatttgtgaaaggaaggataggagagaggaaagcaaaaagagggtcaggcaggaagggaagactcagaaaattcatcttttctcattaccccagcaactaaccaaccctaagtgttttgaagcacttaataggtgctctgtattccgctaggatataagagaggtgtcagtcagggatcccaccctaaggaaaattataatacagcaaaaagataacaaaaaatggatcaagtagagaagaaaacaatgtgagacagaccattcaatggggagatgagagctggagagaggagagcagggagccaggggaaggctctgcaggggaggggctctggggcagcatgaggctgcctgaggtcctgcctagggcaccgaagaaagcgcaggagtgcaggctgacacaggatcaacttgattccttgtgttttacgtgctctacgtgagaaaggctgagaaccccagaaggtgacactggctactctgtaggcatgaagtgactccgtgagtcattgccagaatgtcaaagggatttcttagtcaggaaacagtctctgccttggtgttgatcaacaacttagacaaacagaagtctaaagagcaaacaggccagcacagaaccccggcccctcggaccaggccatgccccacttactgtaaatgcccttggccacacccagcctctcaccagtgcagtgaagcctgagactcctggacctacgactctgctctttgcccagcatttcactcaaggggaattgactgacactgatccaaagcacaatgcacacactaagatatgttcaaataataatagtaacttgcggagtggatttgtcacttccaggtaaaatatacaaaaagctccatccacgacacactgcgtaattcccattaggcagaatatgacagacataacttgaaattaaaaatgacattctgcattggaggaaag

SEQ ID NO: 47066 - DNA, 1487 bp, Homo sapiens
gaaaaggaactggttttgtaggggagatgatgagctcaattagagactgttggttgagtctgaggtgatgggaagactttcaagtgaaaatgaccagtgggcagtcagagatatgggaataaaccttgagcaaaagacaggacatgagccataaatctgtgagtcatcagccctcgtgtttgcagccatgagaacagagttgacctctaaacatggtggtgtccagcaagaagcatggaggaccaaggactgaaccttgggtaagacggggcatgaggaagggatcaagagacatggggaaagcttcagaagacttggaagattagcaggaaaccaagaatagtgtaagggcagaaacatgaaaggattaataatttccaagaagaagggggtggaaaatacagtgacagctgcagaagtcagaatgaccttgggagttacagtggcaactggtgacttctaggggtcaatttgggtaaacagttgggggtgaaaattagatttcaaggagttaaagagggatgaggaagagaggaaacagtgacagagaatatgaaccatgtattcaaaaatatttattagtgaattagaaatagaatcatggctagagaggacaaaagtgtatacttaatatctggggaattttttagaaaatattttatcatattttatttgttaaaagtgatatttaattcttacgtcttatctgacatggcaagtagatgttcacatggacgtttatgatccttgaagtggaacataatactccttcctccttacacacatacaaacacacacacatacacacatgcacatgtgcacacacacacacatcaaacatgtatacattataaaagttcacagaccccttcccatgtcacaaggagtgaacttcccagtattctggctccaagataaaatcagactggaacttgcctcaaatgggcaatgttgacctctaatgacatcaaggctgggtagaaccaactgcccagggttgcatgcccttcacaagaatgctcttatttaggcatttcatcttggccttttgctgtagtgtttgcaatccaccttttgtgcaatccaaaagtgtttgttttgtgtaaaacattgaacttcatgttcagtgttaatgtttattctttagcctagccatattaggagctttttgaaaaatggctaattccatcattcttgagtggtcaatcctaccatggtttcaacagagtcctagagacgactgagaaacctaaagaagaaacggctaagcctgtgccaaaaacagcaagagtgctctgatgaaattcctcatggttcacacgactgtcatttgtctaaagaccaaactgcctcctgtcaccctgccttactttgtccaaaaacataagtaccctacgcctctccaaagttaaggaaaatgtgacatgtgaatctggaatatatatgtaccgtgtaagtatgtaatattatttcaaatctggcaccca

SEQ ID NO: 47067 - DNA, 476 bp, Homo sapiens
gtgtcaaccccacttagcacaagatttcaaagcacctcacaccactcctgcagagctggataagttgcagcttccgtctttcctacatgtaagttccatgaaggcaggaaccaggtctggttggactcattattttctaactgcattccccagcacagtgcttgggacataaaaggctctcaatgagtatttgttccacgaatgtcaacacagatgtgataagagcagaaaacagtccctcaccacaggcacagccactgaagttcttgccaggtagaatccagtggcccagtccttttgatgactcatcaagttgaaactcaaggtcagaaaaaaggggaactcagagaggcagtcaaagcagacagagggagggggctttacttgccagagacagaaatgtctctgcagatgggctggaggcggtcagtgtggctacagcctcacattgatactgacttctccaaaataccacc

SEQ ID NO: 47068 - DNA, 1024 bp, Homo sapiens
acgtgcagctggaggtatcagctgtgcatatctaattctggccaaaacacctccccagagtgtccagctggagagaggggaagaaaaaaagaagaaagacagtaattcagtcagggacgtcaacagcggctgaagacgcgagctggttgcagagcactgatactgttgggtacaaaaagaggtgctgctgccaccacaatatttggataacctgcaattgcaaagtacacatctgtctgtgaccatctgtctgaaagtatgctggaggtcagaggctcggtgaatacagcaacctgcaagtggaatgagataagataaaaagaagagggaagtatgcaaggaatcccattggtttcgcttaaaaagacacagcaagttgaaagaaagtgtgggatgggatctccttaagtaaattatgattcagcaagtgccgttttatctgcctaagaaagtaattacaggaaagcagtgtttcctgaaaagtgtctttaaggatgagcccgtttggaatagtgagagggtgctggcagatgaagggtagcaaccgcatggcttccccggagatggtctggcctgatctgtcaggtgcagaattgagattattagcacagaaaactttgaaacttgctttccttgacctccacaacacccagcaccttccacgctctgattttctcctatctctcttggccatccttcagttgctttcacaggtttatcttcctctgcctgtttcttaatactggggctcccctgggctccaagccctcccctcttcctattcaaacactctccctaagtgatctcatgcactccctcggtttcactgtcatttgtgtattgatgactgtcaaatatttactcttactcagatctcttgtctaggctcgggcctggattgtaactacatccttggtacctcctcttgggcattttacagtctcaacttgtctaaagtcgaactcatgactttcttccagagactcttgcctcttctagtgtttgctatcagtgaatggcacct

SEQ ID NO: 47069 - DNA, 485 bp, Homo sapiens
ggagccaatagattacatgcacatcccttttcttaatatttttgttcgtttgtttgtttttaaataccaaaatggaggcttcaaacacaagggacttcttgcctgtctggtttctattatatccccaaagtcagtaaaattagctgggacatcgtaggcactcaatatttgatgaataaaacaagtttgagttgagtatctgtcacttcaaacaagagctctgattcatacaagccacaaatcaaatatttgctttcccttgatctgacttccatcacaaacataacatcaatagaatttatcctagtggttttctcccatgtttggaggatttttagtgttaacaaattattaatgtatcaaagagcaacacaaaagtacagattgtacttaatgaagtcaatcctcaattatttcttagcagagaaaatgcaagtcataaagccctaaactcacccagccaaggacacacttttgcgactggt

SEQ ID NO: 47070 - DNA, 944 bp, Homo sapiens
gtctggagtgtcgcgggactccagaagtgggttgtgcaagacaaacttccagataaatctttgcccggatcctcctgcggtcaaagcatcagtcctgcccgtaacttcctaacgacatcttcttggagcagattccgcggcggggatggctgggtgtgcaaaccgaaaacagtttgtcagccctccagtcccgccgcgtcgggaatgcgagcccggccacgcggtccgaccgggtccggggacggcgcgcttgtcgcgggagcctcccggcttgcggagggcttgagttttttggcggagacagaggaaagcctctggtcgagaggattagagcgcgcgttttctccgccgagcacgctgcccgacgccgtcgcagccgcgcacttcccggttttgaaagccagagagatgagtcaagcgcaaaagctccggagtgacaatgcgagcttttggccagcctcatcctcctccccattcccttgccttcttttaggtcttcggttcgtgacaagtgcataggttaggcttgcacggaagagggtcggggcaggtgccagctcagggcacctacccggcgttgtcacgttccctttgggatcaatgatctttcataactaggctgggcatgttcgtgcagccctctgggcactctgggggacgttctcataaggctttttttcttttcttttctaccttttaacagaaccttctaggaaaagtgttttttaaagttttaaatatactgatgtctacagaaacggataacaaaatttcaaagcggaagggaggaaacaaaaggaaaaggtgttttacttggcagtcattgctgaagctaccatagtgtaggatagaggaagagcgtttcagaagagaattggttaagtaaaaccttcagctgtaacgtaatagaaaagacacagtaaatgggaaaaataataaaatgt

SEQ ID NO: 47071 - DNA, 1327 bp, Homo sapiens
gtaataaaggaatggaacagagactaggcaagtttaaattagagttaaagagtgggaaagaagagttgttaaaatatgcagagatagatcaagtgagctagagctgaaaggaaaatacacagaacacacattatttcaaaaaatgtaagcagaatgtcttactgcaacgacagcatactattgattcatttgtcatttagtagtcacctcagaaaaagtaaataatcaccatcatccagaaacagttatggttaagtttgcaatgagaagtttacatagttcaccaggcaaaacagttcacacctacaatcccagctaaatccctttgtttaaaaaagaatatagttacacatgcagccaaataagtcattatgacaacaggacatactagttctcaagggaagaattgctggaatagatgagaaacttcataaatgggttagcccacactgtgaactttgaaacatatctggcacagctgttgtgatggcagtgataattcacgtgaagtacccagaacagaacttggaatgagttaaaatgcactcaacaagtggtcactgctactttaaatgagaagcagttttacctattaactccacatcatttccctctagagtagtggttctcctaagagtatggtggtaattagggtgataatggtagagatgaaaagtcaataaataggggtttattttggaggtagtattgacagagcctattgttaggctggatgtagaagttgggttgaaaaaaatgaaacaattattaccgggggagcgggcagtgtgctactggcatctagtctgtagaggccagaagtgctgctaaagattacacaatgcacaggacagccccaaccctcacagccacatcaaagaattatccagtccaaaaaagtcaacagtgcagaggttgggaaaccctgctccacaggagtggttcccaaactttagtgagtcaaaaccttctggaagacttgctgaaacaggctgctgggacttacccagagtttctgattcagctgatctagggcagagtctcgctctgtcacccaggctggagtgcagtggcaccatctcgactcacttcaacctccgcctcccaggttcaagtgattctcctgcctcagcctcctgagtagctcggattagaggcgtgtgccatgcctaatttttatatttttagtagagatggggtttcaccacgttggtcaggctggtcttgaactcctgaccttgtgatccactcacctcggcctcccaaagtgctgggattacaggcatgagccactgcacccggccggtctagggtatatttctaatca

SEQ ID NO: 47072 - DNA, 574 bp, Homo sapiens
acatagtaatctattctgtagaaaacaatattaacttatggagacagtaggagggaagaaacaccacagctaatgggtatggatatatcagctcctgattttggagagtgttgtattacatgccttggcttcactcaaaattgctaaagaactcacaaatgatttttatgaaataaaatattttttacaataaggaaaaaagaacattagactataacctcaattaagacaggaatttttgtctgttttgttcaatgctacatttccactgcccaaaatagtgcctgctttaaaggaggcacacaataaatatttgctgaatgagtcagagatgccaatggttaagtgaggcagagccaacaactgtaattttaaaagaatactcatttttaaggcagaatccacactgaaatgtagctgcaattttctgttccgtttggcctgtgggagtaatctttaactaatatatccatagaaacactaagaaatcactctaagatttaagaatgactattctatagtacatatagatacaatttacctaggaaatatttaaacaaataaaaatgaaaac

SEQ ID NO: 47073 - DNA, 2095 bp, Homo sapiens
attttgtttactgttttgtccagtgcctaacacataggaggtactcagtttgggggaaattaatgaaataaatacacacttgaggtgtgtgcactattctaaaaatccatatccatacagttccattctgtacactttcccccaattttaagtagcatatctttgaagataaaagcacaggcttaaatctggtgtaaaatacctctcaattactaccctgagcacaacatcgttattttcaaattcaaaattcaaccagaaactccctctatggaaatcacaaatagttcagttcagagccaagtatccagtttcaaggtctcagaaatttaacaagccaattctggaaggctttggaagttcagctactgtctggtaagtctccgggttctgattgctcaagacaggctgtacctcctcacccctcagaaaaatctagaaccaatagtttcctaggttcctcaagttcaggataattttaaaataatccaaagtacaaatgaagtatgtaaaagtgtcttgccaacagaaaatgtctttggtagcactaaatattgttattgagacagggaatatcgtaaatagataaattgcttggaggacatacccaccgagtttggacagactcacactgcactgtgcaataaaggtttaaataactgtgttccacaaacaattcaggtcctgaactgaactctagagcctgcgactagactctcgctttcctaccttagtaagcaacagacatgtaccccaagagggaccccgcaggccacacccgccaaccggccccagggctccgggccggcgtctcgccaactccaccttgcccggaggaaccaccttcacccgccatcgcggccgggcgggcgctcctccaggcaactactcacccctccttcctaccacacctacctggcccctccccagccctcctcctctaggaatttcctcacacaaggtggacacacacacgtaccctactccaagctatggctcctccttccggctccccgcactggtggggacgcccagattccgcgctccggtggggcggcggggcaagctgcccgcctgacacactgtcctgcggggacgcggtagcaggactccaggaagcccgcgcagccgcaaaaagcaccggcgcggaggtcggagctgaaccctgctgcacttccgccctctggtatccagcgaatacaaccggcaacgctgcggagccctggcagcgcaccacaagtccagtcaccctcggcgcccggagatgacgtcacgagaccccacgtggtccgaactccgccctccgtgttctgcctaacccagcaaggaggcccgagtcgctcttgagcatgcgccaacggggcagtacgcttgaactcgcgaccaaacctctccaagttcatagcttctaccctcttctgagaatcttgcgtcaaagcgtagttattggggcttggggaggttaacttaacagttccacaaaaacagtttttaaaatactgaaacactgcctccctagagcttgatcgcaacatccctttcttcctggcatcacacaacagtattaataaaacattagttttcaaagtactttcccatccattttcttatttgatcttcttctctactttgttggaaccaccgcaggcattaataacctaatttaacagaagactatatgagcactgaaccctcccacccatccaagagtacatatctttatcttactctttgtaaaaataattggggccgggcgcggtggctcacgcctgtaatcccagcaccttgggaggccgaggcgggcggatcacgaggtcaggagatcgagaccatcatggctaacacggtgaaaccccgtctctactaaaaatacaaaaaaaattagccgggcgcggtggcgggcttctgtagtcccagctactggagagtctgaggcaggagaatggcgtgaacccgggaggtggagcttgcagtgagccaagatagggccaccgcagtcccgcctgggcgaaagagcgagactccgtctcaaaaaaaaaatagtaataattggtaaacttactaataaagaatctttgaattggctctatccaga

SEQ ID NO: 47074 - DNA, 1875 bp, Homo sapiens
gatgtggtagcctctcctaagctcccagagagagagagtgagaggagcagatctcagagcagccaactgaagcaaacggacacaagcgaggagggctccccgcgggagaatccccgagaggcagagggcgagctccccgagagcggtggccccgcagccccccctgacgccgagctgtcacctcgctggagcagcagtgcagcggctgtggctgtgcagcagtgccatgaaaatgattcaccccaattagaacctctggaggcagagggagagcctttcccagatgccaccaccactgccaagcagctgcattcctcgccgggaaattcctccaggcaagagaacgcagagacgcccgcccgcagtccgggggaggacgcttcaccaggtgctggccacgaacaggaggctttcctgggtgtgaggggtgcgccagggtcgcccacccaggagcggcccgcgggaggactaggcgaggcccctaacggagcccccagtgtgtgtgccgaagaaggctccctggggccccgcaacgcccgcagccagccccccaagggcgcgtctgatttgccaggtgagcctccggccgagggcgcagcgcacacggccagctccgcgcaggcagactgcacagcccgccccaagggtcacgcccaccctgctaaggtgctaactttggacatctacttgagtaagactgagggggcacaagtggacgagccggtcgtgattactcccagagcggaagattgcggtgactgggacgacatggagaagaggtccagcggccgtaggtcggggaggcggagggggtcgcagaaatccaccgactcccccggcgcggacgccgagctccctgagagcgctgccagggacgacgcggtgttcgacgacgaggtggcgccaaacgcggccagcgataacgcctcggcggaaaagaaagtgaaatctccgcgggcagccctcgacgggggcgttgcctccgctgcgagcccagagtccaagcccagccccggtaccaaagggcagctccgaggggagtcggaccggagcaaacagccacccccggcttcgtcccccacgaagaggaagggcaggagccgtgccctcgaggccgtgcccgccccgcccgccagcggcccccgggctcccgccaaggagtccccacccaagagggtgcccgatcccagcccagtcaccaagggcactgcggccgagagcggggaggaggcggcgcgggccatcccccgcgagctcccggtcaagagcagctcgctgctgccggagatcaagcccgagcacaagaggggcccgctccccaaccacttcaacggccgggcagagggaggtcgaagcagagagctgggcagagcggccggagcgcctggagcttctgacgccgacggcttgaagcccaggaaccatttcggcgtgggcaggtcgacagtgaccactaaagtgaccctgtaagtagccgcgcaagtcccggccgagttgctgtccgcacacgtgctgggggtccgctctgagaggctcggggtatctgcattgtggaagaaacgtctggtcactgaactttcccctccatgctgaacttaagatagtgaagggccagtttacacagtcaagatttaagatgacacctgtggcagcctcctcagttaattccctttttaacacaagatttaagtttaacgaatgtaaaaataggatatccgttgaagctcaacgtttatgtagatgagagataagacctcatggcctgacatgagctgattctattctttattcaaaatgtacaagggtgttccaaggtgggatgttcttaaaatgcatgtgctgtgaatttcaaaatatggagcaaacagtaacatg

SEQ ID NO: 47075 - DNA, 1266 bp, Homo sapiens
agtgattaatatattctaatttatctttatttgagatgatactgatattatttgaattagaatctcttagctgagttcctattctgtgaactgacatgaaacatatgtgccctgaattttctagcattggtggaaatagcctagacatttaaattaggagaaattgaaatggcaaattcagttagaggtgaaaaaacctcaatttaaaagcataaactcaaagagttttaatacaactttagcatccattagagtggaggtttcaaaatcgatacaatgtgggaaaagtgtgatctacctacaggatcgtgggtggaaaaagaggatcgttatgtgaagttgtaattatttgttgtgtttttgttcatctgattgcagacacttagaggaagtgtccaaaataaactcaatccccgacctggaaaggtaagattattttctgtttctagtcttgattctattttggtctgacagagtacaacaaagtgtgctaccactttcgttttcttgcaggtagtgatatatagtgaacccgacgtctctgagaagtgcattgaagttttcagtgacattcaggattgcagttcttggagcctctctccagtgatactcataaaagttgttagaggatggtaagaatggcactttaagttcctgatgtcaagtgtttgagttttacatacttaattaactttttagtcctcactactagtttaaaattatggctttagcaatgaaaagcacaggaaatactactcgtggtaagataagggattcatatcttaacaatgtcattttaaatcatgtttctgattatagcagtgatatatgtttatgggagaaaaatcagaacaatacagtagaacaagcttctttttcccatgcttccccataatattgttttggactagtcatatatcagggcccataacatactcttggttgatgacctttaaatgaggttgataagaattgcactagttatgttgataggccagatacgacttttcaaaaacctataaggaaacttgagaacacgtaggaaaaggcaaagtaaagaaacaataaggaaaaaaaatctataaggtaaaacaaaaataatctataaagaaaggcatttttctaactttttaatgacagttcaatgcagcactaacttaaaatttaatttactttccaatatttccacaaaagattgttttggctaagtaaagaaactggtgaaaaaaataaatattttgacagtttctgaaatcattttatcag

SEQ ID NO: 47076 - DNA, 1419 bp, Homo sapiens
gcaaaatctcagctcactgcaacctctgcctcctgggcttaagcgatcctcctgcttcagcctcccaagtagttgggaccacagatgtgtgccaccaggcctggctaatttttgtatttttttttagagacaggtttttgccatgttgcccaggctggtctcaaactcctgagctcaggtgatccacccgccttggcctcccaaagtgctgggattacaggcatgagccaccatgcctggccccagctcatttcttgcagtggaaagagcttctctttctcacaagttccatgtttgactttgctttcctaggcttgggtcatgtgcacatgcctgaaccaatcactgtagccacagagacggccatgtctgggctacgtgtccatctccagagctgagatgtagggtctatcccataggagccacttagatatgaatggggttggtggttccccagggacatcagaaagagtggggagatagatgccagatgggcaaaaacagcagatggctgttatagggagttacataattattcttgtaatccaggctaatgtctattctaatttgttataagtgagagtattctcaaatagttacatgaaataatgtgacattggttatgctgaaagtgtttggtgttaggtttttgttgtcatagtgacatagactatttgaatcatcctagcctcaaccccattgtatctcatggggcctcccacaatagccctggatatttgaaaagtgtgtacaatgtactaaaagttgatgaacatgcttaacttttactcttagtaaatagagtaaaaaaaaccttgttcaacaagttcttgtctaggccgttgcatgtggtgccattttggcagagtatcagtgatttccgggtattccattctcagcaggaaatgcctactcttgggtcctattctggagccctaacattttagaatcagtagcctgtttgcaaaagccagaagtcatctgaaatataaggtacaagttatctgaaatgttgctggggctctgcagtattttagattgtctttaaagctaattatttaggaggaaaacatagtgaccaacttagtctggtgaaacagttgtacattttgatactcaccagttgtgttggttctattagtcagagcctagtcatccaccctggcagaggaagcaaaaggatgctgggtagaatgaattcccttaggtattttgtagatgatgctattaacacaggtagaattattgtgccttgagccaatctcctttcctttttaacccaggccttgcttacttgaaatcagttccctttataaagtgctgctattatatgtttctatttttagtcatttctaattgcatttcctggcttaagcttcttttttctggctgtagcagttaagttttggtagaaggggg

SEQ ID NO: 47077 - DNA, 518 bp, Homo sapiens
ctgctgctgggtgcaccaccaaactactgctagaagttggtggcactggctgagaaaggctgggcggtgtcagataaggactcccttttttttcttttttctttctctttaaaaatatacttctactcaatgtggtcaagagtagttgacttctgaaaactaatcaaaaaagggaaaaccttttaaacagaagcagtaaaatagctttccaaatactcctcatttctgctctcagcttcagcttggtcttggctggataaaggtcagatgaataagctggagtcacagtcagaatcaacatgacccaagagaattcctgaatgcattcctgcttggtacctcaggccaaaccacagcctggcattcagacacactgggaacatccacagtgctcccattaccaagatttagacttacactgtttctcttaagccttttttaagccaaaacacgaaagtatgttttgggctaatcatgtatttcatgaactactctatattcttcctgtggtgacagat

SEQ ID NO: 47078 - DNA, 2095 bp, Homo sapiens
agaggtattgttaaaaacctaaatgattcatttatgtaaaccaaagaagcgtagtcaattttttaaaacggcataccttatgaaagtgatttttttaaaaaaggtaacaatgtcttttgaaaacttacttctcatattaacgtctataggatttacactggcagcgtgaactttgacaatgacttcatttggatagtgtatgataggcatcatcatgttctgagtgaatcgaagcacttcattcttcccatatttatctatcacccaagcaggcatgacagtgctcctaggagaggtagtactaatccttctaactgaaggcttttggacaactttgcttctccagaagcaaaccgcagtgcatgcatttcttctaagtacacaagtcttcagaaattccattgtaaacactggttgaactgcgtgctcaaattcaaatacacttggactggatcaaactctcacccctgaattcagtcaaattctgccaaaccacgggctagtttcaaaattaagcatgcaaaacggagcattcgaaaatgaagctaatctaatggagaaactgaaagaagaatacggaactgttattccgctcttcgcatatgaaatgctcgaattaacgttccagtcagtattctgtccattctcctccctcactttcaccccctccactttaaaaaaaaaagggggggcggggcattaaaaagcaggtgcgcaaaccccctagatccctgccctgtcctgggagccctcggcgggacaagcagacaccgctcgcgatccaacgccagagaatcgaacgcttgccgactgccgccgcgaccctggcccggaatctccttgcctgcccgctctccttagccgccgggatggctttgcggcgccaaccaatcgcctacaaagatcatttcctcgggctgcaattcaaccaatccaagtactcggtgttgaagggctcagtgacaattaaagatggctgcgcccatgtaacatcactagcgaccggtgacctctttttcccccttgcctggctcctgtggtggcaggctgggcacgaggaccatgctgggccggagcctccgagaagtgagtggaattggcccgctgaggcccccgggagggcggaaagtttaacggacttcgttgacaaagagtccctgggccttaccacgcatcttggcccacctcgctgcttcctctagaactgagtgggggataagtacctttcgattcttcgggtgtactcgccgtacccattcaggagttaggaccttagcagggaaatctctgcaccgcggatctgtagggtggtgaagcggcttctcaccattagacatttgctctggtgtaggtcgggatccggatggtctcggagtgggctttgccaaagggggcttgcggggccacttcagtctctcttctgtccccgacacttagctgcagttgtcgctaagaagcccggcgaaactgtagtttgcaaaattcaaatgagtaatttttggcttttttcaaagaattcgttctctaggatttacctaccactaagataccagtgatttcctaacccgtgtctccatgtcctggacgtcgtgtttgaattctagactgtatttgtgaatgctttctgggcagttcttctaaatgtcacataagcaccctcaaattcactttaatcggtgttgaagtaatcattgtaacaggacttacctctcaacccccgtcttaaaaaagctctggtatttctgaattcttaatagactctttttaatggcacaactattatctcatttgcctttagattcttcctcatctttcatatccaataaatcactaagccctcttcattctatcttgcagatatggctggaatctgccctcttacgttatttctgctgttatagctttaattcgggtctttttgcttcctggttcacgtcactcaaccttagaactgtctgcaggcccattgctatcagagtcacataaagcacctgttgaaactaaaactatgccccactctagacttaattagagctgtgtggtaagttcgggagtatggtttaatggaggctccaggtgatttctggtaagaagt

SEQ ID NO: 47079 - DNA, 1055 bp, Homo sapiens
ggttgatctgtttctatagtgtatattcttctagactactgaataatcgtatgcaccttgaaaaacttacataatatagaaaaaaaatcttttgcacaaatagtattatatccagtccttttaaaataatctggacttttaattccagaggtcctgacatgatctctttcctttgaaaagcaaagcctgccatctggtttctgcaggtcattaaagggtttttgctggagtttatcctggcaggggactgccaggcagttgggcttcggtggcaagtcctgactcaccaagtcggcggcatcacatgacaacttgctccagcctctcctttgtaatgaatttggcttctactgctacacaaaacacccttggagactaaaacctacaaatgttatgcattcctagacttggagagaaactatagctaccaagcccattctttgtcctagattcaaatgaaaacactgtaatgtgacctcccacgggttttcctctataataaatttacagaacttctgaaaagattactaataattaattatttccttgtcccctcccaccccttgtcaaatgactctgaaatctaatttcttttccttctgacaaacagaaaaaggaaagctacgaaagctccctgtacaattccctcacctgtttacagcccattcttatttcaacaatcctaggaactggcagaaagagagggtgcagggaagaaagggtgttacttgtcacccagtgcaagcaaacaagatgttgtgaaagaaattatgtccttccaaaatttgtatgtcaaagggcctttaaagaggtaattaggtggccgggcacagtggctcacacctgtaatcccagcactttgggaggccgaggtgggaggatcacttgggcccaggaattcaagactaacttggacagcatagtgaaaccccacctctatttgtttttaattttttaaaaagaggtaattaggttgaatgaggtcattgggtggggccctaatgtaatctgactgatttccttgtaagaagagggagaggcaccaggggtccaca

SEQ ID NO: 47080 - DNA, 2016 bp, Homo sapiens
tcacagtcagttttagggcttgaggaaatttaatttccatttcagaaactcactaatctagttgtgaccaaactttttcctaccaatctaaccaagtttgcttataaacaatcacactgagaccacagccttcttccccaacgtaggtgcagatgaaataaagaagtttagagcagttttttctaacgtgggctctgtaataaaaacctgctacagtcaaatatttgagaaaccctccgtactgttatcttctcttatagattcctagcctataaaagaagagacccatttaactttgtttaacccgttatgtcctaaacttttttgattgtggagtaacctctcttaacaattccactaccctagcctgagcccttagcctgatagctactcccttttgggctgactgcagctgcctgcctcttagctttgtgactactgtcacacaacatacggtctttactcagcagcccatactaggtcctcaccaatttcttgatggagtacgaagtaaggtttgccatattacctactctacaatttggggactttaaccattgtaagcccaatcatcactctcacttcttagcttttatttaaagagtaagtttgtattctaaattgatttctacaactgctgtttatggaattaagatgaatccagtggtggtcagctgatcactgtgggtgaagtctgttggttgctttttacagtattttatgttccttcttctcttgcttcctgtgtgctgtgctgtgaagcatgacagagcacctgcctgtgtgtgcacagcaccgtgaactcaatctttcagtcactttcttttcttttcatgtttaaataagagataagccacgttggccagggcatgtggactctccatggagttcactaacaaaccgaatttatgtatcgttgcaaaatagtcaacactccagtctgttagaaacaggtgccaagagaggaaatgtttaatattttccacgtggcatgggctctgtcagacagtgtttccaaccagagtctgttttcgcagttaaatcataggttcagagtcttccttttgcctcaagagtctgtctggtggctggctcgcagctagcttctgcacaatcccctcactctgaccctgcatcttcaatgccgccattctgccaaaccgctgctacttctgggtgaaaacctagttctagctccctccagagttagctggtttggctatttgaaagctactccttcaatgaaccgttctttgtcatttcagaaatgaaccctgctttccagcatttgggctggacagggttctccaggcttgctaactacagcagctgttttctgtccccagtaagagccagggtgacatacctacctgcccagagccacccttgacaggagactcagggagaagtgcccccaggaccaaagtaagtagtgccatggcccagacttcctcttagcccatcctgcttcttcctcatcccctacttctcatcctctctgttttaatttctacttattaatattttcttcccacatatttaaacagctcccaccaaggaaataatgtcagatgtgttgctttttcaactgatgggttctaatcatcatgttaccaaattctgcacatccttgccaagtaaggcttggctctctaaaggtttagtttgttctttctatcaataagtattgcctctaactacgtactaaagagttctagactctatgtaccagacacaatgcttgcccttgtgcttatctgctaataaggaagacagataataaacaagcaaaacatatagaatgttagcgataaatgctccggagagagaataaagcagtgatggtgggttggcgacaggggtggggctgagattctagatggggtggccagggaaggggaagtcctctctgacaaaatggtatctgcaagacccttaaagaagagccggagagagatgtgttggggaagcacgttccaggtgatggatttcaggacatattttcccaaagtatga

SEQ ID NO: 47081 - DNA, 799 bp, Homo sapiens
gtgggtaagatacatgtgattatgtatacatgattacgtgattacattccataggagtgtagtgcccaccatgctagtctttctcttgctgactacgcggaagcaagtagccatgttgggcagtcctaaatggcaaagaactgggggtgtcctctgcgagctgagggtggtctctggccaacaatcaacaaaaatctgaagctctcagtcccataactacaaggaactggatgctgccaacaattgtgtaagtggagaagtagatcctggagactttccctggtcataggactatttctggcttgttcccagagcacggcagaagtgcaagggagttcatgtccccaggagcaacttttcaccaatgagtaataggaattggtggatgaataacccagcttcttcaatccttgttgggacaaatctgagatgtgcagtaaaggcccaggacaaatagctcaaaggaacagaagggagagagtcagaagcagatgcatacttgaaggaacacttgattatgacaaaggtggcactgaagcatagtaggaaaagagtggtcatttacatcaatgatgttaagttaataagacagtcaaacgggaaaaagcaaaacttgacctctacctcactccatatacaaaaatcaattccaggtggattgtagatctaaatctgaaaggtaaaataatgaagattctagacaataacataagagaataatttattattttttaaaatgtatttttactatgcagccataaaaaatgatgagttcatgtcctttgtagggacatggatg

SEQ ID NO: 47082 - DNA, 1362 bp, Homo sapiens
taattgaacccaaggatacaggacagccaccgtgggtcccttggcagtggcttggtgagtagagaccattattttaagaaacgccagtctgaaatgagccagcaatttaaatatttttaaaagttcaaatactgttttaattttattccttttctctgcaagcccggggcacagaacctggagatgtagccgtttctctttaaaagtgttgctgccaagtgaagcaggcctgccagagaatgcgacctgcagtatagaagaaactagcacatgcattctagattattccagtggaatgtagcatctacttgaattttgctaaagcaatgccaagttttttctctttcagtgagtttgagttcctatgggctagagaaatcgtttttcaactcctaagcattatagcatcaccgtggaaccagcaggaattaagcttcacctctcccattcctctcactttttaaactgttttaccacaatttacctccctcaggacactttgccctctgagcaacccagagatgctaagcccaagtccacgtagagctgccctgtgccttttctcacgactgcagggcacaagccaccccacttctcagccttggctcatggctcattagccaccaggacttagtttagggccaaattcagctcacattgcaaccttctggctgccagggcagaaacaaagtttgaaggttgttctgtccaaacaatttgctccacagagcagattaatttcttactggcaaaatccatacagttaataattatctagactgggggaaaagtaccagtaaatcgattgccacataaaatacaatttaaagaatagagcacaaagagaagaaatctgggcgtgttcttccagctattccaaaccagattcacatataaagaccttccatcctgtatctactgccccaccttgtcttgtaggctccagaaccatatttcaaccttcactttcaatggctcctttttgcccttagtaaactaatcagcatgggtaaacaaaccaacagtaaaccaaccaagccccttgtgaatcagcctcctgctgacactcccctacccatacctaccccatatagcaatcacacacaggaaatctcttgcaagtcaaaggccccatgctctcctgggcctccgtgcctttgcacgtgctgctccctctgcctggtgccttcctgcctggctcactggatcatccttcagaatgcagttcagggagcatttctatatgacatccctgaccatcatgctctggctgaagtgcttgtctatcccttgccatagtccctgccatggctgtatctgatgagtgcgttgatctgtttagcttcacactaggtttagtgg

SEQ ID NO: 47083 - DNA, 1789 bp, Homo sapiens
tgtcatctaagacctggcatgtctgaggggagagaattgtgagaagagattgaaatagatattaacgaatgtcttggagagggtcccaagtcctgtccttaccattggccttgcttgagtttgggggctgggcaacaaaaacccattttagtcaaagaagaactgagtgcagagggaactatgcttcgcttccctgggtgtgaaccaggggctctgcaagcgtataggagaagcccccatctggcaaggactgagtgagaggccaaggaagtcagtgtctcagaagcccccccaatacccagcagggggaagaaaaagcagccaagcgtgcccaagcaccacaggcttgcagagccaaaggaacctggtaatatgtgggcctggtgacgtgaggccatggtggatttgggcacaagtggtagatgccagcgcatgactaagaggacaagatgtgccaagtttcagctgagtcaatgccaatggaaggcagagaatagtgtgagccagaaactccctctcaccagcgcctgggtgctgcagtgccctctctctctgcacaggaactgtgacagccttcagggagaagaggacctaggaggaggagaaagatccagaaattgactattgattcaaggagtcgtgagttttaaagcaaaagttatcttgaattgataggttcagttttgtggaaataaatagtcacattttatttttacccctgagatactgaactatggtggttatataaatttcatatccactatacaacttttagtttctgcagactggatttcagtagtagaataaaatctgttgaggagggacttagggaattaaataaatatgatgtacctatagtaaggcaggaagaaattgaggcataggccgggcacagtggctcacacttgtgatcccagaactttgggaggctgaggcaagaaaatggcttgaacccaggaggcggaaattgcagtgagctgagattgtgccactgcactccagcctgggtgacagagcgagactctgtctcaaaaaaataaattaaaaaaaaaaagaaagaaagaaattgaggcttaaagaaaccaaaggctttgcttctcataaaagtgaattaatggcagacaaatgtggacaattttatcatttccaggcctcactgtttctaaacttaaacaaatactttgaggggattctggaataatcctcctgagaccacagccctactcacagagctcttctagttcgtggaagctgacctacagaagggggagcacttcagtgtggccacctctctccagagtaaagtcattgccacacaagaagtgtccagagcacagaggctggctgggtttcctgctgttgcctggagatgccctgactcaaacagaatgtgcagcccctcgggaggtcaggcatcctgcagctggtctgggaagacccctggtccagtgggaagagatgggtgtggcttttattttaagagatggggtcttgctacgttgcccaggctggtcttaaactcctggacctcccaaagcattgggattacaggcgtgagccatagcacccagccttgtgtggcttttaaatatcccttgtttatggactaaaatgttctctaatgaaaggtagatactgcttctaagatgcactccattttagttctggcattggaggagtttggagtgttttctgtgtacaaccctccctgtacctctagcacaaacagacaatgagaccccctctcctacccctcaccagctctagggaacccagaggagtggaggca

SEQ ID NO: 47084 - DNA, 2509 bp, Homo sapiens
cttcccacaaggttatatttcagctcctcatacatgatcaacccaatcccaaatcccattttgaggctctatttcctagtgaaaattctagtatcagttactgtatcagtctcattgccagcaagaaacaggtggtacattcaaactaggatgattgaaagagggaggtgtttacagtggtgtagatggggcacagggaaatcccaagagagagggtgataaccaagagctagcagtggagcataaagaaaagagaggcagtgaccttcagtccagagactcagacagcctgtggcaacctcacagaaacagcgctgagggaaaaatcaccttgacttcaccctttccctaatttccagtctcctgccagggatccccagtggccatacccagggcaaagctagaggcaagggagccagtggatgtagtcaactatgtcagcctcctgggtagagagtggatctggaagggaaaatgcaaaaatctcaaacacattaggaaaggcagtgatgttctaaacaaccttagtatgaggtgcttgtgcaaagcaggtacttacatggctcaggagattggaggaaattctgggctgtcgtataaatctgaaagctctcagcatagaggcaaggcaatatgggtggttgagatgatttaagcagctagggtgggagaagaggatctaaggttgaacctgaggagttccaatgtgtaaaggtcaggtagaagaggaaaagctggcaaagggacagagaaagagagccagagagagacacagctgggtgtcttccaggagagtgtggtagtttggataccaagaaaaatagctttttccaaaagaagggagggtcaactttgttgaagtaggctgagaggtcatataatacaaagaccaaggagtacccatgggatttcgggccatggaggtcactgggtccttcagcaaaaaaaagttctaatagaggaatagggaaggaagccagttggagaaggctgataagtaaacaggcaatgaataagggcaaacaatgattgtgcacaactcttccaatcagtttaggagtgaaggggaggagaaaaacagtagaactgaacaggaaatttggagtccaggaatagaattttttagaatgggagtgactggaacatgtttagatgctgatgaaaagggcccattagagaggaacaattcaaagatagaaaaaggggaggatttataatgtacctttcctaagaaggctggaatccatggcataagaagagacttgacctttgtaggaggagagacatcagttccattttgccagatgggaagagcaaaggatgggcgcagaggtgcaggttggtttataggagccggtggcaggaagtgaggtaattgctaccagagcgcatctatttcctctgtgaagtaagaacaaagacatctactggagtgagcgatgagatgggggctcaaagctttgagaagtggagaaagtttaaaatggtcgtttcagagacagaagggtgagggacaagaggaggacggtgagattccctaggggtgagggaggtttgagaatcagggaaggtggtgactgggtgcaggctgtaggctgggatatttctctctagtcatactttgctgcctagggagagacataaataagaaagtatgctgttgagttcttctaggataccccccgcccaggtggacgtgatgaaaggaaaaaataggccagtaagtttagggtattggcaagacagtgactaagataatggactgtggagtttaatgtggcttcaaagagaaacaagggcagagtgggttaatggataaggaaaagtagagtggccagggtctaaggaccttgtgtggtgagatgcagagcaggtgtgcaagtggactggaatgagggagctgtcatcagagaaggagatggaagaggtaacaagatccaggtgccactgagaggtgggtgctggaggtagtgaagtagatgaaggcattgagaggccagagtgttgactaggtcatccatgggtacagtaacgcttctccggaggatgacagggttgaggtgtgagggaatactagaagcaagaagggaaagtccttggggaacaagagggagtttccggagaccagtggacaagaacaacactacctgaacttcagaggagcagccatttttacaggaatgcttgggggctgcattagggaatgagggggcagccacatccacatcctaatctaggatatctagggtgtggaaaaggactccagagggctgcaagaaaagcagtgctctctgggtaaagaagagttttaattcaggcaaggagatggaggagaaaatatcagggttgagataccaaggtctcctgagataagccaaggcagcagaagtaaccagggaaaaagaggtgatacttcaacttgagtatgtttgggtcacagcttgtgaaaagaattgccattaaaatgatttcaaaatcagtgtctgtctccagaaagcgctatgccttt

SEQ ID NO: 47085 - DNA, 6573 bp, Homo sapiens
acaaatcactgcagggccattttttcttgatattacacaaacattttatccaaaagtaaaaaaaaaaaaaaaaaaatttaccccaatatagtctcaggtattttgctatagcagaacagacagactcaggcactttgcctgctcacctcttatcttcaggtgagaggcgtcaggcatctccaccccacagtcctgctgacagcaccctaacatactcacaggcaggaagcaggaacgtaggggtgggttccagggaagagaggtgtcatgatgagaaacacttgtggggcctgagctgacctaggcggccgagggagggaaagagcatcaggcaggagaaccaaagtggacatgaggaagagaggaaggtgggcgagcccctggatgagaaggggccaccacgatgccaggctcacctctgccattgaatagctgctcggtgactcctcacagtctgcaaagcaacctccttataatctatagctcaccaagtcagactaccaatttaggacgtaaacaaggctgaggaattttatctttcttcccgcaatctaggcactcagtcttccctgcaaacttgtgcgtctcatgacagccacacttaaggacagcagcgggcagctggaggatcattccctctggctgctgccccagctgtatttacctctgggcatagtgactatctaagatctggaacaacctctaagaacagggtacaaccttgacgtctgagagaacattacagctggggaaagcttgctccagcaacttccccctctcactgtgttctctttgacctctttatcacttttcctgaaaagggagggagctgaggaaaagcatacaagtcgcttgggttattgaggccagaggaaaagagttccagatttaaacgatatcagtccagctataaaccacgcgatccgctgagtatcaactgacatgcagacacaaaagtgaatcctcgcttaaactaatgtgaggggaatgaaaattattctgcttttacaggagcactgcctggctgagcaggcggtctgggccagccacacagagattggtagaaggactcctgtccctgtcgactcacagccaatggacttggctcctttcttagggccctccaggatacaggctccccattgtgccttgagaatgaagtccatttgcgctgaagagggaagagggaattttacatttgcttacattagaaggcactgtagccaatgagagccaaataacccaagagttttggcactaggagggactttaggccatttaattcacactcatcattttagacagatgaaactgagaaagaaagacggaagagatttgtacaaattcacgggtaaatcctcagcaaagttgagtctagaatctggcagacactcagaccctcctcctccctttccctgctgcctccatggaaaacttggtagttttcctggcttgttgtggttttctgaaagcccttggattatcagagctcacattcacctaggcttatttcctcaactcaccagctggggctgaatgaggctcaaagaccagtgggaagagagtgcttgctgaagggtgcatggtagactgagagagaggaactatgaattagattcatgactttacactacctacttgagaacttcattttcaaatgtgcaaggagaaacagacgctcttactacacccaactaatcattcagcatgtgtcaggtccagtgaggaggtgaacagatgcaaacagaactcttggggcatgcttgattctgcatcagtaagccatgatctcaccataaaaaatatcagtcacctcctgtggttggacacaagtagagactgtaggtccccaccctgattagcttgctaccaagtggagctgttgcaataaatgcaagtctcagctcagaccacatttcatcaaatgcagggatctttgttagataccagattatattaatcttttaaaaccttgctaagaggagaggtctctctctctctctctctctatctctctccttgcaacctccggctccccccaaaaaaaacagcagaaatacccaggcaagagagagttgctgtcctttaaaaggtctctttctgcccctcctatgcaccctctttccataggtgatgagtcacagggctcagggaatgtgtctgcacctgtgactcatcaccagtggaaagcccatcccatatcccacctaaaccactctttggtgcccaggatcccaagggccctgaactcacttcaggcctcttcagggggtctgagtcctgaggatcatctgtctcatggctgtcctcatccctaggccaccaggcagccatttataaagaatgggctatgcagactggggtgtctttaatatgggatgagggatggagctgggagcagacagagaacggagacactgggacaagcagatggaactctgagttgaagaattctatatccaaacttgatattctaggtccctctgaatatatatttttcaaggcaagaggatagagtatgttctatattatggtttcttagctggatttatagcttttagatgtttaaacatatgctatgtgggtctccatttgcactcttgccccagcctgcaaatgttggagacaagtttttgaagcaaacgcaaagactggtttcctatggttagatggtggggggcaaggggagagtggtcttatccttggagatgtcacaccagtgggctctagactcccagccctacacagatggcataattattgggcttgatcatttttatcccttattcacacaagacaattagtcccattagattactcctaaccaaacaaaaaaaaatctgctggtttgccaaatcaacaattacttttaacacttttgtgtgcaaataaaggaaactcagttgttgacacagactagagttcacttttttgtgttatccattaattaatcaaccctaaagagtaaaagcagattaggattaattggtttacacacatattccattacttatactacagtatttaaaaataatgaccacaaggccgggtgcagtggctcatgcctataatcccagcactttgggaggctgaggtgggcagatcacttgagattgggagttcgagaccagcctgaccaacatggagaaacctcgtctctactaaaaatacaaaattggcggggcgtggtggcgcatgcctgtaatcccaggtactcaggaggctgaggcagatgaattgcttgaacccaggaggcagcggttgcgatgaactgagatcgcaccattgcactctagcctgggccaacaaaagcgaaactccatctcaaaaaaaaaaaaataataataataataataatagtaataatgaccacaaatacagcatagcagccagcctgccagagtcccccttttgtttctaaactggatacacctacgtggggtggtggctgtgggcagcagctctcaggatgaggaatctacaagactccagaagcccagaacaaaggctcctctcccctccagaaagggcatgccagcccctaggatgatgtatatcaccgtttcagacaatccttctttaacccaataaaccacatcccctaggcctatgccccaggtttggggttctaagagacttactgcacaatgtttacgtaaaatcattcttcttttctgtgctggtgctccatattaagcaacttccctttatctgcacttatgttacaggacctaagaattttctacttacatccacttaggggctttccatgggcaaatctggccatgacccatcacatgctgtttttccagctctttgctgtgtttacttttcatgtaaacttgggttattccaataattgtttttcggtaatttggagagttacaggaatgcaacattgagcccaagaggcaagatcaaaactaaaatttgtgacattaaatatccaagagttctatccaaaatcttctagaaagttaatgagaaccccaggcaaatcaactggaagaaaaatatttaccatttagcactagacagttgcaggtacaaatcttagtctacagaaatgtcgacaagctaatcagtgggttccattcccattcacccaggacacacaataccacattcaagaattccctaatgaatatacagttcttactttctctgtgacccacctcccccacaccaagtccccagatactggagacagggagcttcaagtggagcaccacatattctcctaaatctcttgtataagtcagagtccttcctttacacacaagggctttaaaaactcaaaagccaggaaaatgggcttctatatctctgtcccctgttgactatcccttcactaagacaatgaggacagagtaaccttgctcaaaaaagcaagaagtactttgggaggccgaggcggggggatcacctgaggtcagggattcgagaccagcctggagaacatggcaaaaccctgtctctactaaaaatacaaacattagctgggtgtggtggcacatgcctgtaaccccaaatacttgggaggctgaggcaagagaatcacttgaacctgggagatggaggttgcagtgagtggagaccatgccactgcactccagcctgggcaacagagtgagactctgcctcaaaataaataaataaataaataataaaaacaagaagagaagtaggtgagagggttaagaaagaaatacaggaggaaaaaaactatataatacttcaaaattaatatccaaccataatactaacagttttgaatatatttccatatagcctgttgataaaaaaaatctttctttaaaatatagatatgattacaagcctccaacagtttcatgttccccacaaaggaagtattagaaagatcctcctacatttggaaaatgaagtgctggcaccactgagatatttgtctgggagacctactatttgcatgggcagagaaaacattcacatggaatattcaaccacaaaagcatcagatcctgggaacaaaactaacaatttcccaaacacttccaaaacatagctctgacctctactccatcaaaaattctgatttaatttgaggagattctgctctatttcttaaatcaaatgtccctatctctcttgcaccgtgaatgctctgaatcgaccagtaagacaagaacaacattaaaaccaacagtgagggcagtttcagcatcatcttgctctcctccaagacttcccctggttaccttgctcctttctccctgccagaccttgagttctcttttccaaaacatggcttgagcacctccttgaagaagtcttcctcatgtctcttatcttgttctaatcatcccatggctagcgtaagtagcacagatcccatctgcattccagctatatgtgttcctgttgtttcttcctgtcttctcattagcctataagctctattgtacaaggtctacacactcacatccactgtagtacccataaccatgttgcacaatattctgcatacagagggaacttaataatttttgcagtttgacttttgggtctctattctggctcctgggtaatcatttatcagcaaacaaattagttatcagtgaaacagccatggtttccagagttaatcatttgtatttccactgctggaaaaaacaacacataccactttccttgcagagaggcatgcggtcagaacgtcactggcagatctcgcctgagagttttgacgcttgtaactctgccctggaaaggtgaatcaacttttattttgattcatgtgtttttccaggttcctttagcctaaatgcataaaagtcagagaaagtcatcaccataatactgataacaacaatgacaaagatatacacatacagtcagtggctgaacacccaccagcaagattgctggaaaccaagccgcaccacacctgccggagcatccaggaccatctactcagtgcaggctcagcagccatgcctacctttgtccatcccaggtatggctcccccaggtgccagggctacttctctctcttctagtggctgctcttcctgctggcacgcagcacctgcctcccagctctaagcctgtggggcagccaggagagtcttgcctctggcctccgttggtcccatacttcctggcgagtggctttgcacggcagcccagccctggggaacttttcaagggagagggcttctttccctccctaactcccctaccctcacccaaccccactccatactggccctttaccatcgccagttgttgccttgccaggtactgtggaacacctacatctttccctatcacagggcttggacacacaggcgttggagtcagatacgctgtgtttcaattttcaaccccctacaccaattgcttctcttttctgaacctcaattttgtcatccacaaaatagagatagtataataatacctgccttatggtggtgttgttagaattaagcagtaacgtcactcgtaatgataacagctgtactgaccaagggacttgtacgtgctgggtgccatgcagtgttttgtacctcttcttggagcccagcatgg

SEQ ID NO: 47086 - DNA, 2088 bp, Homo sapiens
atgataaaacctaccttgtaggatttttatgaatattaaataaaataacatgtaaaaacaactggccagaaatggtaacaagcaagagtagaatttgggaaaagggtttgcttgattctaacagatgttctccaaaggtgcaaaatgaggttgttgagaaaggtggtgtgtggctggttgatgcgaggctttgagtccgcctgcctgtgaagtttgattttgaaatctcagcctcttagaagcctctgtaaggggatgggtggtcacaaagccacatcttatagtgtggtctgcaaggatgcctataaaacactcaaagcttattgaaaattcccctgcagatctcctcgtctgaattcctccccaccccacaccaatgagccactacacattcaaggaaaacaaagagacaactctaaagccctaaggagcggcccagctaggccagtagttttccccagagggaaaatgtgcttccagacacactcagctgaaactgactagaaactggactgtgttgactgaacaagttgagaaagatttgcctctggctttaataaattacgacatcagcttttggcatttaaaatattcaactgtttaccttaaaaagtctcttgcggccggacaccgtggctcatgcccgtaatcccagcactttgggagcccgaagtgagtggatcacctgagttcaggagtttgagaccagccaacatagtgaaaccccatctctactaaaaatacaaaaattagccaggtgtggtggcgggcgcctgtaatcccagctatttgggaagctgagacaggagaatcacttaaacccgggagacagaggttgcggtgagccgagattgcgccgctgcactccagcctggctgacaagagcgaaactccaaaaaaaaaaaaaaaaagtctcttgacattaatttcttttctggtttgaataaaatagcctttttccaggttgtattaatttgcaataaaagtgttctgaccctgtatttttcttgtctgtaaaatggactgagacgctattaaggttcctttgggctccgagaactataggacttggggacaaacaaaccaggtggctgattctactgacggcttcactgtcacctgtggtttctgctccttcaaaggagtgaggattagctgctatttagacacaggaatgcaggtctttgattatttgggtgtctgttttcacaggcgttggacctgaccctgcagcctgggaaccctgaccggacctctcctctgatttgaaagtacgcaggcctggctgacaccagacaccacagaggtgtggcccccaccagacacagctaccattaaaccccatcttgttgctcactgggtgtgtggccttggttaaccacaaacccgcctagatgcctcactggcaggccagctgaaagccatcatttcttatccagccccttagggacaggattagaagagttacctaaaatgtaagatgttgcattcctaaagccctggctgtaacccagggggactccaggcaagacggctgatcccagcgacttcactcctaaatgaaaccaaagtcacctagtatccttgagtggcatgacatggagaatggcaagtgaaaccagagccttcttggcagttaactgaggtgctctgagaaggtggcaaaggaagaaagccttggctttatttaaaggggcaattaaagttcaggaaggaaaggaagtgttgttattcttaatttttcacactctccctgaccccaaccaccattccacaaatagcccaggatttcatttgctgccagcagaagtatatagatatctctggaaagctatgaatgatttacaagctgggtcaataattaagttatccggggatgtgtagacataaccagtcttaactctttaaatctcagaagacttgctccccagcctggcaagagaataatggttagaaaccaaacaaaatctccatacagatttgaaatgctttgagctagtaaaatgtttcaatccattatttgggaaaggctgatgagcagattgtgtttctcatcttggtctgtgattatttctaggacaaaagaaa

SEQ ID NO: 47087 - DNA, 1234 bp, Homo sapiens
tttgggaggccgaggagagcggatcacgagggcgggagatcgagaccatcctggctaaaacggtgaaaccctgtctctgctaaaaacacaaaaaaattagccgggcgtggtggtgggcgcctgtagtcccagctactcaggaggctgaggcaggagaatggcgtgaacccgggagaatggtgtgccccgagcctacttcccgcgcagtcctccaagacgcggcctccagcaggggtcgctgcttcgctgccgccctggcctcgcgccccgcccgacccgctctcactgcgccggcgccggcggaaggggcggggcgcagataggggtagcctggaggcctgcagtccgcgcggccgcggggagggacgagagggcctgacgtacaggtgagtgcgcctctgctggcgcgccgcgccgggccccctgcccgcgccccctgtcacttcgcctctccgccccgcccacgctcccgccgggtctccccgtgagtgtcccgtgtcctgccagcctcgggacgccccgcgagctcagggctgcgcagggactgtggtaattgagcgcggcgaagccttccgttcctgcctcctgtcgctcctgctggctccgaatgcagactgcgaacccggggacgcagttgtccatttcctttgaccttggggacccaggaaggtgcactgcccgcgggggtggggagggagcgagaggaatccgaccctgtctcagcccacagcctccgaggtctccaagtaaagggaaggatctttagctgcattagacttcaaagcgtttagaccagtttctccatcttacggagcggtgaacgggctcaggaatgtggagcgtttcctggcgtcaagcaggtcaaagtcagcgctgctttttttacagacactgcttttcttacagtcttcggttagttcagattgtatacctctcctgaagatgtcacccaaaacctcctatgggattctgccgtgatcatctctccactcatcccacaccaacgccaaagagatcttttaaaatgaacttccatcaggtcacttcccagggtccatcattgcgtgttcttttcctgattcattcgaatgcacccgtcctcctgatcaatttttattccacagggtgttgttttgttttgttttgttttgtttttttgagacggagtcttgctctgtcgcccaggctggagtgcaatggcgggatctcggctcactgcaagctccgcctccca

SEQ ID NO: 47088 - DNA, 2533 bp, Homo sapiens
agggtggaagtggggagcgggtaacaagagaaagtcctccatcccagccgtttatatacctggctacctgaaggactcagttccttacctcagtttcctgcaaccgtagctttctggcactatgccacgctgccctgtggcatgtttactatttgtattcaaccattcaaaagttactttaaggagatgaactgcacatttccaactctagtgagtaaccttgttcctcccggcactcttgtcgagttagcgtttacgtgcagaattcttccagaaagaccacctgagcaatcaataaaacttttatctctgtaaaaacaccttgtttaaaatagctacatagggagacgtaggtaaacaagcacacaagggcctccaaatcggtggtgcacagctcacggatgaggcaagggcaaagcatgcgtgggaaatcacgtttatcatagagaaggaaaggagcgctcacgaggagcggcgagcgccccaggcttcagctttgcggccggccggccaggcctcgcgccagcccgggtgcacacccaaggcgccgggcccgcctccagctcctgggcagcgggaaccgcgaaccgccgtggaacggccgggaagggagcgctgcgccccctggcggcggggcccatccctctccgctcccggccgccgccgccgcgggccggcctcgctccatttgcagcctccggaggcttcgttcctccgagcggctgctcccccggcctcccgctcgccgcccggcatctccctccagtccccgccccctgctcccgctccgacacccccttccacacgccgagcagtgccccgccaaagccccgccgagcgcgagcgccaagccgccgcgagtacggcagagccttccggccgccccggccgctccatcgcggcgcccggcgggggtgcggggccggcgcgcggcgcgagtggggcgggcggcggcggcggcgcggacggttccaccgcgcgaaccccccgcccccgcgcggcgcgcgtgctccccagaacgccatggagccgccgcgttccgagcgggcacaaaggggcgcgcagcacaatgggcgcggcgagcccgtgggcgcccggcgcccgctccggtcgctcggcccgcgcgggggtgggcgctactaccggcgggcgcgctcggagcagcccccctccgcgtcccctcccctgctcccgcccccaccccggcatggatgttgcagccactctaccggccgctcgccccggagccgccaacgctgccgccgccgcgcggccggcttgatccgccccgcacttacctgggacgcgagttctgtactttgccgggcgggcccgcgccgagtttgggcgccacgtgggggggagggcgcggggccggggagtgggggccgcgcgcggagggcctggccagggcggcccggggaggcgctgggggcggcgggcgggcgagcgccgtgtattttcccctctctttgtgtgtgtccgtgcgctgcgctctcgcgtgacgtgacgggactccgtgtgtcatttccgcacaaggacacaggagcccccgctgcagtggaaccacaacccctccgcccccacccccggcccgcccctccccctcagcggggcacacgcgggaccggcggcggcggcgctcgggcgtgaacggccgcggcggggagctcgggcgcgcactcccgggacccaggcggcccggcgcgctcggccagcgcagtggctccacgtgggcccgcgctggctgcccggggcgggggcggcggccgcgcacccacggcgcgccgggcaggcgccgcgaacaatgtcccctgtaccccatgtgtcctcccaccgcgagttcgtcctcggaaacgtggtttctcagacccgagagtttggccccaaacggctttttctacttttttgccccttgcgggacggcgactgtgcggagcttgtcccgcctcgcgcccacgcctctcccgcatttttggcctttgggccgcagcccaggcccccggggccggtcttcccgcgccgccaccggcacaaagaccttggggcgcgagggcccgggtggctcctgcggccccgcggggcggcatggagtccggcgggacccgggagagcgaccctggcgctgggaaaagctggctctggccactccccctgcacggtggccgccctctgttgtgagcctcagagctaaaatctgctcttgcaacccgaagttctggggtgtgaggctgcggagcgagagcttcggaagcgcccgcgctcacagacacacaccccacaaacacaaacccacgggctgtctgcgccgagcgcctaaaatagaaaaacacgagtcaccaactcaataaaggctgattctgtctactcctaactcttggactgtagattcccagttgataaatacgaaatctacccctcgggtattttctcaagtctcagtggctgggtagggggagggggaggtgctgggtgagagtcagggaagcccaattcaacagtttagccacgtttgtattttaggcaaacaatg

SEQ ID NO: 47089 - DNA, 1230 bp, Homo sapiens
gtatttggattcagagctcacattggtggcggcaagaaaactggctttggcatgatgtacgactcgctggattatgcaaagaaatgtgaacccagatatggacttgaaagatatagcctgtgtgagaagaaaaagacctgaagaaacaaaaaaactgagcaagaacagaatgaagtcagtcagggagactgcaaaggtcaaagttggtgctggcaaaaacaaggagtaaagattttgcaatgactttgtggtgatcctgcaaattcagtcaccacaaacgacaaaactgaaggaaaaaaaaaaaaaagccactgtaggtgcttcatgaacagccctgacatggctttcctgaaactccaagtaccaaacctttgccctctccagcctggggaggattgacattccactactaaatggttcctaaccctggagggtaggacttaggtcctcaggctagaagcctccagttaaactcttcaaaccagctccctaatctcacgcttggcctagaccaccagttccccacaaatctcttaatccatctgactccagtttactattgataaaggtacccccaaactcaggggcttcaaacaacaatcatttattatcactcactgtctttggatcagctgagattcagctaatctagactggtagctctgcctctcactgcacatctctaggttggctggagaggctctgctccaagggtctctcactcttcctggaccagcagactagccagggcatgtttttctcatagtgatgagaaaaacatgcccaagagagcctcttactggtcaaagcaagtgagcccagagttaaaggacaggtaagtaccccctgcccataatgggaggacattacagtgacatggcaaagggcatgaatgtgtacataagttatctactgctgcgaaaaaaatgaccccaaatttagtggtttaaagcaagagtaaaaatttattttctcacaatttctgtaggttaagaattcaggaggcggggcacggtggctcatgcctgtaatcctagcacattgggaggccaaggcatgaggatcccttgaacccaggagtttgagaccagcctgggcaagatggtaagaccccatctctatttaaattaaaaaaaatttttttaaagaattcaggaatggctaaactgggctgttttagcttggggcctctcatgacagactagaaatgctactttctgcaaagagaca

SEQ ID NO: 47090 - DNA, 624 bp, Homo sapiens
atatgcataaattgagcatatttgtacaaacaaaatacttcattttaaacaacatatttacgcctttaggaaaacaaagttaacataaggaaatacatcagctatgtaaagagtacatctgtgccactggttatccggaagtataaatcactaatgcttaatagaacaacctccaggagtgacatcatgacaatgctcttgggtgtttagacaagatccaggctgactcacagtctcccatctgatatatagcaataggtccattaaatgaaaatgactacaaagaaaaaaaaataacgtgataaattccattctttaaatactaggcttatcattatatatgtaaagtaaaagacttttcaaaaacaagatgacaggtagtaatccacacagtcttatttgcactgtggcttaatcctaaatacaaacccagtctaaataaatacaaagaccagaggaagcctgttaatggccagctagatttcgaaattatagtacttctccacttcatgatttcccttccaattagttagcatgtctcactgatagcttgctgctcaaacactaaaattttagattctggcatgaccacatcactacagcatccagtgatgttctacatgg

SEQ ID NO: 47091 - DNA, 755 bp, Homo sapiens
ttataatgaccatctgccaacatgttatgtgaaggaccaaaagcaatgaaattgtttcctagaggctagacaagaattagaaacacaaggttacatcacagtgcaccatgtgcatacagattaatagctcctgctgagtagaaagagtatacactttgagataaaaatgggatttcaatcccaactctatcactttctagctaaaatatttcagataagtcaacctgagtattagcaatctcttctgtaaaataggaataacttacttatgtaacaaatatttattgaatatttactatgtatcaagtagtattttgcaaggattattttaggattagagataaaaaaaatagtaggtgctcattatctgtatgtgtggttatccaaatatacaagcagatgactaataagaaagggtcaaagtcagcagactgaaaatcaatggaattcctaaccgaaaacagagatatatgggatacaaggcaatgtgaggtccatttgctttccagggactaacaggtagttagtactcactctaaatttttatatattttctctagttatctcaactaaacttagccaagagttttctacaaaatttataaggtaaacttttttttttttttttgagacagggtctcattctgttgcccaggttggaatgcaatggcgcaatcttagctcactgcaacctctgactccaaggctcaagcgatccttccacctcagcctcctgaatagctgggactacaggc

SEQ ID NO: 47092 - DNA, 2253 bp, Homo sapiens
aaatcctaaaggcaggtttcacagcagtagtacagcataagtgataaacatcccaagaagataatgactactaacgggataaattcctacttcaaccccaagacattcgttggaaagaattatctaccttcagcctctctctctctccttgcctactttctggaggtgaccccctgaacagtgcgggacagaaaattaatctatcccattaaaaaaaaaaaaaatttctaggaagtgactcaataaacctacatctccgctcgatttctccacaaatcactgaggcatcttcatcctcaacaattaagaagcaaaatcgaggaaagcatacaagtgtttcaaagaaaaccacttatgcactcagctgagcaagaacgttaagtggactagagaagagacaacacggaatgtctaggaggagtgagtaaaaaggaaggactaaaaagagataaatcaggagccagtctgagagagctagaatgcgtatgcccgccagaaaaaaaagtattccaatgagtgcgagtgtgtcagcgggagaggggtagctcacctggctgtggtaagcagagggtgctgagtgcccaccagcttccgcacctgcatagcgatgttgctgagctcgtcgctcagcaggcagcgaaggctcatgaaggacgtggggtaccccacgatcttctccgcctctgacactacctgattccagtgggccggggacttggaggaccgaccacgccaagagcccaccgaggagatggtgtcgagggacggggaccaccacaggcgacgcggggaacccgaggctccaagataacgtggcaagtgcaacagcagctgccgaaagttcatggtttgagtctggaagggtctgggacctgggggtatccagaagtgccgcgggaaacaaaccaggggcagaggaggaacttacagtaactaaaaggaagcggcaattcttgaccctcagagtaaggtggcttcctggagcagtgaccagaaacgaactttaactgctgctttctgcagcccaggctgggcaaacaacagtcccagctcagcactgcccccggccacccggggtagaaaccacagccactgcctatgtggaggacgccatattggaggcatggaatgcggcctgccgtaaagacagaggcgggttgttaagtatactctctactttacggcgtacccgagaacgcccccgcaggggcggtgctttggaggtgaacccgggttgggaggttcagctcctcccaccccgccgctctgggccagcaaaggtcgtcagtgacagggatcagttgtgggcggcgagtggtccctctgcacacggtatctgggccgagtctggattcattagagtccccggcgcccagcactgagtggcatgcataagtattggtgtcacgaacaacggtcagcccccggcttgcccgcaaggaagggcgtcgggcggaggcaccagttcctcccggaagctttttgtcgctatcgccaccagcccctggcagtggcagtggccgtggccgggcgtgaaggcggcctctcgggctgcatgcctcctggagctggggccacgtctcagtggtggaacgcctagtcggggcgtggggctgagccctcgtgtcctcagggcccaaccagacataaggcagcgtggtgcggcggaaaggggtcccaaggaaagtcctcggatccaacttcgaattaccggcctcctcgctgagccttgggagaaacagcggtgcctccttcccgcgggtgcggagaggaagaatgaaacgttgcctactccctgcctcttatcttcctctttatgcctagcctggagctcaactccaggattgaagactatcgctgaccggagtgcttttcacgtactagttcatgtattactttatttaatcctcagaacaacctcattaagtagataatattagtattctccgtgttttgtatgaggaaactaaggtgcagtcgagtcgcgtaagttccctaagaccacactagacagggatgtgagcccagacaatctggtttcagaatccgtattctaaccgaaagattacaccgtctaaataataggctcccatccactcttttctccttattgctgagaggaaacagtcaatatgattatcttttaagtaatgctacctatttttttttcaaatgtgcctaagatcttacctcctttcttatcacctaaaacaggtgttaaccgttcttaataaaggatatattatccatttt

SEQ ID NO: 47093 - DNA, 1036 bp, Homo sapiens
gccgcggatgaacaggcggctgcgagcagcccccggagccgcgcagcatccgcgtatccagtgacggtggaagccacgcccgctcgagagccggggggctgtcctcgccccccccacctttcccctccctccgaccccctcccggccgcgctccctcccctcctcccgcgccggcccccggcccgcccccggctcggctcgcgggaggcgctgggcgccggggctggcgcgctctcccgggctcacacacagccgcgcacgcacgcccggggccgctctccgcgccggcccttgctccccgcgcccatgcggacggaccgagcgacggaagatggctgacgactccacggggccccgaggatgcggcccggcggcggcggcggcgggagcggcagcggcagcgagggcggcaggggcagcggcagcagcggcggcgttggctgcggcggcggcggcggcggcagcaggagccggagcgacggcggcggcatccccgagactctccgcactatccttacccgtgacagccactgacgtcctccgccgctagaagagaccccgcttctcggcgcctgccctccccctcgcggctcggtccggccccgccagcaccgctacctccgccagcctcgccaccatcagcaccacctccaccgccgccgccgccgccaccaccaccgccggcggcggcagcagccatttcatctccacagaaaccagacacaaaaacatggcagaaatggagaaagaagggagacctcccgaaaataaacggagcaggaagccggctcacccagtgaaaagggagatcaatgaggagatgaaggtattttttgatctcgggggccagggagactgagctctttcttgcgcccgctccccgtgggccgtggtatggatctggggggtaccggggcgcgcttgtcagtttctgtaggatgcccagaacggctccgctcctcctccaggtgtaaagcagaggccaactcgagggctgcatccccgaaattgttgccaacctcagatttgatgaggg

SEQ ID NO: 47094 - DNA, 368 bp, Homo sapiens
tgaactgtggagttctagtacattgtttaaagatttgcaagaaaaaatatgttgggttcatggccattttacttgagaaaataaggaaaaatttaagtctactgcattacattccttggtcacattgaatatgatttttttcttttacagaaaattctttgccaaaaccaaaattacccgaggacagtgttatttcaccatacaatataagcacaggctattcagggcttgccactggaaatggactcagtgactcacctgcagggtcaaaggatcatggcagtgtgcccattattgtacctttaattccaccacctttcataaagccaccagcaggtaagtcactactggtgttttcagtgataaca

SEQ ID NO: 47095 - DNA, 3255 bp, Homo sapiens
ttaagaaattacttgcaattaatgtcccctgaccacctgaagctcaggccacatacttgcttttgccagttgctggcaaatatctttggcccaccagtaaatgcacctggggagccccagggttcttcctgtggattccccttggttttaacagccaccagtgagcctcctgaatctgtccagctgcaccctggcctgcaggatgattgcttggttttgcagtgttccttagtactgtactataagcctattcactgcctcatgtgtatagtggcttctcctcccagggttttagtctgcaggccagtggctgagctcccttttggtcatagcaaacgggtgttctcagaaagctctggggaaaagaacaacaaacccaagtgtttcttattgtcttgtattttgaaatacagaatggaatattgatgagctgctgcaaatgagaggctggaaaaagcaatcacagaggaggggtaaacgtcagtccttggaaacacatttgggagtagggttagagcaggaaggttctggctagtgaagtaaagtgtaggtccgtttaaagtgacacacaggctcttgaggagagctagaaagtgttccaaggcagaggttctgcagacagggtgggacatagtactctagaaagccatcagaagcttggggagaggtatgtgacctcatgttcaccaaaacacttgaaaaccacttgagaaactctggtctaagggatacctggaacacagcatggggcaagtaggtttgtactgaaaggaacagcaaccacttctagtttttaatgagccacatgttgtgagactgtgaaggaaacagcaataattctaacccattagccagaatggacatcagtttctgaataacattagatattttaaattaaatgtgaagagttgatgaaaactcgaaatagcttcaagccccagtctgtgttcaacatttttcagtgagcggaaggaagagagggagtttttcataaatcagaatccggtcacctggggatcaatacacagtgctattgacatatatgctggaatgttaattttcagacatagtacatctctggccatccttctggtgaaggctaatgctgttcacttaaatcaagttttttctcatcggaactgccggtaattatccaatccatctaaaaggcacgctcccttttaacattaaccacagtgtcagattgcatcagccacattgtgttctggtgactgcttctgcagagtgatgaatgtgcgtgtttggagttcatagtccgactgtctgtttgggcagtgggcagttcagtgaaacaaatgatcaggaagggatctatttatttgggacgaacattctccttattgatccagtcacttacatttccaactctctcaccttgccactaacagtgttcagctttatctgaagaatgagcgtttaaagaattatcttacaggtcattttgatgtgattctctgatcataagctgcattcagcacaaagttactctttgtgcctgacttaaaaaggaaggtgttgtgagactttattaataaaaaacagaggagggagaaggttctgagagtgcttggtgaactgtcctgagaaaccaagagataatgattattctttttcctggaatagtagttatactctgttgattcagtgctttgttaaaaatgttaagtatctgaataagtgcaggcataaaagggcaggtggcttgccttgagatattttaaggtagtagattaagtcctgaatttttcttgtacacctttgcaatgtctggtcacaatgcctagtatagtcgagaggccccatgggggatccaagctataggcatgcctgtgattatcttaatttctcctccatttcaatacctctggatagcttatgtacacataaacagaagtgtgaactggccaagccatatgtaattctttgttcctcgggctctttgctctttgtttatattatcacagattagaatggaataaagaaaatcttgctacagatggtcacttcatttctgtcccagcagttgagactgagaatgggaaattccctatgttacaatccactcttagggtggctgtgcacacagtggaatctaatgtctactgacagactgcctttggaggttacaaacatcagtctattgcattctctgtaaacacaggctgtgggccagagctgggctctgctacaagctctgtgaggcagatcaatggtttaatgaatccataaagatgcttgaactctgctgcaatttactgagcactctagttaaatgaaactcctgtagtctttaacaaagatagtgataatcgatggctggggatggaagtccatgtccagcagtcacaacctcccagaagttgtgttgtctcattgctaacagaggtttagtcacattcagtttctgaggctcactgtgtctatgttgatatttgctcaatgtttgagagctgaatttggcccagaaatgacataatcttagtaatgttgcttctgtgaggactatttttaaactatggaatattatttaaaataaatttctttaaagtgacaagattaagctcaagaattatatttgttctaacaggtagtgtctttgtaagtcatccccatgatgaaaagtaaatagcggaataaaatccattcctgattaagtcctcaaaatgtcaaattgcatagtgttggagagccctgattaatttttccatggtaaaatattcctcattagtttgctgtggttgagggttaaccactcctattataaattcagacattaatgtattttctgcttaattcatcttcgaatagaggaaaatatagttagtagatatgaattttgtacttccaaatgtgctttggaaacattatactgatttatgagagagctttggaggcatgtaggataattccttcataaatatgttgaaatgtatttaaaggtatttaaccacctttgatcgtagaaaaacaagtgccttgactttgaaatgattatttttccatcgaaatagtagaagttatgacgtaattcaaagattttgcatctgatttttgtcacagaaacttaaactttcttaatgtttaactttcttgattagctaattagcattaattaatcccactcccactccaataactatattttggaggctcaatgggtaataggaattttgagatattatgactgcaaattttcactggccttttgccagacattccatggtaaagcagtga

SEQ ID NO: 47096 - DNA, 933 bp, Homo sapiens
aagcacatgcattcttgggtggcattagcagaggtatagtgttttacatgagggaggaagaattccactggactctctgctagtcaggctactgcattccattctgggctccaccctttaagaggggcattaacaaggtgaagtgtattcctgggtcagtggcagctggtctcactagcatgtccctaggaggacagacagcatagaagggccctgggaacttgtgccctgggaactgggtgccagaactggggacgtttaaaaataacaatctggagcaaatatgatgactccttttaattttttcaaagactgagatttggaagaggagttgatctgtgctgggagaccctggcaaacagtaggtagaagtgacagggaggtggagtggttaaactttctaataatcaatgctggttgacaacaaaatagactgcctcaattatattgcatagagacctgcagttgtattacaaccctctttagcaagccaccaggaaaattggtgcaaaggagaaagattgctatggtatgaatcactcttttggctgtgtagatgggtatgaatgtttgtctctgtcacaggaagtatggatgccacctggaagatgacctatgtgtagaaggaaacccaagcttgctgtgggagataggttgggtttcacctgcgaagttccttagagttctaaatgtcagtgattctggaatttcaaaacagaaagttattgtcaaatattagtcacctatcttaatcctgtaatttgtaggaaagtgcaaaaaacccttgagatagtggggcagtatgagttttgaagccagacagatttaacttagaatctggatctgccatctattatctgcataggtaatcttgagcaagttatttaacctatctaacccccagttacctatatgataaggtatttgtggagg

SEQ ID NO: 47097 - DNA, 921 bp, Homo sapiens
tctcaaagcgtaggcatgcagacacggggcaccctctccctctgctgccattagtgtctccttagaatttgaattgtttttccactgacaacagaacaagtccctagggtgatttatgcctccaaggtgtcatttgcctcaatggctgtccccagaggctgtttgccacaagctctatttccagcagggtgtcctctgacccctctgacacccacactttatggtggcagatatagggccccaaagtagaacaatgttcaggcatctggctcatgcccgcttttatgagcaaaaccttatttcacctgccagtcttttggtgagcattgtgtgtgctggttcctgccttgggcagcaggtgccacctagagggccctgtgactgccaccgtggcttggcaggggctgggcagcctgggtcctgaggaaactcagcggacatccactgagggtcacacaggcccctaagcagccctgacactaagccaccctgaagccctgggcgtccgaggagggggctgtcggggaacccgggaagaacaataggaggtgggcctggttcctagcactcagccaccttgcttgacgtaattctgagaggaaatgggcaagaactctgtttgtcggccacaaggtgtcagcagcgggctggccaggggatggctctgcgagcaggcccaggaggagccgcagcacgctgagagggtgttgctggttgctctttgaagttcctagtttgcagagactgcttttcttattagtgggggcctgatgattacgataccaaaagacccctctctgccttgcctgcggaccagccacatgcctctctctgctttcagttgggtaaaattgccgccgccggacacctcaaccaagcctgaactgcagcttgaagagctggatgcaggtggagatttgg

SEQ ID NO: 47098 - DNA, 1475 bp, Homo sapiens
actttgtgtaagctgagggctgccccaaatgcccccatcaaaaggcatcagcctaaatgggaaaaaatgtgtcttcttcaatccccctgaagttcccctcaatgattttctgttctgcaatgacatttccagtcaaagaggccaaagagataaaactgctgacctaaagactttttcttctgctcctgggggcagtctgggcacaaattcacagagtgcgcagtggggaagtgaaattgatggtgccaaacagcatcatctaaacaagcagaacccagagggggacatgaaaacgtccagcttcctttatggctgtgagacatggaccagtcgtggcgtctatgatgtcatattttaaccatcccatctgaactgttgagcagtttcatctgtgtcaccactgagccagacttaacactaaatagtgagagggtttccaacaaccttgacttccagggcagacgttctctcactagaggaccaagttggtgtgacatgtgatcctgtgtgggagccagcagggaggcttaactgcagatctatgggcagccgaggcactgacaataaacacagtcaccagtggtggattgccgggaaactccctctcccatgagggcagctggaattctgaagcccggctcaaacattcccagaattagtcaccaccagggacagtctctaaaaggtgctctgaaaatgaaagataaccttcccaggagacattatggaagacagtcagaggatcacagtccccacagatgaactgaacaataccaccagggtttcagctccaaaccctccataccagagagccctagctcaaagcagtgcttaccaagcttcagacctggggtgccacctttgtgatatttgccatgtccgatacctcctctgatgtttaattttatgtttcaactagattgggccgtgggtgcccagttatttggttaaacattattctaagtgtttctgtgagggtgtttttggaagagattaatatttgaactggtggactgagtaaagcagatggcaacccacacgtggggggacttcacccaatccatcgaaggcctgaaaagaacaaaaaggctgaccctccgtggggtaagagggacctccccctgcctgactcccttccagcagggacattttcttttctgcctttagactcaaactaaaacatgagctcttcttgggtctcatgtctgctggcttttgaactgaattataccatagactcccctgcatctccagcttccaatcacagatctcgggacttctcggcctccataatcatttgaccaactccttatagtagagctctttacacacagacacatacacacacacacacacacacacacacacacacacataccctattggttctgtttctctggagaaccctaactagtacacctcctgcattcctaatatttactaaatctttaaatggtctatttaaataaatacat

SEQ ID NO: 47099 - DNA, 1825 bp, Homo sapiens
tcttaaaaattatgggtgtgagtgagtcatattatccaggaatttcacctcagaattgtaaaccaggtgcttgaatatatttgcaataaaaatgggggttgggtctgacaggcctaaaagcttactgctttaaaagaaattttctatggatcaaaaatgcctttcgaagtggaaacaccagggaatcatttcctttctggaacctgccggacctgcagcagccctgccaggcagagcaggagaggctggcgctacagcatgaaagagctctttctcttcagccctcacaggtgaaaagacacggacgccccggccactgctcaaaccaaaggaggaaagactcacagactcctagggccatgtggccctcaataagttagttatgtataatataagcctcagtttccccatttgtatgttggcagtaaaagtagcccctcctgtattgacttcctgtgtggatcaaacacgataagtaagataaaccatgtttcatgcttccctccacatccctgagcacataatgctcaattgatgcaaatgtgtattatcatccatacagcatttatggtttacaaagcccttttccacatactgtttcctttgaaccattcagcagtggggactgacaggaagaacatctccagggaggagaggaggctcggggatgccatgatacttgccctaggtcacactggtggccatgaaaatggcttttctgaactggaatccgtgcggttccatttagatggattctgtgcagctctgaagacacaagtaggctctcagaggaggaagaagctactggagaagaaaggtaggaaactgctaacaactggagcttgctaacaatggaaggatagagtcctgtgctgtctgcctccttccaagacgttagcagggaatttgggccttgacctgggagagaggccttgaaacccattcagtctaagaatccaggcttcacttcgagatcacttctcagagtacaggtttttgcttttaactctttccttgaatgttagatgtttttccttcaaacatattgtttcagttgtcattttaacttttccacagatgagtgagctagctggaaaatggtctgggacttcagtggcaccatggtttcagcataaattctccttactctgttttaaatctgcactctcagggatgagaaagaaaacccctgaaactgatgttcgattcacaaagtacacacacagaacacaggaaatctctgccaaagcgtggcctgggttttcttaactttgtcctggaagttccgtaacctgtgttatctgctgttaaaaatttacagggaccagctgggtctttggtccaatggaattttttttttcttcaggcatggaaatgtcaaatatagtcataaaaacaatgacctagcctgtacccagaaatatgatttctaaacaattatacttccagttaatctcacactaccgtggtcccaagccaatgaataagaactcaatttctcagcatttgacctgaacagagatttgggctgcttccagggaaatgcatattagacaaacctttctgaatgtacctttttctaggccaggtgcaatggctcacgccttaatcccagcactttgggaggccaaggtgggcagatcacctaacgtcaggagcttgagaccagcctgggcaacatggtgaaaccctgtctctactaaaaatacaaaaattatctaggtgtggtggcaggtgcctgtaatcccagcttcttgggaatctacttgaggcaggaaaatctcttgaacctgggaggcagaggctgccgtgagctgagatcgca

SEQ ID NO: 47100 - DNA, 1149 bp, Homo sapiens
tattttcacaccgtggatggtgatttcgagcattagaaccagcttcttccccccactgtttctatgctttgtaatttgcatacccaaatttaaagctatctacagctttccacttgaagtttttttgcaaatgaggtcttaaaagtgatatagtcgaatatgctcgggcacctttggcatctgaaagggaaaattcccaataaaaggggcagtgcgcagatggctgctgggttgactcctaagtctcaaggcaaactcccccagcacaggccacagtggcaacagcatgaaccaaatcttgcttgaatccaacaaatgaccacagattcctcacgactgaaaaaataacagaaatctattcccccagtggaattcattactgatcaataaacccaatgcattgtgcaacatttgtgattattctctttggaatcaacagcatgtcttaatagctaattgtttgataaagccttgacatcaccaaaatttcccaataatgagggcactaaatcctaaagaactgtgaaggaaagaggtcagcctcttctttggaaggccacaaagaatgagaatgattcttacagtcctataatcactcagaaatggttaggcccaaaggaattaagttacatgacctccaaatcctgtctccaaaaccaaaagcatgaatgccctggaataggctttcgccttgtgtttttctcttcggttcttcctttcctcattcaccaaggcagactgcttgtcaaaacaggattaaaatcctgaggccagcccctggccgacttgaagtctgcatctaaggcagggccttagacatggcagctccaagtgtttcatgggcctggtgagaggggcaggccctggctctagacaccagggaaaaacatactccttagtgttcaaccctggttttctcatcagagcaatgatgtcccaggatgacctgtggacaaaagaggacgggagaagagaaaatattttcttcagttcaaaagaaaaggcccctatggtctatgagctgacagctgtatggtactcatagctattactgaatcctttctgaactgcaccgggggtacaagagggagagtgaaggtctagtgctcggttggaagggagaaggaacaggctcccttctctttgttt

SEQ ID NO: 47101 - DNA, 2597 bp, Homo sapiens
taaaagttcttgcagcaagtgacagtatttgggtctggcttgttttctgtgggctgagctgcttagcttacctgctgcttgctagaggagacagcctttcaccctcacccccaggagtcaagaaccagaaagtgaaactgcttctgctgatttccctcgcctcgaaaacacaccaccaaaagcaaagaaatgatgaaaagcaacttactcgtttcgcttattgttttcttgtctttctattaccgttcatttactcttttctttttttcttttctttttttttttttgcagcaaaataaaagtaattttggggacacagggaagaaatgtaaacatgttatacatgaaagaactggatttttgtgggctttgcacttttgttataattccacaaatgaagcaaactgatgaatttaccaaaatatttcagagctcatctacgtacacaatttaaagagctaaagaaaacacattcatattttttaaaaattctgtcaaaaagcctgtttaaaagttatagtttgtgaagccaccaatttccctaaaactgaagattctacattaaccttttgagtttagacgatcacgcagtaccgattttctaggtaatcttcacccagctgctgttgctcaaacagcccctcattttatcagactagttctaccaagcaacacaaaaaatgctccacacaaatattataccccccagatagtttaacacactaagaattcctttgtagttatttttatgctttcactccagatattctattttgctttaaaaaaaaaaaagtggagaaaaaaagcagctatatccctcattcttcaaaaatggttcctctggttgaaaagaaagaaaaacagcatataacaaataccctgattctgaagtgcctggattactttctcaagtactgtagtgtctgagatcagtaaaaaaccactttctcagaaagccactgattgtctaaccctcatgagtaccgtcatggaatctagagacaacacgaggagacacctctcgttcacgatcacagatagtggaaagaactttgactcaagcacctcaactcagcaaaacagctcagcagcctgcaccctggcctcatccaccgctcctgtccagccagcaatcaacctggagaggacccctcatgctttgggaggagcacgtggaagctggttcaagtcacagtgctccacctgggaaggaggtgattttgagcttgggaaaactgccgctaatactccatagtcaccagtttttttcccaaaaaacgaattaaaaccagaaactagcagtaaatattattcttatttatgcctcataaattaggaaaaaccagcacaaagacatgtgaaatattctacctgggatatttgaaataaaattaaatgggaaaaaaaacacttttacatgttcataacataccaattttaataaccaaattttaggtaaatatttttatcccaagacatagtacaatttttttaaaattaaaaagcaaaacaaagcaaaattatcgtgaagggaaaaaataactaaccggttacttgagttcacatttggaaaaaaataactttctaggtatttaaatgcagagttaaagagtaatgaacatgtatatagcccaaatttataaactatataattcaatgttacattttcccctctgagatctggttaataaattaaatgctgtactttgcatatgaggaactaaagtttacctactggactcagtggttttagtgcaggacactcttgtgcgttgccatagaggtaggcatgcaacccagaaaaaactgaaacaggtaacctgtcatgctgacagttacaagagaaagatcccgtgtcaacggcacgcctccaattgtgcatctcccttacctacagcttgttcaccagagccctgagcaggttgtttaccaggtcgggagtgttgactcagaagacagatgactttcagcacatgcaaaccgagtattgcaaaagctatcttccacccgtgttagtagctcacagttagtctccagcagccctgcgctccagctgcaaacatctcattagactaatgcattcagcacaggcagaaaactcgatttaccatagctacagcaatgaatttccattacgatgacagcttcaaccacatcatgtccggaaaaccagccaaccactggcttttaaagaacacacacattttacatgcagaaaacgaggcctctgtgtgtgtgtgtgtgtgtgtgtgtgtgtgtgtgtgtgtgtgtgtgtgtgtgtgttttgtgtttccttcctcttagcagcctaagagaaatgtgcagtgtagctttttgtcgacatgagctgcaaggtaatgacacttctgcttctttggtagttacatccttgtaataacctgaattatgtcacaatggttagaatgggtgtttccaacatttcagttttcattacccctcctctgttgccatagaaaccagactgtaacatcgtctctttgtcccaatcctgcagcagtgtgggccaacaccaggcttataagacactggtgatctgacagagtgaatgtttgactttggacaaataaaacaaaaag

SEQ ID NO: 47102 - DNA, 595 bp, Homo sapiens
aaccagcctggccaacatggtgaaactctgtctctactaaaaatacaaaaattagccgggcgtagtggcaggcacctgtaataccagctacttgggaggccgaggtgggagaactgcttgaatctgggaggtggaggttgcagtgagccaagatcttgctattgcactggagcctgggcaacagagcgagacttcatgccaaaacaaacaaaaaaaaaattacttaaactgaactttaaggttgtgtaactgccagagcaaaccttttcatgctttcatgcacatgctatctctgaaaatactgtcagaagtctgaaattcaaacgcatgcctacatttttgtatttggctacttaactgtttcacaggaaaactaaataaactaagcctcaaaaacaagtattaaaatatgctgctgtggccagggaacagtggctcacgcctgtaatcccaggactttgggacgccgaggcaggtggatcaattgaggtcagaagttcgagaccagcctggccaacatggtgaaaccccatctctactaaaaatacaaaaataagccaggcatggtggctcgcgccagttttcctagctactc

SEQ ID NO: 47103 - DNA, 1951 bp, Homo sapiens
gacactgaatccatctgaaagtataacaagttctgagctgattcaaggcttcactgttaacaacttctccaagtagagtatataacctggacaacctagacctccagcacacccaattgaagagaagatatttaagcaagttagcacagctcttgtgcaatagaaagctttccctaagttgttaatactcaaaacccactccttactgttaacactaccataaataacccattaggccctcgcagttacatcagctttaagaataccatctgccatatgtcctagtagagtgcaacaaatggatgcaaacattacccaaacatcaagtgaaatatgaaaagaatctgttattctgtgctttaattcgatgttgtttaatgtgaaaagacttagaaccaaaagtaaatcgacccactacctcaaaattccctacaagattaattaaacgagacttaatccttcatacttgcactttttccgtcacaaacaggaaactccgaagaaaaggaaatagaaaaaagcctatttttgctaagaggaataacggcattgcttccaacccccacagtgagtgaacaaatgaaaaagcaacgggaggaagtgacgggggtaggcggtggaaagctcaattggagtcctaagcatgccacccggctcagagatgccctaaaacatctgttaagagcagctgcaacagggaaaccggagtcgggggatgagggccgcgaactggacggactgagagttgtgcccgcacgttcagtctcttcttggccaactctttgctcacctcccaagtccccatcccgcttcctccataaagaaaaatccccaataaaagcaaaggcagagaagacaaagaggcaggaggaggctgcaaggagcgtccacaacaatggagaagatggagcgagcgaaactcctgaggacaatgaagggaggtggagaagcgccgagggaaacgctgctgacccgggccccgccagtggcggacgctggacacaggccgggccgcaccgtccctgtcatcccggacgccgcgggctggggccgggcaagcgggcgccgcagggcctgggggcgctggcggggcctgcgcgggttcgcgggcaaaggccggcgggactcaccggcattctgatctcggggccagaggtagtatgtcgccgggatcacgatgagccccacgaaggaggtgaggaagtagaagaaggtgttcccactgtcatcgtactggaactgctgcccggccatggcaccccctcctccgcctcgctcttctcaccgccgccgccacgaccacgctctgcactcccgctcccaacgccccggcccgagtggcgtagcttggacactgccgccgccgcctctcctccccgcccccacgccactctcacggacacgccgccgccacctctgccgctgccgccgccgtcgccagctctcgcgagaggagatagttcccgccccgctcagttttccctccccctgcgtgtccccagcgagctcgctaagggagacgtggcgagcgcaacggtggaactcggcgaggtctcgcccttagccccgccctaacgtcaaagccctcccccaacccctcccctagggtcccgcccctaaccgctccgccttcctccaccgctcagtttcccagcgcaccacgccggattccgggcgtcggcgtacaggatcccagagaaggcttcccgccggagcagcggtcgcgggcggttcacctggctgcgcaggggtcccagatattcagagaagagctgaggctcagcctgtcctgccctctggattaattgccctggttgatcacgtttccttgggttctggatctgctcctccagcccccatattttggaaacaagtgtcatttagaatagggggtgggaggccgggcacagtggctcacgcctgtaatcccagcactttgagaggccgaggc

SEQ ID NO: 47104 - DNA, 1808 bp, Homo sapiens
tggtggacatgaacatttctggctacaaagctcaaatttctaaccactaccagtgtctccaccccacttgtttcagaaaaggatccttcctggcaactccaggtgaagatgagaagaagccgtggtggagtgggtggaggaagagcaagagggttggggaatcaggacccccaagaaaaccaatcacacctatatgaaccaaagatgtccaacagcattcttggaagcaaaaacccaaatcccaagccccataatgccaccccctttttctgatgacccaactctacagactcagtccaacccctttttcttactgttggggaaactgaggcccccagcgctgaccatcattacaccctcctcctttcccaactctcctgagccacagtcccggacgtggtcctgtacccacccccgcggctcggctgatgttgtccatcttgctgacgacctgttggaagagggggtagcaggtctgacagaggcgcacgggccgggcgctgcgcaccagacaccctgtcagctctgcgctgctgttggcgaagtccagcaggagctcccggcactcaggatccagatccggcaggtccgggggcagcgacagaggccccagccctccaccctgcaggagggacagggacaagtcctccacctccagcaactgctgctccgacaggaggtcgtggaagaccctgtgcggactgctgccgaaggggagcgcgcccagggccagccccgaccacagcagcagccccagcggcagccacggcggcaacgaacacctccgctgcgcggctgtcgggcccggctccatcaccgggctcacacaccccagggagcccaccgccgcctctccgcccccagccggcaccgcggacagccgccgcttccggtttccgcgagcgcaggccgagagccgggtcacgaggagggcgcgtcacggccccgccccctgcgcgcggcgccccgccccattggctgccggctgcctccgggccgcaggccttcgcgcgtgcgggagggcgcctaccctgcggccgcgcgctctccagccggcgttaggcgcggggcggggcggagtggtgcattggggtatccgtagccgaggctcgccagccggtgaccacgagcacccaccgctttggacaattgcatctcgggggtcctgacccttgaacgcccaaccctctgggagttccgggcgtcctacaagtttcttacctcgctggaccgacgacggcctccgctgtggaaatggccgtcggctgcgttcgcagagaaaccccgctggcctgtgcctcggcagattttctgcatggtgttccttagcgtagttttttcctcatcccatttggagagagtaataatgcccgttggttattataggtggtggagactagcggtttccaagctttttgtttttgtttttaaaaaaactctcaactgtctgcctcagcgttgtcagaactctgtgagatgagggaaatattctacatctgcgttattaaggcagccactggccacatgtgtggtgttgagccggctgaggaactgaatttttaatttaatttagggccggcgcggtggctcacgcctgtaatcccagcactttgggaggccgaggcaggcagatcgcttgaagccaggagttggagaccagcctcgccaacatggcgaaaccccgtatctactaaaaatacaaaaattagccgctgggcgtggtggcgcaagcctgtagtcctaggttgagcggggaggatggcttgagccaggaggtcgaggctgcagtgagccgagatcgcgccact

SEQ ID NO: 47105 - DNA, 807 bp, Homo sapiens
ctgtgtggcccagttcctaacaggccatggaccagtacttgtccatggcctgggggttggggacccctggtatatgccaaagactaaaataacaacataactttcaatttactaattactttcacatataaatttaaagtaattatccctgacgaaaaggacaagcatgaccaccttcattttccctccccatagtaggaaagcaggactcaaaaaggttcagtgacatgcctgaggctcctctgatgtcaccgctgggctgaggcatgctctgacccataaacccagttctgttttaatttcttcctgtgatcccttccatgggaactgctgtttaaactcatgactcacacatcaccaggagaacacaaatattgtcactatgtttacaaagagagaaaagtaaatattttagaaacacttttgggtactgttgtttttcttttctttttttaagaaaaaagcattttctggttaacttgaaggtttcatcagaaaataaaatgaatcagattacttcattccccagtgtacccattaatccaaatttgaatctagttatttaggatttaaaatagaaaaaaaaaaaggtatatttggctgtttctaacaatctgaataggaattttcagcatgaatttcctcagtagatgcttggtaacttaaaccccttgccaggtccatccctgactgttgtggctgagagagctattgtgcagagggagtgggcacatctgcccaggtggtaagctaacacaagaagctacagggccacagagaggaaagagagagagggagagagagaga

SEQ ID NO: 47106 - DNA, 1146 bp, Homo sapiens
ccaccgtgcatacagagttgccatttgggaagatgaaaaaattctggagaggactgtggtgatggtctcacaacaatacgaacgtacctcgtgccactgaactgtacactttcaaatggttaacataataagaaggaaaaaaaatccacattgaaaactaaaggcatcccatactcagagttaacaccatctttaaatacatgatattcaaaccgaaaccctttaaatacatgatattcacactgaaagatacagtcttgtacgtgcaggagagaaggcgagcgagggcatggcaggcagggcgtgtctgtgccaccaccaacaccagactttccattcgcaaacagcttgtcagactggaactcttccttcgttcagctggtgtttcggtgccagacaatcaaaggaaaaggagagagaaaccagcgaagccctagagagacagggagaaagcctcaaagcaacggagacagagccgggccccaccgcacggctggagggccgcccccacacggagctgccccagcccagggcctgcggggccgagtcgcctcccggcagctgagtggcagcctcggctgcggacccaggcgcagcttcccccagaggccggcgctattaactcccggggcctcctgcggcggcgaggcggtggcacggctcctcccgctccctcggcctccaggttcaataaggattacatcatggagcaagtatgcggggcagcctgagaatcaaagccgtcagcaccggcggctggttaactgtactgttgctgaaacacatccttcccaccccctccccgcgcccctctccctgccccggccctctgcttttcgtaccattaaggatagcattattggggagaggaaaatctgatcaaaactgtcgaccgccaacgacagattttctatggattctataaaggccaccttaacgatttccctaattaatggatgacatctttggctgaaggagaaacgatggattcgactctgtcttcgtctttgttaaccttctaattaactttcgtaggtcacccaggtctcccaaacctgaaaagtgaagaggcccattgtgcgaggagcagtaaacttactttttctgctggggtacttaaaagggagagcggctataggccgagaa

SEQ ID NO: 47107 - DNA, 354 bp, Homo sapiens
cattgctgaatattgaatattgctgacctcaatatagaccatcagggagtctcatcagagctttcaccacacactgttaggcaggctcggcagcaatgtagcagagggcagactctcagatgaagaaacaaggatgttgtcacatatcctgggcatcttcatgatgtgccaagatgttgcaatgctctgctgggaaaccatgggtggagtcaatgtattgaggagactaaggtcataggttggattttcaggtgaaccaggtggccttattctgtccatggaactggtatctctaatatctgtcaaacactatgtcccaggaaactgagcaagagtcaggagagacctggactc

SEQ ID NO: 47108 - DNA, 650 bp, Homo sapiens
gtggtttcgctctgtcacccaggctggatggagtgcagtggtgcacagctcactgctgccttgaccccctgggctcaagccaccctcccaccttggcctcttgagtagctgggaccataggcacacgccaccacgcccggctaatttcccctgcttctttcttaatatggaggtactgactcagtgtttacatttgaggctttcttctgattccccctgcccgagggctttgtctcacagtgctcttgccaactgcttccccgcaggccctccccagcagcagtgccagggctgaggacaaagtgcaccaggcaagcttctgtttggtgctgaaatgtgtgggaatgactatgggaaggttagagagtggtcagtggtgtcgcatttctgcacgagtacagatccaggatagagaaacatatttccatttctcagtaaattcttagaaatcaggaatacttcaaggaactatttttaatttttttggtcttttaagcaaatcattgatatgtgtgcaacatggatgactcttaaaacattatgtggagcgaaagaagccagtccgaatagaagtgtagtgactggcccaagtctgggtgacttcaaagcctgtgttctttcaaccactccccaacggccccccagctccc

SEQ ID NO: 47109 - DNA, 1014 bp, Homo sapiens
accaatttatcctcccaccagacaatgtgtgtgaggacctgttgtatcatcaacacagactgtggtctgagagtgaactggtattcacttacctcagtttaagtcagactgtcaactctcaaagtgctcttgaaaaaaacttctctagaaagctgctacaaaatggcggctccattctcgagggagtagaggcaagcagggagctggctgcagtggcaaagggcagcaaggccatgaagaagcgcttgccaaatgattaacattcctgtcgccaattactactgtcctcaagaggagaagacattcacagaagggcattgtctctgctccacagcacacaaagggtcaagcctcacagatttgctcctagttgggggaaaaaccctcacaggtcaaagtgttcagattacagattcaggaaaatccctttgcagaaagaagacagcaaatccccagtgaagttgaaaggacaaaactttcttcacctcagagactctccaatgaataaaccggttaaacatggtttggatttagtgaacatgaaaacaactggattaaagtataatctagctagaaaggaaaggacatgtgctgagacaactagctaagtaatgacaaagctgcagtgtttacatctgtcaagcaggaacggccattccagctttataactgaattctcttaaatgtttaatttttctttagctcaacgtgagcctctgctcgtgttggcctctttgataacactggcaccaaggcaactgtgtgagcacgacgggtgtagagtccaggagtctgcaggcagcagctgtcagggcgagtgttcggcatgggccttggccaagctgcacacggtccagcttggaggcagcatccatcgcacaggtgcaggttttagaatcacaaagacttgggtttaaatcccaattgtactttttactggctgtgtgaccttggacaaattaaactctgtcccatttcctctcttggtaaaatgaagataatacccatccaata

SEQ ID NO: 47110 - DNA, 582 bp, Homo sapiens
gcgaacttgtaaactgcctgaactttgacttgttccccaacctgcactggcaaaaagcagaagctggtcaggtgcagtggctcacgtctgtaatcctagtactttgggaggccaaggtgggaggactgcttgaggccaggagttcaagaccaacctggccaacagaacaagatcctgtctcttaaaaaaagaaaaaggctgaagcctcactggctcaagtagctacgcataacctttgaccagtcatttctgaccactgagataagctgacaaactgactcagggtgacccttagaaaacctggcttaaaaaaaaaaaattgatccgtgctatcaccacctcatactacagacttaatgtgggcaagtccctaaaaaaaataaatagcaaccaccacctcccctttggggaggggcaggaggcaatctaactcagagtctctacaacgtattatctaaaatgttcagtttaacaaaaaattatgagacatgcaaagaaactggaaagtgtgagccatagacaggaggataaaaagtcagaaaatgtctctggggtggttcagctgttcagctgtccaggatt

SEQ ID NO: 47111 - DNA, 2574 bp, Homo sapiens
gtgtgtaagttaatgagaattttttcacttaaatgttaatagtagcttgtcatataaattttgattaaaggaaaaatcgctttacacttaacttttaataatttgctgtcatctttaaattaatgtaattaatttttaaagatgcttccatacatgggcaaattctttaatcctgaattatagagtgaaagtgaagcactattttcaattaacatctttcaaatcatctaaattattgccaacaaatactagttatgaaattaggtatattttatttctgttgatttctttattcaattaagtgcaaatctcgaattaagagagcaagatccctagtcttttcttaaagcaactgtagttctggattatgaggtaggtgacaccacacctcagcctttggcagggcggtggcccaaaatgctgaagtcaaccatgtccaatcacccttctggtctggctcagccctatcaaaaattgtcaggcttctgtgaactttcattaagtcccgttcagaagactgcacaacccaggttactttagcagctcgggaagggcctggagcagccgggttggcttgctacctctgggaagtctccaggaagagaaaactgggaaaaggctttaactttgcgcaagccccttttctctgtcaacatctctttcccttcccagcgaagggatgtgttctcgaaagatctacccctttccaactcaaatgtcattccctgatcagctgctggaggggcaagcggcgctcaacccacgccctcctcttcgagcaccttctccaagtgccagcgcgccgggctcgctctgcagccccccacaccagccctacaggaagaggggccctggctcacgaccccggcccgcctctgcaagggggctcccggcctgggaggctgtggctgcccgcgggggtccactcccgggtcgagtgggggtgaccagagccagcgggaggggtttcttgggagaggggagagacggcctcaccttgaccctgatttcgtaagtggtgaagcggccccggccgacccccaccgtttgcgggttgctcacatcgatctcgaggaagttgctggggggtccgtaggcgtcattcaggttctgcggcttggtgatcagccgccgggtgtcagccacggtctccgccatttcgctgtagctgctgccgccgccgcgggctccctccgccccctccgcgttcagccgccgccgccgccgctgctgcccgccgtggggacacggggctcgcgcgcagcggtcgcgaagagaacgagcacgtagagcgggcgttcaccccgcacgcgaagctcctccccgcgcccctcaagcttccgcctccgagcccaggggagaaacggctcactagctggaacgccacgcccggctcccgggaggcccggccgaggctggggaggggcactgcggactggggtgtgaggagaagcggtgtcatgggactcggggtcgcaaacaggttccggccggactacagcgcccacaatgcaccgcgagcgcgccgccgcggggctgcggccgaggaggcgaggacccagacgcccagagctggcgcttcctgtctctctgcgccagcctcggcctgcggcggggtagagcgccggaaacggctttagcggctttgggaattgcgggcgaaagttaaacggagagatcttagagatttgcccgcaaatcgaaacaaaactgcccctactaactctgtgccaacctgtgcaccgtctcactgtgaacccctgaaaatgcctttctggagaaggttaagcaaatgcctgagatgattttgccataaacccgagcgttgcaccagacacgcgtctggattgataggttgaaaccagtaaagtgggggagtgaaataaaaactaaagccctagttaaatcctagcattatggtcaaatcgattttggagacaggtcggtccgctaaaacaaagtaacagtagaccggctgcaagctgctttgggtgtccactttcgtttctcacgaagtcctgataagttttttttttttttgaaaagtattaaacgtacctctacaggactggaaatgcaactcacatgagcctttttaagaaacggggaggaaggccgggcacggtggcttatgcctgtaatcccagcactttgggaggccgaggcgggcggatcacgaggtcaggagttcgatactagccttgcccacatggtgaaaccccatctctacttaaaaatgcaaaattagctgggcgtggtggtgcgcgcctgtaatcccagctactctggaggctgaggcaggagaatcgcttgaacccgggaggcagaggttgcagtgagctgagatctgccattgcactccagcctgggtaatagagtgagactttgtctcaaaaaaaagaaagaaagaaacggggagaaaacccaattaattaggtcctagttcatctcttatggtccaatgggaaatgcagattttaaatgttgagatacgatacatttctatctctgcccagagagttatccctcacaactatttctgcattttttaatatgtcaagtttaacactataa

SEQ ID NO: 47112 - DNA, 2257 bp, Homo sapiens
tttttttttgttttttttttgtttttttgagacagggactcactctgtctcccaggcaggagtgcagtggcacaatcccagctcactacagcctccacctcctggacgcaacccccacctcggcctccctagtaactaggactacagggcacaggccaccatgcccagttttgtattttttgcagagacaggatctcgctatgttgcccagactggtctcaaactcccgggctcaagcgattctcctgcctgggcctcccaggcatgagccacctagcccggcctgtattatcttttctggaattcatctcgcttactggattgccagcctcttctggacagcaatttgtactcctaattcgcttattatagtatgtcaaagcatttattgtttaatcaaattagggcagatcaatgagaagttacccttcggatacactgtcccatgacttctccgtccaccgacagtccttcttaggcccttggctttcccatgccacttatacaatctttcaaaacatttgagtgcgtaccatttatattattcaaatacgaaaagggaaagcggtaggcgcacatttcaggtactcgtcaaagatgagttggacgctggagataaaataaaaaatgggcctaccatttagggaggtgtgacgaagtgacaccactcttccgttaaaacccgagggcccattgggtcacctccattttattcaggtttcggaatctcggtcatgtgagctaacttaaaaggctcaagagtggttacctgcctacccgtcataatcacttcccaattccttgaaaacttcgggttcctcggccggccgccagcgccgggcggagaatcgccctccctcccactgcccagactggagctgcctgttccgttccaccccgccccaccccactgcatgctgggagtcgtagtcccggctggcagcgtccggaaggacgggagggcacgggagtgcagcccgcccatgtggctactggaggtcacgttccctaactgatcccttggttctctcgggtggagccttcagcgtgcacggcggggtttgactttgccaccgtctctcttctgggttccaataaagttttcctcttcctctcctcgtacggagttcaagatggcggcctcctggtcgctcttggttaccctgcgccccttagcacagagcccgctgagagggagatgtgttgggtgcggggcctgggccgccgctctcgctcctctggccaccgcccctgggaagcccttttggaaaggtcagtgactgtgccatgagtagtccgagccgactgcatatgactggagaagcctctgggattaccctccctgtccgatctaccccaggtgtctcctgctttcacgaagctgagggctcctcgagaggagtttccatttctcttgaccttttatactgtctgtgaatgagccctgagcactgagggaaatgaccctgagtgactttcattttgagggtcagaggttgactcagagtttgttccttccgggacgtttagagagctgaacctagtgggagtgcctggcttgaagagatgcaggtgtggggttggggcctggggacccctaccctctgcgttttccaagctctcggggctggtgactgacgggcactggaggaagagccgcgcctgggacctctgcaggccctgatgtctctcgtgattctaggaaggaaggtccacacacattctcagattgagggatcgattcttggtgttcttttcaagtcactaggggcttcagtggaattattttgtcaccgggctttctttctccctggcttccttcattcagttatatgttcatgaatgaatgaatgaatgtatattctgagtaaccaagagtgccagttttactgctctattcatgtattcgcactaaactgcacgattttcaaaggcaaggacattgtgtcattgtttcctaagcacttagcgcaatgattggtacttgacgtgcaaatatgatttttgagtgaatgaatgaatgaaattattctccttgtctccctcatccacatactcgttttcctttttctcaaatccaagcaacccctgtaatataccttaatagattgatagaccttaataaggtatataccttaatagattatttattaatttagctaaaaatatgacaatctttgacccttatcatcaatgcagttgaaattaatactagaactttgattaggtcaccttacgtctttctgcaaagattagc

SEQ ID NO: 47113 - DNA, 517 bp, Homo sapiens
agtcataatggaaagcaactctaggttataaaaaaatcttttctctttaatgctaatgaaatgtctccactctctgtattagcagactacccttattggtaatctgtagccttctcttttgttcgtggtggtaatgaaatgctgggtactgaaaaagccagctctccaagaatgtgtggccaattgtcttctgttcacttatactgtaaaattaccgttccccggcaaggccgaacaagtgcggggacaagatcaaaagagtatacattggcacccggctacagcaagtgactcctgctttattaattagtcatagcttctccaagctaatttactctgatagggcaaaaacattctgaaatataaaaacagcaaattataactcaactacaagcctttactgtttgctttcttcaactttcagtttaaacctttgcattatgttacaagctaaatgtcccttcagttttctaaaccttagggcacaaaagctattttacatttttttcaaagacat

SEQ ID NO: 47114 - DNA, 664 bp, Homo sapiens
gataatatgtattcttacacgtataaaaatacggaagagggtatttagatttccttagaattttcattgcattatttcatctccaaatagatcacagttataactgaagatcaatctgctgcataagaaaagctgatctggcaaaaaccctaggtctttagttatttgctgtgttcatttttagctattaaaactccctggcctcagccgggtgcagtgactcacgcctgtaatccagcactgtgggaggctgagactgggtggatcaattgaggtcaggagttcaagatagcttggccaacatggtgaaaccccatctctactaaaaatacgaaaattagccaggtatggtggtgcatgcctgtaatctcagctactcaggaggctgaggcaggagaattgcctgaacctgcaaggcagaggttacagtgaactgagatcacgccactgcactccagcctgggtgacagagtgagactctgtcaaaaaaaaaaaaaaaaaaaaaaaaaatccctggcctctggcctctctttcccaagtggatgtgaccatctttttctcctgaagagaggttagagctttttactctccaacttcttctccctcctttttttttttttttgaaatcttcaatcattatatcctttctgaaattccattttaa

SEQ ID NO: 47115 - DNA, 613 bp, Homo sapiens
cattatctcctattaccaaaacagagaattcttcccaatttctcttctatccaattccatttcaggtaaatgttcactcttttttggaaccccggcttttttttaccctgcaagcatacatacttgccctccaaatgcatcatcgtaacaacctaggggacgctttgccagggtttgtcatgccaagggaagaaagggaaagagagaggacaggagctgcagatacttgtggagagcgtggtgatgaaacctgtctggaatgatgccccaaagggcgagccacagctcatagctgtttggtacacggtgttcaataaagacacactgcatgagagtaatttgctgaggagagggtaagcagagaaagggtctaatgagggtgtcagacatagactggggagcagctatatcagatgggtcacatactcgttaggaacctcatcctactggtttcctgtcttcattgagatggacacagaagccaacccaagaggaaaatgtgcacttgctgaagggcagtaggctcagttcctagaatgtgggctctggggtcagagggaggctccagctggcctaggtacaaggagaactgggctagcacacaagtgctgag

SEQ ID NO: 47116 - DNA, 3931 bp, Homo sapiens
cttccagttcttcgtgcaaagctgaataccagcttttaaccaccaccatacccaacccgcaccccaagcactggcacttgaagccgagttgtggtcatacatcaccatccacactcccaggctgtaaacccaatgcaaacctggggcttctcagtgggacaggcctacaaggagaggagaggtgcctcgtgaggaggagccaccgcagtaagcagtcagagcccccttccccagactcccccttccaagggcaacccgaaatagcagaaacgcttttatatgtgggcagagccgcatgcccacgagacaggcacatgtggactgcgggcattcggtacaaggaagcgaggacacagagtacgtagggtgctgagggtccacctcgcagccaaagtatgtgtgccagtgagtgtgtgcagcttgtgagatctgctctagaaaccgtggccgcggactggcgcggcctcctgggcgaagcacaaacaggaggctttgttccctgaatgtgagaatgagggagccgagctgggcgcaaagacggcggcgttccgcggcgggaaaccgtcgtctccgccgcggctcgggcagcgcgcgaaactctcaatcaggttccccggcccgggccgccggctatgccagcggcgcgcagtggggacagcctagctgtctcgcgagcagcgcccggagaggccgcgccgcgggccccgccgcgtccctccgccagcgcgggcggccccacgcgcccgccactcggcagcgcagccagcgccacattccatttaaaaataacacccacgtgcgctggtaaacaagcgcgcgcggctaccagggccgcgcgccccggcccagtgtgtgtggcgcgcgcccgccctcctcccgcacgtgtcggccggcgccattcagtccccgccccctcggcgggtcgcgccccgcccccgagcccccagccccgccgctccgggccctagcgccccctaccccgccaggcgcgcccagtcgagtgcgctgcaactttcctcccccgacgcctcctcttcgctggcagacccaccgccccaagtcggctgccttcctcccgtccgctgtcctctcgcgtccccccttgaaccctcccaccgccagcgcgcgaaggattggtttctagtgcgccctctccctttttccctctcctctctctccttccttagaattttactcgattgtttattatttgctggggggcgggggcgggggggcggagaggggcgtctggggcctggagactggtggccgcggccagtcagcgcgcggcgtgccttgacgagtaagcggcgcagcgaatggcgacgcggcggagagctccggggtcacgcgcgtgtggatacgatgacatcatctgtttgtacgcgtcgaactagcttggtgcaggggcggggccgcgcgtcacttgagtgacgggcgctgcgcaaagcccggagcccggaggcggctgggcgggctggctcttgcgtacgctgggctggacctttttgtgtatggggtcgttgaggagcccgcttctacactctgagctatctccggtgacttacaaggattttttaaaaaatatatttatgaactagtgtgtagacttttggtgtgcatgtcgcgtgtggtgcattcgtagagtacaaataaacgatttggggcacggatcgtagaataaggacttgtgcagatgtttttcgtttaacctaaaggatacgtctttttttaaaagtcaaaaatgcccacgtagcggttttgtcgtcatttacaaattagattaaaattatttccccttctcagttgttcggaatctgctcttgaatgtaggacgggggtaaatttgcatttcttccggagttagttacacctctcccccgtttgccatgaaacccatgaaaagtgaaacacgactgtggtccaccgtccgaggtgagagactcagtgcaaaccttttggtgcctgatcgaatctgtgagcatcagcttatcgaagttgtgcaggcaccaacatcttcgccgttcagtatttccacaccgcgataaccctgcccatcttgcggccagcatcttatctcgggtgttacctggtgtcgcgttctaacagggaaccggacaccggggctggcccagagcccggcgggcggacgcgcaggccagggaccccctggtaccaggcgccctgcccggagtcagggaggccacgccgctgcgctccttggagcgtcgggggctgtgcgctcctgccgctcccccttctccctcctctccccacttcttcctcctctcctcccttctccccccttctccctcctctcccgggccagcgccgcgctttgttgtcgttgagactctcgggagggaggaggagcccagcggggacagcagcgggagcccgccgagtcccggcccacggcgcgcgcccggacacccacgcccgcagccccgcggagccgggccgcgcaggcgcgcgcgagctcacacacgcgcactcacacacgcacgcccgccgcgcgcccggcccgccgcccagcccgccgcccagccctccccctgggcggggacccgcccgccgtcagcctaggttgaggcgccctgcgtgtgtctataactttgtgctgctgccgcggccgccctgctcgtggaagggaggaggaggaatgtggaaggtggcggcgcgcgagctgacaggcggttcctcgggcgggctgcggcgacggcccgagcgcttctccttcgccgaggttgcgcgccccctcctcgccgtgccccgggcccgcgcgggatcgtgcgtcgtcccgccgcgtccctgaagggaaggaagcgaggtaggcgccggagccgtgcagcgggcggccgccttcccggtgactccggatctgcttccgagctgggccgggcgcttccctttcccctccctgagccgcggtgtgcgcgccccccttctcgcccgctagtgtttttaaaggactcgggaagggggaaactgtcaagatggcagcagcgggagcaaggaggtgatgaacgtgctggtccgggttttctagcagcccgggagacttggcgcttcccgacctgttggaagatttatgttccgactcgctccctcccccggatcccgactgggaagggggcggaggggacgacgtccgcgagaatgcaaaccacacaaaaccccgaagtggccgtccccgccgggctcgaacctctgcgaacacccgctgggctgctgctcccccttctttctgtctttcctttattttttggaagtgacaagggcccatctgcgcccagacccccgttcgccctctggcccgcgggcgaagaggggagagggagctgcccgcgcagtccccgggctcgggccattcgaccgggtggggggtgacggggggtcgcggaggcggccaggctaggaaaggggagaagagccgaagacagcacagacttgagcggcggcgccgcgggaggcactagagcgggcccgagcgaaacataaacaaacgcacgcacacccgagctcgggctctgaccgcggctcggctgcgccagctccggccgctgcccgctttaaaggcgcggccgcccctcccccgggcgcccctcccccttctccccgccccgccgcctagcccgggagggacctgcggctgggcggcggggggagggggctgccccgcgcgaggccgtcgattcgctcgcggctccatcgcggcctggccggggggcggtgtctgctgcgccaggttcgctggccgcacgtcttcaggtcctcctgttcctgggaggcgggcgcggcaggactgggaggtggcggcagcgggcgaggactcgccgaggacggggctccggcccgggataaccaactctccttctctcttctttggtgcttccccaggcggcggcggcggcgcccgggagccggagcc

SEQ ID NO: 47117 - DNA, 2057 bp, Homo sapiens
ggactcggcccgggtgctggcacccggagggcaagaccccgggtctgggccagccaccgcggcgggcgggctgagcgggggtacacaggcgctgctgcagcctcagcaaccgctgccaccgccgcagccgggggcggctgggggctccgggcagccgaggaaatgttcgtcgcggcggaacgcctggggaaacctgtcctacgcggacctgatcacccgcgccatcgagagctccccggacaaacggctcactctgtcccagatctacgagtggatggtgcgttgcgtgccctacttcaaggataagggcgacagcaacagctctgccggctggaaggtgcgtacccaccccgggctggcagcaggacccgccgggcctcctgcgcagcgcgagacgcgtctcggattcgtcggagtgcgcttgcgggctccagggcaaggggttggcagggggagcctccgctgcgaggctttgggggttatctttgatccccggagtcggggcacctggggacggtctcggaggggtgaatgaggctccccagaagcttggggcatggccaggtgaggagagggggcaggggacgccggcgagggaagggcgaacggacaggagtacatttgctggattctccggacagcaccgaggaggtaggtccgcagccaactttggagtagagtttaccgtagtgggggtctggtgcgggcgctgtggctggagtgagaggtgtgggggtgtttgggacgcagtgtctggaggaggggttggatgtgtggtttccagtctgtcgcaggagcatgttgcgtcgtcactagctgaatgagaaccttcgggtccaagtttcagcttgtgggtgttaacacctacaggcacatcgatccgattagaaaaagcagtggttgcaaaccttttcctggacggcttcctttccttgcctatattgataccttttcttctcggagatgtcgctccagtaaacctgcttctgactagctgcttctgaaatgttctggggcctcgaaccggccggtctggccacctcaatccagactggctgcacccgctgctcccgccgaggcctggattcaggcactgtttgagggaagggctctggtgtgggggacgcggggcctgcgcttcattcactctggcgtttgggaggaggtttgggggctgggccgggccgtaatggcttctacctgtaaatgaacccgaagagagactctctaccgttccttatcatcctcttggggcacgggacacgtggtagggagagaggtgtggaaaggcctatgatgtaatgacttcctgcagttgggtatccaaagagattaactcctctgcccctgctgggctgctgatatccagctgctttcctcttcctaggcacctccctggccccttcccccaagacagtgtgtgtcagtaccaggccaaagagtcctgtgcgattggagatatacatctcttatcagctgcccatatttgcaatttagcttagatttttttttgttttgttttatgtaaaagaagtagttgcttcctccttccctttcttcattgtcattggggagccctctgtcttcctgggtttcaggaggtataaaaataagaacagtttaatcttagtggagaattcaatggaagcactggagacgagcctgtagatgaaaaagttaaagaacttaatgtagagaatgttttattttgcttctagaaaacccttgcaaagttaaatacggcttatatcagagaggctttgtattagatactttaaaagcaaaacacgtgtgctttgatattaatccactaatgtgtctcatttcttttaacaaatgcttacattatgagtcttatatttggtttaattcaattgctttgtaaaagaatgccaggtgtatgatacgagagttctttacagaaaggatgaaagttagacaattccatttgaaaagagcactagtgtgatatgttttaaaactgggtttccaagtggatgggaagggttaatcagtgtatagtatcaggaaggcgtaagcggacaggatctgagaac

SEQ ID NO: 47118 - DNA, 2669 bp, Homo sapiens
aatcttagaaaatactgtaaattgaaattctcaaggcttaatatgcttaatacagggcacacattttatgattcttttaccttaaaattttttaccaattccatttctgagtgtcacatgacaactaatccttgacgactaaagggatataattttgttagagtttttataagatgatcttcatcaaaagatgcagccatgcaggaactttcaaatctttgatgatggagaaggccctttgaaactggagctggttttatattttgattatgactaataggcaacctttttttgtgtgtgcttgtggtttagtggaagaagagggaaaagggagagatcaggagctaattgtgacccatttccaagtgtccaagtttaggagttgattcttgtcatgattagtcattttggaagcacgcatgtgcatttaaaccacactactttcattctgagtaatgtaagaggatttttaacttccaaaaatgtctagaattcaggttaacgtctcctagtcatgtgtgcataaagggcacggtatgcagggccttacttcttttcaggctatttgggccattgcattatgagaccttgtaaccaaaattatcaccctaacatcataaaatgaaagaattagaaaagaggacttagagatcagaatctaaatcagtggttctcagccctggttgcatgtttgaattacctgggaacttctgaaaaatacaaatacccagagaatttgatataatttggcttgtgtgtggcttagcattgatggttttgtgttttgtttttttttttcaagtttcttaggtgattctaatgtatagttaggatgaagttttctgatctagttcaaccctcttattttactggtgaaaaacctgatttttggaaaagctaatgactttcttaagatcacacagctagttagtagagaggtaattagtagccacagttctagaggtttttgttttccattttcttctttaaattgatcttttttaaaaggtcatttgctaggtaatggatagtctcacataagtagcgcttgctttcctgaaaggcttatttgcctctcaatctaaaaacatcttgcttattatttcagcatcaaaaggatgggcaaatgtagatggaggctgagtgagtgtatcatgtttgcatagctgtccagtgcctgtcagtaggggtacttaggaactatgaagtgataaaagaggtaagaaggatagcattttaacaaaaagaggaagcccttggttacttacatttgtcagatactgtgtcagggagaaggatgatgactatctcacaggttcccttacctcgggcattaaagtagaaatgaacaatcagatgtggttaagaggggaaaaggttacatttcctttaattcagattaagcttgcactgcacccatgattgaacaagtgagttctctcagttcctcttgtcttggggagacctctaaggacgccagggcttacctggtaaggcctatctatcacttatttcgttatacacagcacacatctgcttttcccatgggtcagggtgtaatcaaattaggcagacttgagtttctgtagtggttcccataatttcacaagtgtgggggatactgtgttaagatttctgctgctgctgctgctgcagaagataattcttcaagagtccgagtcttctttcatgtaagaatgtgtattgttatggcttcttgccaagataaaaagatgagggctgtcctgtcacataatgcttatttgtgtcctcactgtttctgttctttagattaatacatccagttccttttcaacacactgtattaggaaaatgttattttaactgcaactctgttttaaatttttttttaatttgaaaatgactaagtcataatcattccacattggctcataattttgacctcagtcaccttttggagtaactcaccaaaaggccagttatggtcgtgtgtgaagaatctgtctgcttggcccgtgttgccaaaatgtcgttttgtaatttcctttggcaatagtgtcttcgtcagtgattctcaactaatatacttcctctttctacagccccagtacactagagggactgtttttcctctttttcaaagctgtgtcattgacctctgaagtgaagaaattggcccttttagactttgatctgtgagtcccatgtaacagagactctttaaaaaagaagctaagtgtgtgttttgatatgtttatctccttcttagaaaatgaaatgaaactacagcagacttatttttaggagattttaggagtgttctattttaagaaaatgacaccatacaagaacatcttttagttaaacttcttagtactctgcttgtgattcttacttaaaacctgcaagatacttttatttggaaaattaatgaagaggccttgtctcactaataagtcatttaatttggtctggcaaaagtttaccatccattcaaagatcttcatgaaaatgcaaagataaggctgtttaggcttgagcccaggagttcaagaccagcttgggcacatagcaaaaccccatcttattttttttttaaagactgtttaggcctgtgcattctggcaggttgccccacttacccagagcaggtgcatcagattccagattcccagggctggagagaa

SEQ ID NO: 47119 - DNA, 601 bp, Homo sapiens
gctctgtagccttctgtacaaggcaaggatactcacctctcaggatcacagcaataaaggatccactcaggtgtatagaggaaaccacatgttcaccttagtgcatatattgtgttcacagaacttgtgtttaggttggattcatgtttttttttgtgtgtgatctttttctcttgtttgttttggtcttttgaggacattcctagttttaaaaccactatcagacgggagtagttgcactgactcatccccagacagacatgggacatgtgagagaaagataggataaaaatgtgctgggtgtaatcagtgtgagaggctcagtgcagtgaaggggagagtgacacggctctcgtgatgaagtcagaggtaaggcgggacattcacctcggctcaggatcctaaaaggcgcacgacctcttgcaccacaggtggaaccaggtacagatccaaacaagtatgctgcttgtcagtatcattggactctgtagtccattaagcagggcctcatgatcagctagctatatcaaacctagctggtggctttaggaatgtaaatagtgcaaaacacagtgggttggccagttctggatgttcatgt

SEQ ID NO: 47120 - DNA, 548 bp, Homo sapiens
gacatcgtgcttggaagccagtgggtcatttgggtctagttttcattcttttctttggatctgcttcacagtttaaattaggcccaggacattgtatatggtggtttaagaaggtgactgtaacaggcagatgttgaaagatggaagcagtaggaggaggccaaactgtggaggacaggggtaataactggattggcaaatgggggttgaggagcatggaaggcagcccagtcagaataccttggcagaggctggagggttgtagttgtgtgattgtgatgaaatattaggggtgatggctgggtttggaagagttaagccgttacaaaatttcttcaaagaacattatcaaacaacacatatgtactgctgattaagcaatatcattaatgagcctgctttataatttaaaatgcaagcagatttactttcagtttcagtcatggaaccattgagacactttggggaggcaagtgaaccactgcagttctttctatactggaaggaaaaggaggaaagcaaagttattttgtggttttggagtagtt

SEQ ID NO: 47121 - DNA, 550 bp, Homo sapiens
gcagcattttcttccctccttccctgcctcagccacctctccctcccacctttacctcccgctaatgcttcttttgggcttgcttgggccatgttgttttgttttgctgctttttgaactctaaaaatataggtggcaaatctcaggtctgccttgcagggagtggccctggtctttccggaccccttgtgccccatggccctgtgggtctggtgtgtctcagtgacccagtaggtgtagggcagaatggctaggcactggcatgcccattcatccccaaatcgggccttgttgaatgtggcacagctccagctctttccaaacatgactcctgccagtccctatgctgtgagataagaatgggctacacctaagcaaagttttgtaggcagctctcccttcctttatgtgcttatgcaaccttttcagcacgttggtacctacgtgtcagggacaatgtgtgattttggtggagatgcttataatccaaagtattttcatggtggttccccaaacaacactaggctcagatttcagtttatcctcctaa

SEQ ID NO: 47122 - DNA, 1520 bp, Homo sapiens
agaacctagtgatggtttccagcatctgggtttggggaggactgtggtgatgcgctagggatagccatctggaaggggtggggcagagacagcaggagccgtagtcgtctcaggagcctactctgattagcttataagttggcctcttttcatgatttctgggtcattggtgagtggataggagttataggatcctttgtgggtgagtagaagatactgtggcagataggttttactgaacccacctgcacatgtaaatctttcctttttaatgtgtcacctcttcagtttgggtggagaagcttgccacccccaggttcatccctaagcattgtggtaggctcaggactaacagacactagctcagccccattgagggcccccaggctaggcttcagctttgggaaagcttgttttctccttgggcaggccttgtcagacgttttgctcctgggtgtttgatgttttgatgtctgtactatacaaagccacatgggaaggcaaaggaatacacccctttgtataaatgacagtcataacaaatgaagtatataccagtttgtgctgtctgtcaaggagtaattcatctcagctagtaaaataaaggggaagggaaggaaattcaggtctttagctatgcattcataaactggacttaagaagagccttcctcctcttataatgctaactgctcttaatatttccttcttaatgaacagttgatataagagttttctcctttcatctaagaaatacagaacaatctgcaagttttcttagttgtttgttaaatggacttcgaaatgattgagaaattcgtatttctcagcgaaaataagtattaagttaatggacaagtagcagtccttgttgccaccaagattttgcatctgaattgtatatataaactgtgtcaggaatatcataaaatcatgttgaggctgcagggacaaggaaatttcatctcatgaatctgtttgatgttttcgggatgtcctgagagaaaaattctttgacctgcctagtgagcaaggtctaagtttgtacacccaggtcacattgtaccctgggctttccaaagatttatcctgcatctgagccaaaggcttttgaagcctgtggttgctggaattttagggtgtatctctttgcttcttcagatgagacatttcttaaggtagaataatggttaaaaaaaaaaaaacctctcagtttactctagaaagatacagcatttttggtacaaatccaaggaagtccaaagaggatcaggttttataattatattttaatatgtgaaaggagaaacctgttttatcaggccagtaggttttttgcttaataaatagtggcaagaagaaagctatgggcccagctggaatgggtgcagtttttagaaaagattatttgtagttgttgggcacatccttgcatgtggactttgaaataagaaattaaatcaccaccttatttttgcaggaaataatccaaatataaaaagttaaagttcgtattgtact

SEQ ID NO: 47123 - DNA, 605 bp, Homo sapiens
agataattatatataattattattttggagatagagtccctaagcctgttttgtctttgaaataagaacttcatagcattgtgcaggtttagtgaagtaatgttggtaaaagcatctggaaaaaagcctggcagagaccaagtgctcaataaccagtagttgttatcattcttatcatttaatacttacccattggtgtgagtttatttggttctccctccacagagataggggaagaaataatgtattttagccatcgatttttgcttttggtttcagaatccagttttgaaaacaaaatgtgtttgttaacaggctgctcctttgccaagaaaaatgacaaaattacctccatgtactcttctctcctcccccaaaagccctgtatgagtgtgtctctggctgcgcatatttaagtattaactgagataaagcatgagctcagcaggggctttctaatggctaatccacagtaacccatttaaaaaatctttttctccacacaagaaaaagaactagtagggaaaggacattttggtggttgtttgaaagaagtgtcactcgggtatttgggggaggaagagtggtgtctcaccattgagttt

SEQ ID NO: 47124 - DNA, 1024 bp, Homo sapiens
gcacagtggctcacctttgtaatcccagctctttgggaggcccagtgggaggatagcttgaggccaggacttacagtgagctatgatcacgctgctgcactccagcctggacaacagagcaagacccggtgtctaaaaaaaatttttttttaatgaagagcccaggcttaggaatcagaccaggctttttccttgcaaatgaaataaaattgcaaatctgtttttcctctctccctccaaacttttttgttttaagcctgttcctaaggtaaggagggcctgaactgctgagaaggaggggtggaggatgggagggaggctcaggaggtttggggaggcagaaggcctcaggtgatttccacacacagaagagtcatgccaacaacttgtccatccagtctggccacagactccacccctcacaccaccagcttggaccgcccagcttcagggtcagaagcctgacctcacagctgcgctccttcacctcccacaattccagaggggagctgtcaccccgaaggaaacaagtctggtcttcttggccccaaaccacacacccagacctattcatagcgagattgcacaacctgctggaggacagcccagccgggcatgggagagcagccctcctcctgtgccaggccctggccctcgggtgcccctgggtgagcctgtgccagctttcagagcagagctgttcctatagtggggggcctcaagggtctgattggctcctcctcccaagtgggagaacttgcttctccaaaggagaagcgctcacgccacccgcccactgccccactgtgcaggttgacacctggttggagggctcactctcattagtgcacacagaagccagaaggcagactgttacagaagaggaagctatgtcacagaagacactctttacgtctctgtggggagcagtgccatggagcggggaaaggagactcaacttgggaatgggacagacctcaatttgaacccagccctgcagtgcattagtagaatggtgacatgt

SEQ ID NO: 47125 - DNA, 1211 bp, Homo sapiens
ctgccttcatctctctggactctccttggctcaatccattcctgtaacaccctcttctttgctgtttgaatcccgctcttgcctggaatatgctggcccagaaaatcatcacttgctccctcactgccttcaaagctttggtcaaatttaccttaacagaggggccttccctgatgtcagctcgtgctctacactccctgtgcctcttagcacttatcactacctagacagttactttattgtttgtctactggcaccagaatgtaaggtaggcagggactttgtcttgtttattctgtgtctccagaacacagaacagtgttgggtacacagtaggtgctcaataaacatttgtagaatgaatgaaagaacaaacagctgaaagggccagctacagcctccttggcttaggtgaagaagcaagtttttcccgttgcattttgcacgtgtgcttcattctagtggatccagagtccgtccttcctctccttgtgaattttgtctcaaggatcttgtttgcctcttgtgtgacctcttttggactgtcctgggcgattcacccatcttctcaaagaattggcctcgcagatacctggtgacatcgtacgtgactctctaccacaggttcttgttcatgaggctccagaactccgttttacaccatggggagggctgatcctccacctgctgaggtctgaccagggtcaccaagggcagcaccgggttctccttttgcaaaagtgcagaaaagcaatcatgaaaccatcagaggagaggatggaggtgtggaggcctgcccagtcataggattctggaggagggatgagtgcgctgggcaggctgctgaggaggtgctgcttcctggtgccccctcctttccagcactgtctctgggaaaggttgttggaaccagaaaacacacagccttggttgatgaaaagcctgtttattcctagtacactggacactttgttcaggaatagttcatccatttgaaaatattgcccttgtaatggtgccaaggtcattgcctgctggggttatcagcactgtgtgtgccagctctgactgggtgttttaataggtggatcatttccctgccagagggactaaagaacgttgaatggttaatttgtattcagtgctatccctgcatacagtcttcatattaagtttttgttgggactttaagaaaaaaaaagagaaatgaa

SEQ ID NO: 47126 - DNA, 783 bp, Homo sapiens
accatcatgattatgatttactgtccaggttttacctgttgaatctgacagtgtggcaggatgcaaaacagcatgtgctttgaggtcaaccagacttgggttcaggtgccagctttgctaatagccagttatgggattgggcagcttattttaacctcactgagtttttctgaatcttaacttcatcatctgtaaaataaacccatcaatgttgttatgaagaactaatgatatggcagatataaagtgccttgtgcaaagcctggccaacagcaggtgtttcatgcaagattatcattatttctggtagaagactcttaattagaattggtgccatcatgtgggttatcctcatttagtatttgagaccttctcattagtcatgtcccattgtaacctgtttgctgtgatctgaccttcctaggatacacagattaataattaatccaagtaagagatggaatcgttgcttgtggaaatgtctgtgttgatatttcccacacttttcttctgcagcagtccccttagacagctctcgaaggccccaagtaaaacattctggggttctttcttgcagcagatgatgtaatgcaaagtccatctgggaggcacaccctataagaaagacctctaggactcttaaaagataaatgcttagaaaattgatccaatcaaaatggaactgttataaatacgctttccctgtaatttttcaaactaatatatttaattctgtctggcagcatcctctaaattgaatccacgtgagacagatgagaccat

SEQ ID NO: 47127 - DNA, 1057 bp, Homo sapiens
ctggaagtttcagagggccgccctctctatgctcagagatacctggactcagctgatgtgtgaaagccatgcttcgactccccagtcgagtgtaacccctctagatagactgtccaaaaggctacatacaattcagaacatttagcttatctttactttaaattgtatacttaccttaccaactccactggcattagggattcttcttgctcaccattccttcctttctctgtcttcacatttgctgggtgctttggggacaaaaggaggaaggggagaaagaggaggaagcagaggagaaacaattctctttgcttgggaagtctgcattccagccctggcaatgggctctgtaactgtgaaagaactggagagtgacatgacagggtttggtagcaagtcgttccctccttagatagctcaggcgggaccaggtgaacatctccagactcttccccacacatttggcctctgcctcacctctccctgatggggttaattcactatgtccctactctgtggccttcccagcccattaccctacctctgtcacagtcctccttactttgccacctcatagggccttcctgatagagcaggaggccaaagtcctctgaccaagtttgcagagtaaatttgaggtgaaatgaaattccacctcctaagttgacagaaggcacagtcagaacattaaattggctttagcacatagaataattcttatatattttgagaggtctggaaacgtttgcttataagcaagtgtttcagaaagacctccttatattttgatatagtgattataaaataaaaatatttctagtccatcttctgtccagggagaggtgcttttagcttttagaagcaagaggagccacctggttcttctcttggtcacctttcctctcgcccaccacctatatcaggtgagtcaatgccataaaggatatttacctttaagatcagaataattgatctttccaaagtgaccacctcctactgctaatttatagaccaaagaaggtatctgagataagtatttattctataaaacttc

SEQ ID NO: 47128 - DNA, 969 bp, Homo sapiens
aaagcgtttgttgtggagcatagtggagttaaactcagcttgatattcatgcaacattgcactgccgcaagaatgtagctaacatatccttaaaatgaaaagggaaaggttgcagttcccagagattttctacccatcttttgagctgaaatcatttcataagttaaccactgagtttgaatgtatcatctagttatagtttaataggagggaacaaaggatgcacattatcttttccctttatacccaggacatagtaagattcacacaacacaactcattgcccaggcatgcaagtattcccatgcatgaacagacctcctgtgcctctacgtttttccctcccttagtgacagaaaattcactggactccagcaagcgctgagctctggcagccattggccccagagctctactaggtagaggctagctacggaggtggccagtccggtggtttgtgtccaggagaacatggcacagttagctatttaaatccaaccaggatgatgtaagcgagcgggctgaaagagttaggcgaaaggtgaaaggaaaggagaaatcttgtcaggctgcattatttacagtgagctgggctgagactaacatgccggccacctgtacactgagccaaactcctggcacctccatgctgcctcctcgcagccctcgagaaaggaggaatcactgcagaaaattatctgatgctaaattatgtggggagagggaatggtgtaatttttaatatgatttttttaactggaagagcaggtctctctacttagataaaaacacacagacctgctctggtttgcaaattactggagtgtcacagcaaagctgggctctctgtctctcttgctgataagagaatagtgtttactcttgcctctgtggtcctaataatcctgagtgaaactttgtaaaatgagttcttgttttgcaggacgagcaaatgttcaggctcaggaa

SEQ ID NO: 47129 - DNA, 1197 bp, Homo sapiens
accctctagaggtcctgtggataccatggactcaggatagtgtgatgcaagacagaactcagcctctttcttctttcctcttgaaatcagcttctcctcctgtttcttttaaaaggtcccttgccctctggctcccctaggtttgcatacctagtgttgtttctggcctcttcctggaatcatggatgccaaatcctgttaattctgttctcagtgcacctcacttgttctcatctctcctctaacctctgcttcaccttgactcctgtatctcaggctttccgtacttcactcattcgtcacaacattgagtcctactctgtgccaggcaacttgaaataaaggcaagacagggaaaggaggctaaatctgaactcatctgaccacataacatcaaaaatcagatttgaaataaggtccagatttcataattcactgtaacaaatatctccagttagagaaactatgcagccttcatctgaaaatgtcttagctcaagtctatatttaaaaatggagtctagtgattacgtaagtgttgaccttcagctgtgcctcacgtggacggttggggcagagagtctcgggccaacaccacatgtacagggaattctaacacagtgggagagtggagtggcagagaccagcccggggccttttggagtctggacgaggggcacttaactcaggctagcagggtgggagaggcatgtccaggaaagcttccttgaggaaatgacctttgagagttagctgggtgattacataaaaactgtctgatttcactacttctgatctttgccctcctttccttcctgcccatctctgccagatcacatcatccctcaaaatgttgtatttgatctgctcatcaacttttgatttctcgccatttaatttatttggttcagccccaatggccattttcagagttccctcttgtccacacacaccctgtatgtcttgatgctctgcgctggctcacttgccgactttgttggaacttccttctctactccagctccagtgccagccactgccacttgctcaaattcagcccttctttcacaaccgagctcaagcaccacctcttccaggaagtctacctgatgtcttcccccaatcagaaatctcttcttcctttgtgatcacataagtaatttgtctctattgtttttattgctgccatcagtttcta

SEQ ID NO: 47130 - DNA, 2432 bp, Homo sapiens
acactgatgtctgttatattcttcatatatttttgtacccatgagattttacaatactaaatagtagattttaaaaattcttatcttcaaaatttagttttttatcaataaaatgacttctgtgtcattgggaatttctttactcaggaaaatcttagatatactaatttctgagccagcatagttgctaaggattttacatttacgtgctaaaaacatcagccaatccaaacattgtgtcaggtttttgtgtccagaactcaaagctgtggttaacaactataaccactgagacagcaaaatcttcaaaaacatgctgaaatttttgcttgacttacccaatttcctgttgaatcataatgtttatatttagcaaactgtgaacctagatgaaagtgctttctaaaatattagattgttgcccaagattgaaacaaccttattattatttgtgtgtttgtgtgtatcttaaaaagcaattatatgattccatgcttcattttctagagtaactcagggattgtgtataaaatggaggcaggaggaggcccagcgtgaatgaagaggtggaaaggctgtagccagacacaactgtgccctttgaaattcctgggagagggttggaaggaaaccctcataccagtgactgagtaactttggttctgagaagaagcaaatctcagaaacattcagaagggcccgtaagggttaaataaattgttctgtgatttctgattcacccctataattcagctctttctggggtgaataagttatccattttatttgtcctgaaaaacaggttgatagtcatggtttctcatagaagttctctattaagcagcatattgcataggaggtaaaaaatgcagacttgaacttattggactcaaagtctggtttctagtaaatttaagtgtgttataaatatgtatcaattaaataactcgcctgacttattttctggctttcacttaccttgataatgttgattttattttattttttatatactttggactttgaataggttagttatccacaaatatgagcaagtatgttttttgtattacttgaatattcatgtttacttttagaatccatatccataaattatcaaagttaaggcagattcataaaaacaatgacccaaaagattgagatggtagtctacaaactatctgtagttccagaatccctgagcctgatgggaagtcagttagagtcttggttttgtgaatattcatatattttgctacagggtgctgccgcagaagaccctacaggggtggtacgtaatatgcaatgtgtataccatattgactttctaaaatccatatgttcctgcatcccacaccacatctgattccaaaggttttggataagggattgtgaatctgtactgatgtggactaatttgtcctaaagacaattcaatttagtatctgatggtgaagtcttgcattgggttagatagattatctgaaaccttgctattaaggctatttactgcactgcaaatgtttaataatagctttgttgacaacctctatttacttttgctgcttaggtgatcttggatgccctgtgtggctcagctgctcttggcagtgggaagggttgataaaaggcaagcctggacttgctgcaactgggagtggccatttctagcatgtagtataatgggaaggcctgtgtgttgggtgggataggtagattgcacagcgtccctgcttctcctgggtgacatcagcaccatttgatggtttgaggattcatgtcagaattcaaatacatctctgaattcaaatgaattcttaaatatatgccattatgtgttatctatggatttctctgctattttcacagataatcatcaagggactttattggatttcttgatgcagagaattttattttaatccatattaatattaaaaaatattaatatggatatttactaaggtattacacacattcaatatgtgttgtatatatttttctcttcaagaataataagaatgcattagaggcattggaaaatacagaagagcgcataaaagaaattaataatcctaatcccaatatttagagataaccattgttaccccattttacagaagagaggtaaagcaatttgcccatagtcaacgagctagtaggtggcagagctaggattcaaacccagatggtgactccaaacctgtgctattgataggccccctgctcaacttgtcctttgtgcaaagtaacctgaaaatacatgggccatatacccgtttgctcctctgtctgtctctgtctctctgtctttctctgtctcttctctctctctctcttccaacctctcaccttccgatccttcctgatttctaactctttgtgtgacatttttagggtccaggcatcttctgtgtggacacttaattggt

SEQ ID NO: 47131 - DNA, 1203 bp, Homo sapiens
cactggctgggcgctgtggctcacacctgtaatcccagcactttgggaggccaaggtgggtggatcacctgaggtcaggagttcgagaccagcctgggcaacatggcaaaaccccatctctactaaaaacacaaaaaattagcctggtctggtggcacatgcctgtagtcccagctacttgggaggctgaggcacaaggatcacttgaatctgggacatgaaggttgcagtgagccgagatcacaccattgcactccagagtagactctgtctcgaaaaaacggaatgaaatctgaatcactgagactacctgactctttttgtctggaagtagccaaacaggaagagctctgaacgcaccacatatcacctgcattctcctcccctcagggcccagttatctcatgggtggggagatccaggtttgcttacagggtctccatggagctccttgccgaagtgtttgtgtctgcctggagcttatctcagaactgcatagttgaccacttggttgtgatgagaggaaggtacaaactgggattccagactcccttatcttattttgggtggtgacactaacacccatagtgccaaagtacacagtgaatgtacacaaatattcagtgtagaaaatctgatatcaacagagtcatgaagcattttgtaataggattttcattggcccttaaaaaaaaagtatcggcagctgggtgcagtggctcacgcctgtaacctagcactttgggaggccaaggcaggcggatcacttgaggtcaggagttggagaccagccgggccaacatggtaaaactctgtctctactaaaaagaaaaaattagctgggtgtggtggcacatgcctgtaatcccagctgctcaggaggctgaggcagaggaattgcttgaacccgggaggcagaggttgcagtgagccgagactgcgccactgcactccagcctgggtgacacagcgagagtccatctcaaaaaaaaaaaaaaaaaagtgttggcaatttaagtaacaacatctgtggttgttttaggatttagtggttaccattttagaagttggcctcatgtcacaaatgtaggaagtggcagagctaatctgattggcaggtcagtgcacttttctgaagtctgtcacacagagtgtgaggctcaacatcaacatgtaaaattgctgtggcaatcagcacagaaa

SEQ ID NO: 47132 - DNA, 2610 bp, Homo sapiens
agttccgtttcttgaaagtgtttaatttaaaagcattatggaagctagctatttgaaagaattgtgttattctttttgtaaagtgaatagttttcctataaagcattccttcctaagttatcttctcacatgttgggatgtattaaaaatgaaatacaactatacaaagcttcccggtttcctcaacacaatcccataagcgctgtaacaatatgcaagccaaaatctatttctttatcttttagtttacaaagctatctttagaaattctagatctgagcaagaaccaggactctgcacacaaacatcagcagaaataacagatctattcaagcatgatgattggggctcacttctactcaaaaagagaaaagatctattatgacccgcaaacagaaactgtaaatgttaattcaatactttcatactgttttcactttttggtaaagtttccaaagcgatactgtaagagatttttaaagattgttttattatctgtaaacaaggaacatctaatatgtccataaatgttaaaatctcaaaaaaatatttggtgctttacaaccttcatgacaaagtgtcttcatttaagtttctatgaatatacatagtatactgataatagactccattaaagaaatcacgaaaccacgtcattttagtgagtaaagctgcagaaaaaataattcacatttagatttcttgaactaaggcaacactctgacagcacctgatttcaatccaaatttaaggttcgagttttacctaaggttacattagtaactttcaaatggtttcctatttgcaaccacttagaaaaaaacacaaaatgttacaattaagtacctctttctaaaggacaattcagaaaagggatggcttaatacgcaagagtaaacgctgtgcataacgtcatagagcttgcaggacacacttattccaggcaacatcatctcttccctgagtcaaatgtgttttttttctttctctctcttttaagtaggaggcaaaggggatgaaggtggctaaataatctgttttcacaagacaagacaatcgagggggcatatccacaggctgtttcaccctcaagactcgaggtctgctggatttctgacttgtggagacttgtccagacgacaatgttatttacgtattggagactttcatttacatgaccgcggccgcagtctctcccagcttagcattttctgcccagggacgactcacggtgcgcaggtctcccacccaccgcaggcaaccccttcccccgaggggcgcaggagggccgggacgctgctccccgggagcccgccctatctggggagcgttttcggatgctgaccgggagcgactgtgaggaggcaacgtgacctccgtgttgcacagggcagctcggccgggtgcccacccgcccaggtacccagcggcccgctcagcccctcgcccaggtacctcgtcctggtcgcggcccccgccgcactgcttgcagcccagcagccccgagaccgccaaaggggccgtgtacgcctcgttcgcggcggcggccaagcgcatgtcggcgcggggacggctgcggacgcgcggaggcggcgagcgctgggcagccggccgcggctcctggctgcagcgcctcagtcagcacggacggcgggggggcggggcggcgccgacaaacaagccgcgcggccccgccccgcgcccgtcatttcaccgccctggcggccacgcaagccaatgcgggctcgcgtccccgcaaagcaccgcccctccggcgcggaggctgggaactggcggtctgacgcggcgaggtgaaaaatcaccttgggggcccaggttccccacgaacagctaattctcaggtacggaatgggctctggagggccgcgaggtgagcgtgcactgtcaggaaggtgcagcacgagtcttcgggcttcagggacaggggaatctgccccctacacccctgctcggccatttacctagaaccaaacagcagccaacctcgagactgattctgacagcaccaggagtaatgaagttctctaaattcgataaactattgaaatttcccttcttcctttcccataatgcccaaacgacgctgaatcggcagcagaatgcaggactttggcctataatcaatgcaaaattcattttgctaagctacgtaaaagctataaatatcactcccctacacagataataaaccttggtagcctatctctgaatcgtcttttttcctctcaagtatattcgaaggctttacaatttctaatattccttcataagcgccctccctgggttataaagacagaatttcaatctctgaaatcggatgaggaacttgggaaaatacaggttacaaaggagaaaaacaactgacattgttgggcccagaacccagatccctccagtcctgtgtcagtactatttctttacataactctattctctctctttaaaagaaacaaattcctaaattagatctctttttgcatgtttatgctgttttcaaagcttaagtgctcaggttaaaaaacaaaaaaagttggaacattctgacaaggaaacaagtggaatttatagcagtagttatggccacagaac

SEQ ID NO: 47133 - DNA, 424 bp, Homo sapiens
gataacttcttaacatttaaccaacctgaggaagctatttcttaaaatttaattttaagagaaattcattttaactttgagatgtaaaaaacagtctaagatctttgaagctagccagagtacattcctggattctaatagtactgcttaatcatagccaagcagacacaaaatggtgtttcataaaagtgtgatagttgctactgcaacgatcagtaggtgtgcttttaatgtttattcagttgcatattttcagaactaacatgacatggattgctaaagcctggaacagctccttgatttcgaaacatggtcacttccataatggctatatataaaaaagcagaataagagggcaaaattttgtttgtatttttatttttaaaatatggaacgctttacaaatttgcatgtcattcttgtg

SEQ ID NO: 47134 - DNA, 2732 bp, Homo sapiens
actgtgacaatgtgaaaaaaaaacactggctacattttccaacaacatgtaaaaagaaatataaggaaaaacaagtatttacttggaattaactgtagttttcatatattcttccaggagcaaagcagtttctgcctaaaactctagaaaaacactacttgtttacttacagaacactctaaagatgtaaactcataataaaagtttacataacaacctaatagaaacaaacacaacgtgaataacggcaagtaaaatttaactgtagtagagacatagttgtatttaaaatgctcttccttacctggatgctcttcagaataaactcacttttctctctcacatctttgaagggacacctcttagaaagcataagcagatgagcaagtagcttattcaacccatccgaagactcggtatttgaaagcccgtctgatggacgatgaggtgtttctttcaccgaacgaagatactcggttttcctcaaaatggtttgcctaatgttttccaatgctgtctccctagtagttgaatctctgctgcagagtccatcccatctcacttcattctctccttcagccatgacaatagtttttcctttgcggtcttcagttacctttcagcatgccccaaaaaaattgctttgtatttttaaaatgaaaaatgtaaaaataaaatcagagaaatcaaatcgtcatgaaaacacacatctgggtgacatttggaaccactggtgccttcagccgatctacaagctaggtcaccctctcaccctctccttgtacacgaaagggcagtcttctttctggaaaaacaaagtttgaaagttgcaaccttgcagcgctggctttggtgggcagagaatttcggggaagcgttctcctccgtctcgcggggtcagtggatatcctcacgttgtggagctgtcaaatccgtgctctgccccaaaaggctgttaacagctgaacgccctccagccattcggggcttttttgtctgtgcagccaccgggttctctccggcgttcccaccccgccccttctccgacaccagtccccgccctccgcagctcctcccagcgcctcagcagccggccggcgccggcagggaaggctcgccgaaccctggcccactggccgcagcggccggaggcttgggcgctgtcggagggcggcagtctcgggcagccgtagtctcggcgggcggcggtgaaaaaaagcgtcccccagccccgccaattcggcacccccgggaagacgctacttctccgatccctgagccctcgcccaccaccgccgagccagagggcacagggcggccctggcaatcctcgagcgccaggctgggccgcggagctggcggggcggcggggcccgaggcgcaaagcccgcccttcgcccagccccatcggtggggatcagcccagagggcgggagcagggagtggagacggggtcctcacccccagcccctcccctttctccgcccggcacaaaccgggagccgccccggccccagcgccttcttccccgcccaggcagacgcgacccgccgaggcaaagccttaggaaaaagccccgccctctggcaggctaccctccggaccccaagtgcgccgcgcgcggctgccagccactgccggctgctacgcatgcgtgactgcgaactgggccaagcgcccccggaggcgctaagcttgcgccctgaggcggtttccgttcccggacgtttggactctgtcctggagaaggggaaggaaaaagtaagacgtagaagtacactgagacttcgtcacacataaaacaagcacgacaaagaaagagggcgcgaagggactcctggaagaaattgagtctacatttaagatcaccctaaaagtagtgacggcctcttcattactccaaaccccagatttaagtcggtaggacgtcttcgcgttgacttgtggggaatgtagtttcgatgctgccggcgcgttttgtttgcgacagaaactacaacccccaggggccaccgcgacgttgcctgtgggtgcccgcgaaccaacggttagcggtggcaggggctgactgagagcgtctgcttggtaagcactgtaagctgggttgtcacctttccttgacagggtttttccttcctccatttcctctgggattttggagacaaagccatctagggtggcctcccttagtccaaggactttttccagtgacttgcgtgggaaggactagtccagctgcccaagcgcggggtgtggtgggtgaggcaaggatttgggatcctgatcccaagggtcgcagggagcggcctaagtaaggccaagaaggaaggatgctgtggaaactggagcttcgcgctgctgcctctgattccgcccttttttgtggacacacgcggggtggatttgggatctccgcgcatttgcacctttgtttgcctttgcttagggatgttctgggctttatttgctcagtcaaatgaaatcctaggcagggctttgaaagcaagttgtcaaatccatctcgtaaaagaatccccagtattcctagataggaattcttgcaggctttaaggatacagcaggaaaaagaaagcaaaaccgtaaaagtctccaaaacttagtcgactttttcaaaagattcagtcatttgcttaaaattagtttgcttttaaaaagttattatttgagaaaagtcgaggtttgaacggccatcagtggactgataatcggtg

SEQ ID NO: 47135 - DNA, 1010 bp, Homo sapiens
ttgataaaattcccgtgatttttattttcttctataatttcaaaattttgtagaatgaacatgtattacttttataatcagaaatatatatatagtatgtttgtgtcaaacttctttccaaacactctcattctagtctcagctattatagtaaaatatcatggatttatatataacgtaagcataagaagttgtaggcaatattcaggtacacaagagaatattacttatgattgaacttattgtgaatgcctttgactataccttttggctttgctgctctacaaaccttctctatcttttgatggtctgtaatgtgctgctgataggaagtttttaattgaaggatgaaaggtgatcatattgaaggaacctgaggctgtcttagctagggcttgtctgggctagactggcaaactgggccaactactatgacgaaagcaacattggagggttaaccccactttttatgggcaccaaatctgtactagtttagagcaagttcaaagtcctgagttagtgaggcattgcatttgttttcccctgagactgtgacctcttcctctttccatttccagctctaagcacaaagtttggcacatgatagatgcttagcaaacagtattggaattgaaatggaaaggaattaggaaattatgcagattctcaacattaattttactaaatagacattgcaatattaagcgaagtgaattatgcagatacagtcacaggcaacgtctatatggatacaagggaagttcaattggagccataatgatctcttacatttcgacatcataggctgttctctgtgctcctctattttggctgctggtggtaattggaaggccctcagcactttcagcatttggcatagtgagatgtaagttaaataagcacattggaaacggatgaaaaattgcaacattaagaggaaagtaatacatatttttgtaggtgcattttaagtaaaatgtatatagttgttgttgttgtttttgagacgg

SEQ ID NO: 47136 - DNA, 1055 bp, Homo sapiens
gtggattttacacagttccacatagaaacactattgttataaaatggttagaaacgtagtgtcactatgaaaccattattcccttgtttctatgggaaagtgaattttcaattatagatagggatgtggaaactgttacttcactttctgcagtcttagaaaattcctatacttagacacacgcacacacacacacacacacacacacacacacacacacacacacacagtcactcactcataggcaaacatttgctctgggggtaggatagttttcctgagtgaaagaggtgctctagtggggtgtggcaaggatgagagtcagattagaatttttatatcatttgctctagacaggactgtgttgtgagaaggactcttgaggaccttcacccactaaaaacggggaagttagcagtggttgtttgtataactggtttatttgtaagttacacttttggattatgaaactccccacagtgatcagttggtgtttattttcattctgaagcaattttagtcatctagcaactcatttggatgatgtgcttgctgtacaatgaaatttgcagttttaaaagaccccagagcaactatggtgtgtaatttgtgcagtgttgtactactcttggaatagataggaaatgtatgtttgaattaagaaaagactgcttttctggaaaattacagaagttcttaaataatttttttttcactgtggcattgttaagaagggattaatttttcttaaaaagagccaggatactctggatgtaatgaaaatattaagttagtgtttggcctgtaagcaaaagagggaataccaaatgtcagactaggattgtaaatcatcatctttggcaggaacaaagtttgctgtttgtcttgttatgtctggacagttaccagggcctgtgatgaattttccaatttcattatcaaaatcccagagtgtggaagcatttacatagactctagggtacaggtattagtggtctgatctcactctttggggttcttgttttaaaatggatgagactttttatatttagagg

SEQ ID NO: 47137 - DNA, 649 bp, Homo sapiens
gtctagcaaagattttctgttttgcactttcatttgacctaaaatactattttagaagttttttaaatcccagaaataaaaaatttgaagtaaaaagaatataaacacagtaaggtttgagattatttattttgtctattttcccattttctccaatattttgtgcttaccatcagcatgcatcacatattttcttgcctgagagttggcccttgacacacacaggtgacatttgacagactgggaagacttcttaaacaaataccagcccagagttgaaatggaaatgggccagttagcaaacagataataaatagaacccatgaggcagaaagatcttggccccatccctgttgggaaagaattcataataaaattatgcaacggtctgagagcctctcgaggttgagcacaaagcttgaagaagcttcatcaatttaaaaagagagccacagtttctttccccacagttaggtttaccagataaaatagtgcaatatttgggacatacttatactaaaaaagtattttttttttgaaattcaaatttgactaaatgttctatatttttacttgctaaatctgacagccctatcaataacaataaaatggcaatttagcatgggcctctacaatctggtatcatcag

SEQ ID NO: 47138 - DNA, 1556 bp, Homo sapiens
ggacaactttttaaggttcctgatattgagagcatttgagtaaatttatttttattgattttaaatatgtcccattggtgttatactgttctggaacttctgaacactggtgctgattagttacactgaaatcttaagtactcttctgtgtttcaccatctgctgagaaaacaatttaaaaaataaattattgctgtctcttctatatctctaggaactatcaagaaatacttacacataataaataagtcatccaaaattgttttgcggtacagacacagatatcctattcatatacagatatctattaattttgaacacaaagtacaacattatcatctttattattttgttctcttaggcatttgagctgtttccttggagagcatttctggaagatggaggaccattcccagttatgagtaacagcccagataccctagaatataatatgcaggtaggataggtcttctccattgttgcagagagaactgagcgcagactgcaaagatggttgccattgggttcacaggtcagatcctcctactctcacccacgatgaataatgtgtgagataagcagggtgtttgattttgaggctgtaaacccagggtcacgaggtgagtcacattttcttatgatagaagggaagcatgctctcaactggcatgggcctgggttgtagactcagctgcagttttcgtaacagtagtgatctgggagaatggccagtcatctccagtcatgggctgggcctcttagagaaactcccaggctggcagctcagagatgtgtgactcctgacctgtccataaacagttgtgggaagggaactttttaaagcaggactcgtagggagaatttcttttcattgttttcttttttgctgttaacttcctttaaatagtttgattcttttcattattaaatgttttcccctgattatttaagtaaatattgtttttatttaaaaaatagaaagcttagaaaagtattaagaacaacatgaaaatcaaccataaataacgcttcaaaacaatatggaggtggggagtgggtgggatggggtagcactggccacaggttaatggttgttggggctgggtgatgggaacttttctgtttgatttctatatattcaaaattatccataagtagaacaggttttttaagtaaaatagtaaaagtggtcttaaaaaattaaccatatggctgggtgtggtggctcatgcctgtaatctcagcactttgggaggccaaggtgggcagatctcttgagctcaggagttcaagaccagcctgggcaacaaggtgaaagcctgtgtctactgaaaatgcaaaaattagctgggtgtggtggcacacgcctgtagtcccagctactcagaaggctaaggcatgagaatcacctgaacccaggagacggaggttgcagtgagctgagatcgtaccactgcactccagcctggtgacagtgtaagactctcttaaaaaataaaataaaataaaataaaataaaaaatcaaccatagttccacaactaagagacaattaca

SEQ ID NO: 47139 - DNA, 883 bp, Homo sapiens
acttcccctgcacatattcccatgaccaagagagcgcaacgttaaaagcaaattaaaaacaccatgacaggtcaagggagagactgcagaagaaagggaaaaggtttatctcttaatgtcggtgtgacactttttcctgctttttaaacaagaggtcctacatttttatcttgcgccaggcccctgcgttatgtagctagtcctgtctgaactataatatctattcctaactttgaatattctgtaggaaattcataacctttgagctagggaggagttgtctgactacgaacttaaattaggttttgcttttgagacaaagtccacagacattgtagtgttaattaataacctctgtcctcacctaagacatagtcgttttattagtgcttcgagtaaccgaattctgtaaacagggccctgtgcaatgaaagcgcgagcctctccccagctgggcgtctctaatgccaccagagagctgagtgtggttgagctctagttacagaacattcaacaagacacaaagcgcctgttgtttgtgctgtgtttgctgcatccaggcggctcccttccgagtccttggagaaaatccacaagcctgcatcaggtgcagccatctgcacatgttggggccgtggttcctatgagacacctggggtgaggggctgtggggaagcatctttgctctgtggttgtgctgccttgcatagggtgcctgtcagctgtgcttgcaaagggccttcaatgcagtggggggcaggcagaggggaggggtagagttatttttaacagtggctaggttgatattaccaagcctcactttggctggagtgtgctggccagttctaaactcttgtttgattctatacttataagactttta

SEQ ID NO: 47140 - DNA, 1139 bp, Homo sapiens
ttcaaagctgacttgaaagagaggcttgcaaggctagagcccatggttggatatagaggagaaacaaaagtgggtctgtgagccaaggcaaagagtgcctggggccctggcatgatgaggctgcactgctggagtggctgtgaataatgaatgcctctttcctttcagatcactttcaggaaagatcaccttgaggcctgcctcctttccctgggttgtgatgtgatggcaagagaatgcagcaactttgagacctactccatgtgctatgagcatgtgttgcatcatgctaggcagaggctcagccagaaagagcaagtaggttcccagagagagaagaactgcagtggggaatgggcatgggcagggaggctcaggaggcactcagaagagaaaagtaaaactgagggggttgggatacatacagtggttcttatgccagaactgagggtgaatggtaccctcaaatctctctactcattggctcaatcattctcctgggctctggtattctcagttgcacactaggttatgtgcttgggaagtgtccagtggagaatacgaaaggtgagcaacaaaggggctggccctgcaggggaaggtacatagctgtcctttccaccctcagcaaacacaaggcaccgtgcgctgttcctggtctgggaaagaagccaggatccttgagtaaactctctcttcaggatgcatgtcatgggtcagtctcactgggagacttccttaaaatatgagcctgctggtgggatggaagagtcagtcctcctgccctgggctgcccactattgtgaaggtagattgcatcagagatttagtgtgattttagtttataccttagaaaagttcaaaagtctaaaccactagccaaaacaccaaatgaagcattgaaatgatgaacaacgagccttggagccacccctattttgggctatccccattactcagttcttggcatcagtgtgggtacctggaagtcaatgttgtcttttgaggctgtgttaggcatcctgaagtccagtggggcaactcacacagtctcagctccaggcacagcctaaggttctcaaaatggggctccattaacacaaataggaggtgtttggaatgtgttgtactgacctgag

SEQ ID NO: 47141 - DNA, 2532 bp, Homo sapiens
gagactgcaggttttaaacctctagtgtttctcccgcttattacctcaaacttatcttccttctctcttttgtgttgtcacggtatatggcaatttctgctttaaaatgtatgtatgccttaaccagccctatgcgactgcacataacaaaagacacgctcctgatcgggttttagaaaacccacagacctgggcacaaacccccgttccacgacctactaaacatacgctatctgagcacaggacatagttaagaaaattttaaaaacaattgaaaaaagaataaacatacaatgtcaggagagtttactcatctccgtctctgcatctacctcctaggtttcactacctaccttccagtttagccttaggatacgtacgcaaaacacccggtacatacatgggtacttttcttccttttcgcatactttgaagtgtgaagttttcactaactacgtgctcaaacgtcagctacattctattcctatctgcaaaaccaatgtaattaaatctcaagcgaccttctcagactcaagtctgagacacgaacgagcattaccgtctttaagtttctctttcccggacttccggagaaggctacctccggagagaggcgccgggagggtgaacaaccagtggcagggagaggcagctcggccccaccgccaacctcagaggcgcgacgcccggccccatcctcaaccccaccgctgcccccgcggaaggaagccacgtccccatttccgaccccaagtgaggctaggaattacgatgcacttttaaaaggcacctcgacttgcaacacttcgaggggggccccagccccgcagccactgggaaccgcgcgtccgcttccccccagcgcgctccccacccggcccggccacgagtggactccaggctggccgccatgttgccggagtcgccgccgcaccccgagcgcggcccgcccgcccgaccgtggcccgaacccgggccccgcccgcacggcgaggaggcagtgcggctcggctgggcaggggagggcgggaagcccacagggcccgcgcccacctggtgccggagtggtgaccagcgggagggacgtcaccggcgccgaggttacgttggagatgggcgctaaagtcgtcacgttcgggtgctgggtcgtgttcttgtccgcggacagcacgcagagcacgcccaggcaggtggcggcccaaagcagtgagcgggagagccgcgacatcgtgtcctcagcgctggcgttcgggagaaagctaaggctcgcaacgctcagtcaacccctcaatcccctgcggcgccgcctccgagactacgctcccccgcgggagcgcgcaggggtcacgtgagaggcccctgttttcggcgtgcgggggcgaagaggagggaggtggggctcggacgataccaacgggaatcctacggggggaagcaggggagtcgggaggaagccgaaggaacctggccctcaaagcgactgtgccacagccaagaaaactgggagcttctgcaaatcgttcttcttgccctcagattaccagacacgacgcagctggacttgtctcatgcctgcgatagggacggcccccaccctgacttgcatggaacagtcgacataatgtggcctactgcttccacctgagcgccccgccaggctgtaattccgcgggcccacgtgacctccggggccgcgccttccggacgcaactccactggggcggaagttggttttgtgcggctctcaagaactaagtttgtgctgtgctgcgggatccccagggagcttccttatatcttcggcaggaccccttctttttttcttgaagattgattttgctagaagttatcctgtgatgggactccctaggggaatggaggcaccacgtggttaaggagtttgtgcgttgccgcccacatagtgtgggcagctgaggcgccgcccggatcagagccgcagggcgtctactctgtcactttcccaacctgacttttccggattgctatttcagacggcggttgcagcagccgacctgtctcaactccaccactgtagtcagagaatcaaaagcggtctgagttgcgaggtcattggggaggcccccacccccacattaccagtgaggaaactgagacttaaaaaagtgacctgacctggacacgggattgcctgacatcagagctggattcttaagttcctgttagtgttaaggcgctgctcagacttttagtaaaggtgagcgccatctactgccaagtctcacaaaatattcgcaaaatttgatacggttatcacatggtaaaaattagactttaaaagttgtatttaatgctgtgttttcagctgttgtacacttatgtaattttaattatgcaaagttatcctaataatataggaatattaattgctttcgtgaggtctgtcttgatgtgccacgatgacttttttgatgtgccaaaaaagatgactacatagtgcttttacctttttgctcaaatagaaagattttatttccccttgggatcttttca

SEQ ID NO: 47142 - DNA, 640 bp, Homo sapiens
gtgagccgagatcacaccactgcactccagcttggggaacagagccagactcgtctcaaaaaaaaaaaaaaaaaaaaaaatgtaaatagaagctctgttctcagagcttggtgtgttatcttctttccaccctaggataaacacactcctctgtgcagaccattgtttaacaatttgtcacctggatgtttaactctagtcctcagatattcctcagtcctgataaagggacatttcacgctcttgttttaagactagaaaaccattggtttattttattttgcatggcaactgtagaggtagatcaagggagttccaaagtcattttcaccatttcagagagacagctttttttttttcagttcctgacagtaagcttctgtttattgttgtcatagagcagggtttctcaatcttggcgctatcaagatttcaggctgactcattcttgcttgtcctgtgcattgttggatattcggcagtattcgtagcctctacacactagataccagaagcaccccacctctcagttgtgacaaccaaaaatatctcccgatattgttaaatgtctcctgggggtaaaatcacaattgaaaggcaccctcagagcgttcttctgtgtgcaaggtcagccatcact

SEQ ID NO: 47143 - DNA, 1698 bp, Homo sapiens
ctcagttctccctttaaaagtcgccaagtggaacgcccgcccccggacccgcacttgcccccctatactctcctcccggtcctccagacggagcccgcccggccaggacacgccagccccttcctcggccggtggggcctcgacccccgccgcctcgaggaggcgcggcgcctgcagtccacgcggccgagagcgggtagcggggagggccgcccacgacggaggtttctctgtggttacctcagcggcgctcttcgcaatctgaaagttggggcagctgaagagccccaccaccttcacctgcagcggccgctccggcagcgacggcgagccgcacctagcgtgcgggggcccgcacggctgcggccttgccatggccgcgcccggggacgcccggtgaccccaaacactgcgcgtcgctccggcaaccgcgcggccccgcctccgccgctcgcaggaggcggggcccaggggcgggtcgagggcggcccgtggcggctgggcctttcctcaactttgcgcctgttgctgggccgccggcgcgcgggcggccgcgaccgccggggacgagcttggaggaaaaggaaccgggagccgcccacccgggggcgctctccggacccccagggtcctagcgcgcggcccttaccgagcctgggcgcccggatttcggcagcggatcgcctttccgggttggcggcccgcctgattgggaacagccggccggttgccgggggaacgcgggagtcgggcccgacctgagccacgcgggcttggtgcccacctgtgcgcgccgcctgcgaagaaggaacggtctggggagaaggcgccgccggccgcccccgtccccaccgcggccgtcgctggagagttcgagccgcctagcgcccctggagctccccaaccatgaagcccaacttctccctgcgactgcggatcttcaacctcaactgctggtgagtgcgtctgcggagtgcggtctgggggccaccttccgttcgcacccatgcagccttcctccccctatcccgccccacgatctcagggtgtagggaaaacccgaacctccaaagtccacatctggccccagcgccggtggtcccagcagtcgcctcccctgccccgctcttcccttccttaggggcattccgtacttgagcaagcaccgggccgaccgcatgaggcgcctgggagactttctgaaccaggagagcttcgacctggctttgctggaggaggtgagattgtgcagcacggtgcggaacccaggctgggaggagggacagaccgtcccactggggaaagaccaagcaggcatcctcaccgcttccctcaggtgtggagtgagcaggacttccagtacctgagacagaagctgtcacctacctacccagctgcacaccacttccggaggtgagaagcccactggcctgaagcctgttgtcatcccaggaggctcttggccctgccagcccttccctatcctgcctgcactctccagtctcctccagcctcctctccctctggatgtgagagaaggagaagggtgaaccaagaaggtcctatgacttcagcccatttcagctttgttttctggctgccctatactcctccaaaggctgtcgccttggttctagggctagtcccagcagtagaaaaagaaaaaaatagctgatcagagctggaagacaagggagg

SEQ ID NO: 47144 - DNA, 2765 bp, Homo sapiens
gggtcgaccgcagccgggtgcgcccctcccaggttcccccctccctgatcgacccctaccccgccccgccccctgtgcgcccgggcgcgctctcccaggaatctccggagacaaagcctcgctttgtcgccccctcccacgccacctgaagggtgcccgagggggtttctcacgcggggcccagaaggtatcagagggtatggaggaggcgggtgtccacggcagcgttagggagggtgaatggcagcagtgggggcaggtccctgaggctcaggcccctccaccatccagctgcccctccgttcccagcccgccgcgccgagacaggagatgaaagcctcccgctgcgggtggcccggacgagggcagacggaatctcatgacggaagggcaaagatctttcttgggggtggagggtggaaggaggaagacctcggcgaaaggggagaaaggagcgacccagcctggaaacgccaggacaaaggctgtgagaggggtggagcggtctgaaaggatggagagggagctggaccgcgggcggcagcggtgggggtccccgacactggacggcaaagtccggacgcggcgtgagcagggctgggctgagggaagacctgcctgacctgccaggcgtggttcccgagcgaccgcagctgcgtttccccggaagcgcaccccacctcaccccacccggccgcggggctcgcagccggctccgctggacgacttaccggcggctccgaagccgggaggggccgcttcctgttgggctggcaaccaggtctgagcgggtgggagggcgggggcgggggcgggggcggaaacgccgagatcgggcggggatgctgggatgcggggcggcccggggcgtgcgcctggagtcgcgcggagtgtgggcttccgcgaggggcgcggggcgccgcccgggctttattcgcgactcattagcatctcattacttctggatccctctaccgcctccagcggggacagtcttgggcccgcccatgcctgcagggtggcgcccgagggcgtggcgctgcggacaccccgttccgctctggggcctctgggtgggtctggcctgttgggggctgaggagctcgagggtcagggcgcccagtgctggaccgcgcaccctcggcctgggctccttgccggtgcttgcgcgtgcaaggctagctctttccccgccgcaaggcgaggaccacccgcccccgccgcggtcccaggtccgctggcagcctcccagcgccgggccgagagggcgctcaggctcctcaagaggtttggaaaagccggcgggtccgagggtggcgccggaacgtctgcgctctcctccggtctcccacctggagatccacggcccgggcgccccaggatggatccaagcgcagagtgcgcctcctgtgacagaggtcgacccctaagcccgggccgagggcaaagggcgcggattaaagtcctggaaactcagcaatctgcagcttccaaatggatatgagaagtgagagggaaggggatggcggggcgggttagaccaccactaagagatggggaatgggaggggtgtgtggaagagagaccaagtcttcaaagaatgccttagagtgaggacccacgggactgtctgctgaaaagggctggagaggcctttgggatcagcttcgtcgtattcccgataaggaacagcgcctaaagtgaagggacgcgtccagtcttttagctagttaatattaaaaaacatcgtctcatttattgaccgtcatcctatgagtattacctcaacatcagtgcttgcaacagtcccattttaccaaaaaggaaactgagtcacagatgttctgtgatctgcacacagcaagtggcagagctgtttgggggcccaggtctgtcggctccaccaccccagggttgacccaaaatgacgcatgaaaggctggcattataagatgctgtttcttgtttagacgaagtgatactgttacactggaagcactaataaaacccaggtataaataagagggttgctgtccttgagatccagagaccataaagagctgggagggaatagggcctctccctttattctcattttgcatttcatctggaaaatatctgagacccagtaagacctgaacactcactgttcccagctcgagctgagaagcaggcagtgggacgaaagcaaggggaaatgcctgttctctgccaggagaggcgagggaattcagccaggtcacgctcagaaaactagggcagcctctcagttgggcccatcctagcttttgagtgtgacacgtcatttggcttgaaatgaatttgccgaatatcagacacacccatatttaaatacatggtgtaaaaacgttctaaagtccactacagctgggttaccctgggctccaccaccccagggttgattcaaaatgatgcgtgaaaggctggcattatacgaagctatgtcttgtttagaggaagtgaactgtcacgctggaaacactaataaaaccgaggaataaagaggagggttgctgtccttgagatccagagaccataagagatccagagaccataagagatcccgagacagtccctggcttctagaataatctcatttccctttcactagcagatggtacacaactagccgctccacttactacaactacagcggctacaactagccgctccactttgcaaaggcttagtggggtctggcttgactcaatgccttttgccaagcagggtcatgtggctctatg

SEQ ID NO: 47145 - DNA, 1120 bp, Homo sapiens
gctctatcgcccaggctggagtgcagtggcgcaatctcggctcactgcaacctccgcctcccaggttcaagcaattctctccctcagcctcctgccgcacattaactagctgagtgactctccagtattcatggaacggttcagggtctaccttctataaaatgaaggaatgggattaaccatctccaaaatcctccgcaagcacgaactttctatggttgcacaactatttcagggagaacgaagctgcctccatctcccagattattagccatttcgtatgtgggaaccaatgtgaagagtgaagaaatgtgcacgtgcaaagtgaatgtgaggtagctgcaataaaatactaataacttaagctgcgtggggccgccagacacactaggggcggcgcggagccccccgcagccccgggtggtcccagcagggagaggtggcgcggaaagacccccacctccccgcccaggccccgcgggcccgactggggagcacacggcgggggaggggtcggcgcggcagacctaccgctcaggggcgcccggtggggtccgggtcgctgccaactcacccggcggcctggcgggagacccacgccggggcccgctggccctccgctccgccccgcccgcctctggggcttctgcgccgcaccggtttctgctcctgcgccgccgccgcagccacagccacagccaacccggaagcgcggcgccaagagccgcttgcgcgcggacgccgaaccacgtggcccgcagaggcgcccctggaggtgggggccacgagagcggcggggaggggaagggaggtgaggggcggggcggggcgagatggcggggcggggcggggcggggcaaggcggggcaaggcagggcaaggcggggcgcgaaggcagttcaagggttggggcgtggcaggggaggggaggggcaaggcggggcgagaatgcaggcctggggtcgggggagccgcggcggggcggggcagggcggggcgagatggcaggcccggggctttggggccggggccggggccggggccggggcagggcggggaggggcgcggcttcggaggagggacagtggccggggcggggcgcggccaggggcggggcggt

SEQ ID NO: 47146 - DNA, 679 bp, Homo sapiens
aattcatggatgaatcacaatatactggtaaaagctgtaaatgtaatgcttccagacatgagttcctctcacaagtggccctgaaaaatggtgattaggggaaatcttcctggcaggcagagctttaagcagtattcctaggccctcaatttggaggacaatgcggattggtttcatcaagggcctagaaggtacaagatcagaaggtaagagaaaaagagttctggggaagaagcatgtgattgggcctatgagggtggtgtagcaaacacaccctaatctgacctccagtgagtcacacccttgcataatcctcttcctttgagtgggagtggggtctgtaacttgcttctaaatagagcaaaggtgacagaatgtctgtctcatgaatatgctacatggtataagactccattttaggggactggagggagactttctgttggcttggaagaagtaagctgccatgttgtgagaggaccacgtgatgaggaagagtgggtggcatgtgagtgcagcccctgccaacagctggtaagaaaacagtgacctcagtcctacaaccacaaaacgatgatgcttgccaacaatgtgaatcagcttgggagtggattcttccctagtcaagtctccagatggaagcacatctcagccaacaccagattgcagccttgtaaaa

SEQ ID NO: 47147 - DNA, 1190 bp, Homo sapiens
tgtcatttcttttccaattcgaaatagtcacttttgtacctaatttggcatttataattataatacactcattttcacaactatggaagagagggtacgcgcatgcccatttatgtcgcacacatgaaatgaagaaacctcatttcaagcgcggctccgccacactgcgctagtctctgtcgacaacttcaagtggctagcctcacgcacaaacgtgtggcaaagccacactttccagctttaggtgattttaaaacaatttcttgggccacacagcgtaggtacaacatggattagaggtgaggggaaaactgacactcagtgaaggaccgtcagagggccggcttccaggaaaatgggccgcagcaggcagggaaaacacaaggatctatcctgcaactcggagaacccttttcaaaagaagctacccaatcccaaaccttccgcttttttccaaagagagggaggagataaatagactcaattaatccgtcgactttttctccgcccatgttttcctccaatccttaccaaagatggtgcccttcgcttcctctctcggcagcacgcaggtcccgggagcctctacccgacctctctatgatacgtcctccagccccgctcccgacgtgaggggcggggcttgcctggaggcggggcgcagggatccggaaacacctgatcatctataggtttagtgcctaatgggtgttgttcctggctggacttgatgtccagggcctgaggggttttctcgccgagtctcctggggcggtccggaggctcgtgccctgttgtggggcccccatttgccgccgccatgcccacggccgccgcccccatcatcagctcggtccagaagctggttctgtatgagactagagctgtgagtaccccctcgcggcggggcgcaggcgggaggatggatgtctgccggtgggtgtggggccgtaggacagaggctgtactctgcctcctcctccttcctctccagttcccaaatccctgtcaaacacagccttggggtaagctagctcccttgagctgtgcctgggcgcctttcccctattttggtaccctggacattgcagcatttgcaggtccacttacaagccatggctggaacacgctggaaacaggtgcttgtggtacctcaggaactgttcatgaggttctctgtacgagttact

SEQ ID NO: 47148 - DNA, 557 bp, Homo sapiens
gcttaagagactggagtgaaatgtgttgtttcctggcatgagaacctctttcccttccactgacctgcctagtctcagtgacagatttcttctagactctggccacataccccagccagactgcagatacagagtcctaattgtatggaatcttaattgtattctagctatgtgtgatttatccaatgggacatatattgatattttccagaaacactatttctgtggcttttatatgtagcctttaaatagctcatgttaagccctgaccagatgctatgaggaatttaaaagaaggaaggtcttcaggagtttggaattcagggaattcccagaacaaataagtaaatgaccagctatattagtgtgtgtcacagaaacgttaccaactttaatttttagttgcaaaaggtcagagactgcttgttttctgcaatatctaacccatggtcacataaaattgcattttcctttcctagaacatttcaaaatattatggtatttttagctccttatagagaattttttaaagagtgaaatattaaacatttttcata

SEQ ID NO: 47149 - DNA, 1211 bp, Homo sapiens
aggcaatccgcccacctcagcctcccaaagtgctaagattacaggtgtgagccactgcgtccagcctaatataacttttaagaaatgaaaatagtcagcaatacagaagaaaatgaattccacttaaaatgcagtttcagcattgaggcggtcaaattctgaaacattgatttatatacagagttaaagtgctaaatgcctgagactctgcccctcaatgataaaaatttatgatgcatgcaggtatctgcactgctcatatgtaaactacaaaccaaagtaccagtacattcctgcatttctaaatcctcaagatcaaagtcccttctcacaaaataaatctgggatattgacaaatgaggaccttgcatcactttaggtcctggatgctggtgggagtggtgactgaggaggaaaaagaaaacagtaataatagggtgctaattcacaatgttataggcctttattaggcaaatctagttgaaaggaggggatacccataaggcattccctgaaatcatgtgcataatttcgtgtgtatgtgtgtccttttgagaagatagatttagcagattctcaaaagaatccttcactcagaaatccccacgaacctgatgagaacattgcaaacacctcctcagcttaatacatggatttagaagacttgattattgcatatgaatacagttccacttatacaaatttgtaaatgtgtctgtaaaatgtaaattgtataatataaaatgagcactgatcttcagttatttttaaatgagggcatttcatttacagaatccattgaattagatattgtcagcttttcatttcaattaataaaaactactctataatatataaaatataaaatgcacagcatttcctgactgccaaagcagctcctgtaacttgcacttttttgaatatgcgtcattgactggaagccaatttagtcatcagagcacagccacaccctcctcactctgacacacaaacacacagtacttattcatcatggctgtcagaactctgtagccaaactctgtagtagttgaagtgggcctttacaaaccatgtggcctgaagaatgaattatctgaagttactgactgagtaatatgactttgtttattgcagagggaatgagtgtatgtgccaaggattgaaggggttacttcaggggagggaggaacccatgtcctagaataaaattc

SEQ ID NO: 47150 - DNA, 820 bp, Homo sapiens
caagatctgggaggaaaggcagatgggatagaggccttacaaggcctgacccagagggggaatgaccatctggtgtgtctaggcagattggcctttggacttctccagtaacatcttggcattctattccagtgggtcccaagccatatgagatttagatgttacaaattgccttccagtgtggacaacctgcagaagggaacagaacaggttttaatggtgatctgtgcaaacctgtggccaatcacagagagcatgacagatgttctagtagatgcctgcacaggcttatgacattgagaaccacctaggactttcataacatgcaataacatgtagggcaaggacacaaaagtgacagaaattaaatctctatcaccctgaggaacatgggggccacatatagaaatggaattacagagaactaaagagttctatatgtttttatttcatatacacatgaatgtgtggtgttagatttgtacaaactgtcaaaagctggctccccaaataccacagaatctgtcaataagacaaatgagtcattgtcaataagacagatgagttcatctcaacgcagtaagagaaagccacctttgacttggcagtgtctcagaggggaaaaggtaaggtaaaaattgattgagaattagaagcttggtttaaggcaggtcttacaatgtgggacttgattaggattgggtaatcatgatccaacagtacaggattggtggaaatagcaagacgagagattcaaagaatcttgtctttgatgctttctattgaagatttagttgatgacgaatttaaataatttttt

SEQ ID NO: 47151 - DNA, 561 bp, Homo sapiens
ttcccatacttttcatttattaaaatcacacatacaaagttttgatgaaatcaggattagttttaaatcaactatgttactgagattagtggagaaagaaattttaaacaggagcagtgcctaggaagaaataattttaagaggcctagtggaccaaacaaaaaagaatgtatttctgaacctgtttatgtgaagagatattgtgagctgcgtatttaagacaacacccttgctattgggcaagaaatctatttggcaagctcaaataggaaataactgtgatgcaaaatggtatgagtatcacttgaaaaaagcttataataaaagaattacaggaattcaaaaggaacttgaacccaggaggcggagcctgcagtgagccaagatcatgccactgcactccagcctgagcgagactctgacctactgtcactccagctcagagtgagactctatctaaaaaaaacaaagaagaaattcaaaaggaatatgagctccagttgtaattagagaagacttcatgaaaatacagatgtgagatggttgttaaggggcagagct

SEQ ID NO: 47152 - DNA, 2827 bp, Homo sapiens
aaaagaccttagctaatcgtgaatctaacaccaaagaaaaaatttaagtcgaatccaccgcacatcttattacatagaaaaggaaatgattagagtaagtcgtatttaagtacctagtctagctggggatcaattaattaatcggttatagggcaggacgtgaatgttgagatcggatgtgctttctttcatcgttattccagttcatcatccgcaagtgcaagagaaggtgtcagagtaccgaagctagggggcatgctgtagcaaggggaaaagaaaaatgggaaaggtgcaatggatgctgcatagttgaataattatctgggtggcacaatgggcgagtcctgccgacatgagcgctgagtgagcggctccgtaactctgcccaaggcagcccccatgaacaggcaccagaagcgacagcaccgcttcgcctccccttccaacgaagaaaaggatgcccgcactcgctttaccgttatgttttcagacaccgactcgcggagcaaacacgcaaacgcacgagctcgctttaccgagcctcgcgcacgtagggcgagcaggggattctctgtcgcccggggctaccgcctcccccggaaagaggcacggggcggaccgcgggcgcgggtgggcagggaagcccgggcggtggcacctcaggtgacacccacagtctctccagcgagagcagccccggggcggtccctgcagccaagccccaggcgcgcccgccgccgtctccctcggcacccagccccgctggcgggtgggcggtgggcgctcggaaaacccgcggatgggggtgggggccggggcggggaaggcgcgcccatccatccccgtcacctttgcgggccacacaccactcggtctgctccggccagtaaggaagagttcctctcccaacaccccctccccgaaaaaagcaattcctcagggactcgcgctcaccgtgaaatcttgggggctcacgccttaccccttcttcatgcttcggcagcggtcgccggtccccctcggctcgcgggactccgcctagagcccccaggagggtcgggctctggggcggaacccgctcagggcagcggcccaggcgccaggccacagggaacgccgcctggggcgccaacccgccgccggacccaccgtgtgctcgacgcgcgagtgaacaacaccgcgagctgccgttccccccgccccctccccgcgcgagacgctccacaaccgggcgcagggacccgcgccagaagcaggggggaccgcgagactctttccgcctatggtcccatccttgccccccgccccaggagctattcctggccagtcagaggtctcaaaacttcagattctcactttcctcttcagcctccagtgcccaggtgcagccgaggtgggaaatccagcctccgcccactcccccattagtggggccgaagctcgctcttcccccctttcctgaggttctgtggtattgcccaatcctcagtttgggggagggggacgaagagaacactgcttggctagggaatgagggaagatgatagccaattgaatggaacatccattcgggggcggggtcaaagggggacacgcccccgttccgccccctcgttgcaaactacacttcccattgtgccctctcgcgcttcctgccgcgctgcacgctgggagtgcaggaccgcgaggcctcaaggtattttggaactcatattctttagtcaactaggtcctaaatgttataaactattataattctccctttttccctagataaacttttttaagctctcagctcgacagtagttattctaataataattagcttattgtttcaaaatgtaagacattatttcttagcaaagaaagttaatgatgtgttccattgcaatctgtcaggacctgggagcctcttcttcttccgccctggcagggtctccgcagaagatttgttgccgtcatgtcggctgcgattgcagctctggccgcttcctatggttcgggttcagggtccgaatcggactcggacagtgagagcagtcggtgtccgctgccagccgccgactccctcatgcacttgactaaatcgccttcatcaaagccgtctctagcagtggcagtggactcggctccggaggtggcagttaaggtaagcacttttgctactaatgcagtgtgggaattgttggcttcagctccagaactgccagccgcttgttaggtaccgggttacctctttctcagtgctcagagataagttgctaacgtttgaatttcttctccttcccacatgcatcctcgggagaggcagaattggaagttcggaatagccctccgatgctctctgcccttgcctcccgccatcagaaagcaagtggaaggaggggatgaaatttgaatttgtggattagggacatagcctggaaagtgcaggtgtaatctcggaacataagtgaaattagatcaggacttcccaaactagagtattgtgtgagcagtggcctcgatttgtcttatttttgaagaactaggttctaatcctggcaccaccacttgtgtgaacttggacaagttatgcagcctcctttctttcctcacctgtacagtggagatcattttcaaaacatctgtctacatgaaaagatgagtgtgaaaattgagtgaaattacacaaataaagcatatagcacagagccaactagtgagagtgcagtaaatgttttatgattgtgtgtgttaatacagtgagaaaaaggccttggatttgagaaacagctgcatgatctcaatggaggaagctgattaataaggcaagagtttccaggca

SEQ ID NO: 47153 - DNA, 1297 bp, Homo sapiens
tgcgtggaaatgaacaaggaactaggttgtgagtcctcgactccaactcagcaataaagtgagtgtgtgttgatgtgttgacgatggagaagcctaagctttctgggagaaacaaatccaaaacaagtaaaatagatttatttagcaattttgctgcaattttgtgctaattaagagcatctgttagtgggcaggaaacaatgactgaaggaaactgtttattcctttttagagggggtgggggtgggagtagttgggggagggagaggcacaaaatggtatctggacagaacatgactctagccctggctgaggctgtgagcactgccgttacgtttctgtaacgccctcagtgtgtgcccagcgcttctgaaggctgcgaggggagtgccgggtgcagtttcacgtgccttcccctcagccttctcctgtaattggcctgtttctcagacccggccctgcttcagaaagagcaagaatcagttatacattgtgcagtgatgtttaaaattcaggtaacccatgcaaaaatttcatttaaaaacaaaggatctcagtttccgttctgggtaagcacactcccaccccgcgcctcccacggaatgcagcagtaaaacctggacagaatgcacagagcggttatttgaggaatctgaaaagtaaacagtagcaggcagattggagaagaagaccagaattcaaagtacctcgaaactagaagccaggtcaccattgcttttccttctggtgtcctgcccgccctactctaggctgcctggcaccggtggtgggcactggcgcagccaggaagcaccaggagcagccccgcagttcaggctccaggaggcggggcgtctcccgatgctcagggatagtagaggaaatcctcacttttcctccttttttttcctttctccgttcttgcaagtaatcccactaagatggtagaagccacagtgggggcctgaaggcacctagaactctgcgaaaacggaagtttcctctcctctctgaggcagtggaccccagagagtggggtgaatcctcattgactatgtctgtctctctcttcccgcagcttggccttggactcaggcacagtcacaggaagtgtgaagcagagcgtaggcaaagcaggggtaaaagcccaaactttctggtcatagattcaaaaaccgtagggaactggataatactggggaaactggggagaaggagtagcttgggaaggcagccccattaacggatttgtaaagcacctgggctcactctagaactgtgcatgtgtggatctgat

SEQ ID NO: 47154 - DNA, 1290 bp, Homo sapiens
cagccaacgcctggaatgagactccagggaaattcggccagctggtggatcttcagcgagatgaaggcagtggcgtggacaggccattcacggcgatacccacccaactctgtccaggccttaagcagaaggctgggagcagcacagcacatcaatggcagccacaacgccttcctttccctttccctttccctgcctatcacgcaaacactcccctactaaagtgtatcctccgtgagaacagggctccgtccttcttcacgggatgcgcggagcctagaagggcgcccggccacggcgacccccaagtactggctgaatagtgaatgaactccgcttggccgcacttcagtctatctgggcactgaaagatgcgacccgtggagccgcctaagagagcacagggggaagagaagaagcggaagcctccggaggtcccatcgaggcggcctgcgggacctgagcgccgggctccgtagcgcggtcgggagggggcttctggtcccaggcccaagaccgaccgctttgcaactgaccttccggcgggggcgcccgcgcggggcacagcagccaggctccggcgtcccgctcccgccgccccccggcggcgcccggcgaccgctgcgcacgtaggtcacctgcctcctgctggcgccgcgcggctggcccggcgcgggcggcaggtgcggcccaggtggccgccaggccgggcccggcggggcgctgcgggtgggggacccgggcccggcgcgccgcagctctgcgcagagccgcaggccgaacaacagcacagccccgagtagacaccggcgcaggacgccgcagcccctcccgggcggcctctcccgggccatggcgctacactcggggtcccgcgggccgcgcctggccggcagcagggatgtagccccacaggccggagcggccaactgtgggaactcccccgcgggccggggtgcgggctcggacccgcctccctccctcccgaccgaggaagccccggcgtaaccttatcctgccctgccgagcgcgccccgccgctggaacggtggtgggccgaacgcggtcacagggggccctctccgcccctccggaggtgccagggcccggctgtacagggtccctcaagaggtgccctccgccccggcctccaaagcctgacggagctgaaagacatagggccagaaaaagcgcattcctaacgggatcccgggccataacttcattttctggtattagtgttgttggagaaacacaggaggagggtaggtgagcatacaaggaacagtc

SEQ ID NO: 47155 - DNA, 1469 bp, Homo sapiens
tgtttttggctttccccatctgttcctgctctgactctttctgtatggctcaggtttaaactccagagagagaaaatgcagttgtaccagttggtcattgcatcccctgttggacaaaattctagcaccaggccaacttgctgggctaaaccagcctctgaatgtgcccttggcatagttgcccttctctgtccaaagcacagtaatcagggtactgggccacatggtacaaaccatggccacccacacacagaggttcacctttcctctggaaggctgggcagcttcctcagcaagggctgttggcaggaaaaacgtgggcttggttgttagtggcctctgctttctcttccagttctgaagattctcgcactatgagactttaaagccctccaatgaagtttagtgtgatattcctattcctcgagcagtctatgcatttctgtgctaatttgatacgttaatttgattgctgtacagtgggctggtcagctgagagagagtgggcctgccagggctgagggaagagaagggaacgggcccaggccagagcagtctggtgggggccagcttgagtagagctgtcctgcagccaccagtgaccttattgacttcgctgtttcacatcagcctcccatgtccagcaactctctcaaaacagctctaataaactaagttgaaagggcaagcaatctgtggctaagaataaccagctgccagggaggaggagtgagcgagcaatgtggtgtgtcctggcacagtggcctgtccatcactgtcccctgaccctattcagacacactcccaaactcccagagcatggacggaacgacccctcagctgaaagcaagaattcaagtacctgtctctgaaaaagcagtcttggaagccaccaaaatctctggcaccaaaccttgtttcccagtgcctggctggtctcatgccctgagagacagagagaaagcgaaactgattcccattggtgacttgattcaggacattccccctggtcttcctttccattggcctgcatggctgtctctgtcacccattgccccggagaaaggagcaagtgacctcaacctgtcatctccatggcgctgtctctgccaagcccttccctttctggcccacgagccctctgtctggccgccagcctgggctttctccagctgatttgtaggtatggtgaataatgggtgagcctgtccaacttccaacctcgtttggctgcccacagttagccgggtgcctggctctgctgggtcagctggtgggggaagcaggaaggagggggtgagggctgagtaatgttgttgattgattggagctggaaacactattcaggagataatctaggatagaaccacatgattctttagcccagcagtccccagccttttaggcaccaggggctggtttcatggaagacaatttttccacagactggggatggggagatggtttca

SEQ ID NO: 47156 - DNA, 856 bp, Homo sapiens
catcatcttcccaacgcttcttcggagacttttaaacttgggctgcagaggtccccagggcctcacctctgcagcacatttagggtctctctagccaccctccccctcttgctgtgctctccatgggtgtttctggcttgcagggtgttagccttgctggtgtgtctgtggccagtaaatgcaggacctaagcctgcgttcatcagaagactattgaagatatcaggctcaggggccagggattcccatgtgtacagcagtttggggcagggaagtaggacagtgaaatcgtcctcatagggttaatgagattataagccaggctttatggagaattctagttaaacattgaccagggtgggttggtgtacttttgacctgctcccctgaaactgctaactaatcaagaatcaggtagcatgctgaccacctgctcccccaacttgttcctacagataaaatctctgacagtggatcttttacccaagaattgcttaagatgttcttcagatcctcaatttcagcagaatggctgacaccaactggcatgggtgagcccagagagaggctgggaattaaaaaaaagtttacttagagaacaagcagttgccagtgaaacgttggtgcactgtagacttcagacataaaaacagcagccatcactgacttctggcaaattcaagtaaaacaacaaacatcgaaacttccagacattctgttgggggaagttgccaaagacgttggctgccatagtcagctttaccatcttcgataagaaaatactcctcttcaccatatacaagaatttattaagtacctgctttgcctacaccattttgcacttagtatgttttcg

SEQ ID NO: 47157 - DNA, 849 bp, Homo sapiens
gaatactcagacattctgaagtcatgaaagcagtaaacatcttcaaagagatgagaaagtaatcacagcatattggaaaaaaccttcaaacagaagtaaggaaacctgaggtccatctctgaccatggcaaattatgtgaacttgggtaactcagtctttctgagcatccccccaactctcagtattactcagtattaatacttctgtgtttgtgtgtgtgtgtgtgtgtgtttgtatacataggtcaaaattcaaaaggtactgttgtcagaggcattcaaaccagagcaactccatctcaaataaaggctggttaaaataaggctgagacctactgggctgcattcccaggaggttagtcattcttagtcacaggatgagatagaaggtctgcacaaggtacaggtcataaagaccttgctgaaaaaataatgtggtaaagccaactacatcccaccaaaaccaagatggtgatgaaagtgacctctagttgtcctcactgctcattatacactaattataatgtattagcaagctaaaagacactcccactagtgccataacagtttataaatgccatagcaacatgaggaagttgccctatatggtccaaaatggggaagaaccctcagttccaggaattgccactcctttccccggaaaactcatgaataattcattccttgtttatcatataatcaagaaataaccataaaaatgggcaaccagcagccccaagggttgttctgcctatggagtagccattcttttattcctttactttcttaataaacttacttttacttcactgtatggattcaccttgaattctttctttcatgagattc

SEQ ID NO: 47158 - DNA, 1325 bp, Homo sapiens
aatgcatacacctgtgtttaataaaccccaggtattctgaagcacactaaccacttacttaaatatccttaatccaaaatgattgtctgaaaggatggacagactgctggtagggaagaaaggtctcttccctctaagaaatcttgaaaaacactacttgttcccagaaatttctagaaaagtttaaaatcagtactttaacttctttaacagtacagtactttaacctctaagttttgaggaactatttcccatgttaaccaagccttttaacatttgtctgaaagtatctgtgttcctgaaaacagaatcctagaataagagaatgttgcagttaactggacctcagattcattctgaaacaaccccctggtttttaccaggggacactgctaaaaaaaaaaaaaaaaagaggacactctgctgagagaggtgatttgacaaacagcaaagcacgaacaaggcaaacagaaggtagatgccagtttatttggatttgttcccaacaaactccaagaggtcaaactacagttacttaataatgtaccaatgtgtcacccagtactgccaaatgaggacattctggaagaagacaaagattctacgggagtaagatccttccctctccagaccaatgacaacagtctctggacaaacctgacaaaatcccaaaatccattctcaacacgctttctcactgcaaatgaatttcaatttacagcaaaacctaacatgaaacccaaacctcctggaaaggccaaggggaagagtctaatttaactatttacctcccaagtaaatgcacattaacgtttcctaaaactcattttccagattaacctttaaaacaaatatatgctcctcaaggatgttagaaaacactgagttacatttagcaattcttaaattaatcataatctttcatcaggcaagatttcttactgtagctgcagttctgttcaacaaatactagagacgcagccaatagataattatttgaaattagtgggtccacgtccaagacttgagtcattgttttgttctgcaaacatgttttgctattgttgtaataatctttctctatacagccttttgagtttatgatgtaactcctttatggaatttggactcctccatgaaaattttatgtgttcaagtaaaaaaaagtacagtcgacccttgaacaacacaggtctgaacagcacagatccacctatacgtggatttttttcaaccaaacgtggattgaaaatacagtacttgagggatatgaaacccacctgtacagacagctgagttctcctatgtgcaggttcgacatggct

SEQ ID NO: 47159 - DNA, 715 bp, Homo sapiens
aacagttgtttggagactcagcaaaattacttttaagaataagtgtgaaataaagaatttccaggtaaacattatgtatgaacaagaaaatgaacaatacagggggtgctatgcttaagcttctttctgggctttataccaggaacacttttatgtgaaaaagaaaaagatttaagtatgagattaacatttactccactgagtgacaaagaaggttttttcatgttctctgactctctgggaattcaggaaacaattgagttattggtggtttaaaatgtcagagagcagtaatcacttgcacaatgtgcttcccactctcaattacttcaggcattgtctgattttgaggctattcttgagaactaaaatgtttttctagtgtatattgtgtagtttccacgtgctcagtatgactaatgcattagtcacaggttacactatgagagactgaagaaaagacagtcttgatctctagaacgaccttgcttcccaagtctaaattcctcctctccaaccaatgattcccctctgcctccacctctgagactggttcttttcctggcaggagatacttactgagcaggtatttgccaattcttgaagcctttagttcagtaagaaatctccaccctccttcttatgcagacattctctctggattcctcaccccttttctggtaatctcttgtctatcggtgggaaaatatgtgag

SEQ ID NO: 47160 - DNA, 640 bp, Homo sapiens
aaagcaataaacctatttctcaggtcattttaaaaacttctactctgggacattgagcagatagtatctatttttctttgctttgggtatttttaaagacactgcccctccccatttactttaatacaatactaagcacacatttctcagcacgtaacaagtcaggatgttccaggttttgatgcacgggtcaaactttgctttgccttgttgaccagccttgttgacaatagggcctttcattgcaggagcacatgaatccgggcaacgtgacttaagagctggctgatgttccaggacagcacaaaagaacggaacttgttttcatgctatgagtgcgcaaaccaatgggcagtttttggggttactcgtgattgctcctcggtccagagttcaggcagcaatctgagccactcaactgctcttctttacccctctacctctgcagttcattgggggacagagctgggccaggatcctgggacagaaggaggaggcgggcccaggaaagtccacttggggtaacacacaatttgtacataaaaaagaaatgttcacctctttgtatgtaccgtagtaattatttcaccttcttttatgaacttgcacattttcagagagagttaaattaagcagagtc

SEQ ID NO: 47161 - DNA, 3012 bp, Homo sapiens
ggaggtcaaggctgcagtgagccatgattgcaccactgcactccagcctgggtgatagcacaagacactgtctcaaaaacaaacaaacaaacaaacaaaaataaaaaacaacaacaacaggccaggtgcagtggctggtgcctgtaatcccagcgctttgggatgccaaggtaggaggatcacttgagccttagagttcaagactagcctgggcaacatagggagaccccgtctctacaaaaaacaaaaataattttttttaaaaaaaatcagaaatccacaaggacaaagaactcacccccccccatccttcctaccatcctccctaccatcagaataggaagttaaaactatcacttcagacatgctctttgattcagatgaaggtgagacttggctagattatggctttgactcagaaccatgggcaaagttcatggtttgggagtttctgcaggaagcttggggacgttcagctgttttagctgaacttgactctgagttccaagtctatgaaattccaaaactcaaagcaaaacaaaggcaccctcaaggttagggatcatatgctatccatctccaccccctggcacccagcgtggcacccacacttgctggttggctggaggagcgaggcaggccttaactcggttggtgtacagagctgactggtctcagatatggaccacagagggcaaatttgatgaaacaaagacaaagccataaaggaaacaggctttgtgccatttaggaatgcaaattagattttcttcattgctgaagaattctcatactgctaaaccaggaatattcagacacccaccttccacccccagtttaggatatttatgttaacggaagactcagagggagatgactttttgggtcctttgagttggtacaatgcagatacaggtgccatatttaaagcacacctgaaacaggtgggcagcctcccaacacccttcaggccagtgcttctcaaacactgatgcacacgccactcaccaggggagcttgttcacatgcagagtctaatgcggtaggtctgagggagagcctgagattctgcatttcttttttttgtttttttttcttgagacagagtctcgctctgtcatccaggctggagtgcaatggcgtgatctcggctcactgcaacctccgcctcctgggttcaagcaattctccagcctcagcctcccgattagctggaattacaagcacccccaccaccaccacgcccgactaatttttgtaattttagtagagacggggtttcaccatgttagccaggctggcctcgaacgcctgacctcaggtgatccacccaccttggcctcccaaagtgctgggtttacaggcatgagccaccccacccagccgaggttctgcatttctaacaagctcccgggagatggtgatgttgctggcccaaaggccagcacgttgagtggtgaggcatcaaagtccactttggggcggaagccagcccaggtttggcgtatcgcctggacagtagccccgacttgggttaaaagaattaacaaatccctgcccactggtcacatatttgtcattttttctgccttaaaaatatccccgctgggtgtggtggctccagcctgtaatcccaacactttgggagtttgaggcaggaggatcgcttgagtctaggagttggagaccagcctgagcaatatagtgagatcctgcctctacgaaaagtaaaaaaataaaaaattagccaggcatggtggcatgcacctgtagtcccagctactcagggggctgaggtgggaggatcacttgagtctgggagggcaaggctgcagtgagcagtgatcgtgccactgcactgcagggtgggccacagtgcaaaatcttatctaaaaaaaagaaaaaaaagaatccttaaagttgagagtctgaatagttttaattatctaatgcgctcactggatttttaaattgtccttgtcacttctggtgtggtttggcattttgagctttgctgactctgaaatactctctgtaactgggaaggacatatccatgaacactcaccctgcttgctgcataatcaggggtctccttgggctccagggctaggacagacctctgggttgatgatttaactccagggctggttaataaaggcccagctgaatctggagccttgccccatgtctcacagctagtggaagagccaggaagatctgagttgtgttttcctggtatgctgtttgtggtggtggtttatataatatcctgcttccatctcagggcactggtttagttcaggaagcaaactggctccttttcagggaccagagtccaaagagtagccagtgattatctcaaaatgccaggtgagaagatgggaaatgaatgtctggcctcagacatttcaccccaccctgggtgagatctattaatattacactctctcagcaccgcactgaaagcactctcacagggttaacgagaatgtcaagccaggctctaggcagagttatagctaggcactgaccagggtgtgctggtgcactttgacccacttccctgcagttgctcgctaaccgagagtcacgtagcacacggaccacctgctccctcattgttcctatagagagaatctgtgacactggacctttttactaaaaaattgcttaaggtatttttcagatcctgcattccagcagaatgcctgatgtcaacgagtctgcagaaccccagccccaaggtgccaatccagcacagaaatgtgattccttcatctccttgtcccataactgcacgcatcacttctcgaccaatcagcaatccctagctcctcagccccctacccaccaaaattcacttaaaaagtccagtctaaaactccttagggaggcagatttgaggttccctcccacccccttgtttggctgccatatgattactacactgtttctctgctacaactcccaccatttctgtgtattggtctgttactgtccaatgtgcagt

SEQ ID NO: 47162 - DNA, 1797 bp, Homo sapiens
tgagatcaggagttcacgactggcctggccaacacgatgaaaccccgtctctactaaaaatacaaaaatcagccgagcgtggtaccgcatgcctgtagtcccagctactcgagagactaaggcaggacaatcgcttgaacccgggagacagaggttgcagtgagccaagatcgcaccactgcacttcagcctgggcaccagagtgagactctgtctcaaaaaaacaaaaaacaaacagaaatatgccaaaacattaacaatagttatttctgggtgtgagattatgcataatttatatttctattttttctattttacaagttttcttcaatgagcattactcttataatttaaaaacaaatacatacacacaccagaagacagaactttccagaaatccacctaccaaaataagacactatcatactatctcagcttctttttacatggttatctgagaagggacacagtgaaaggagatggccatacttgtactttccccatctcttggcaaaatcagattttaccaacggactttaatctcttgtctaacaaatgtttgttcaacatgacatcatacaactacaaatacgtgtaatcatacttaaacagcaattaagtagaccattattttcctgtgtctcatattatatgataacatcttccatgccagatactcacagcatagtaacatgatcccactggagcctaatgaagaatgttcaatgaacatgccaatattttatctgagctcctttcaaagcatgtaagtagctatttttaaagtgtccacttttcactgtcctaaatgtaaaataatctacagttagaattctaaactttctctagatcctgactcaatttagagagtctgtactagactaaaaattccagaatccattcgtatttttatgtatacatctttcttcccttttcactttctgttctccaagtctatgatgccctcatgggtccctgactcctttttcaagggcattctgaatggaaagatcctcttatacttcaattactcacttatctcaaagtaaatccaattttctattcttttttgatctcttttaagtaacagtgtgattcatttgaccatcaatctttcccctcagtgagaacagtatcaccgactttattttagaaagcactgagtatcattttttaaaatgtcttaacacctctttccccttcccaaagaactgaaggtaaatgaagtagggtgttttatggcaaataggagatttgcctaattccaaaatgttccaatactcctaaaactgtaaattaagaattagtatttgaaagttgacactttcacacctacgacaggccttttggaagctgctctttataaacacatgagattcatcataaccttccagcaggtggcactcatactctgaaaaggggtctgtacagactaacacagctctggttcaaggtggccctaaatcttctgcttcattttacttcagtgacacttcctggttaccagtcataagctccagggaggtcaatgttcccctttgccacccagttgaaatgacagtgaggcagtaagtaaaatgcaaaaaatataggttttagaatcagaggctgagtttgaatcctgtcttactagcagcagttaagacataaggcaagttgcttaactcttctgaatctcatagaagaataagatgtctacttacaaacataaacagtttccacaaagaataaattaatataaatagattaaatacacagcacagtgggccaggcacggtggctcacacctctaatcct

SEQ ID NO: 47163 - DNA, 625 bp, Homo sapiens
aaaattaaaaatgaacctatatacatatatttagaatagtcccacattataaattatacacattcatgtctttggaatagataagcttgaaattaaagttagagtgtttacctatgaagaggtcaccaaaataataaatttttaaaatgctaggctatctgaaaattccagaatattgacagaagaccacatagttcaaatatacatacaacaataatcagggcatgcattttaagttgttgtttttggtgtcaaaggatgtgtttgttctgattacaacacaatctattgcccaatctcctgtttggtcaagacagataactccaaaatgactagccaggattgggaacatagttcagtcaataattaagtaaaattaaaggactagtggagtatgaaatcaaaagactttattttcattaacacagcaaccaaaccatgtactgtgtattttgcagtcagagcagccttgggaagccctatctttttttaatttcatgaaccccaatgtcatgtatctttactacttaccttacattatctttttctcccttttatccaactctccacccctcctccccaccaacccttgtctgctttttacttcctttgttcctttccattc

SEQ ID NO: 47164 - DNA, 871 bp, Homo sapiens
gcaaacatacattctatcaattccacttcataaatttaaaaaagcaaaggtttattcctttatgccaagaggaaagttccaaggattccactgaagtttacaaagcagcctgctacaccaccatggtggcaagagaggaaaagaaagaaagaaggaaaagtgctgctccactccaccctgcctgctgggcactatgtggaagaactgcaagtgacagcccctttcagctgatcctgcctctcaccacagaaacatcaatgctgggatattgatggatatatacactgagaaagaactgagcagaggtgaatgaggaagtggagttaatcagcaacccaagccagactgctgctgccagcagtctgaagaagtcagtatttccctatttctcttccctcctcaataaactgaatgtttatgccccttgccctcccaaattcgtatgttgaaatcctaaaccctaaccaaagtgatgatattaggacatgaggcctctgggaggtgactaggtcacgaggacagagccctcatgaatggaattagttcccttatgtaagagagccgagagaaatggttggctttccaccatgtggagacacagggagaagacagccgtccatctgtgaactaggaagtggacccttaccagacactgaatgggccagacactgaatgggccttgatcctggacttcccagcctccagaattgttagaaataggtgtttataagccaccaagtctatggtattttgttatgacagcccaaacagactaagacacctcctcaacctatgcccttcaccctacttccccctaattttcccttcagccactcttcacttcatttggaaatatctcgatgttgttaga

SEQ ID NO: 47165 - DNA, 1709 bp, Homo sapiens
aggtacgcaattcagaatgtgagaatgagaaacccgggacgccgggcatacaacagggatgggaggactgcatagagaagccaacgggccggccagcccgaagggcggagatcgctgctgggggcggcggtgcccagcgggtcagagccgtggggctggcgaggaccccaggccgcgttcgcccgacaggctccccggcgaggtttcaaaccgccgcccccgcgaggcgctcagccgattggaagttccacaacgaccgtcactacccagggccggagcggcaactccgcagcggagctctgcctgcccgctgcgttcccccaagagactagaccccacaaactcctcctccaccgcggtcccaactcgagtccccccgccgtctccgagcactcggagggcgcccctctgggacgggaccgacgcctcggaccgggctgcgccgcgggagttcgaggtacgcgacggggccgcgcgggggaggcgggcggaacgggcgcccctcggagtcggtgtccggacgcaaccccgcgaccccctccgcctcgcccctcgggcacggcccgactgggatccgacccacccatcccgccaggtcgcgggcagggcgaggacccgagcgagcctactcctcccgcccctgctcttacccatctttccgcctcgccttgtagacgtgaccgtaggtgccgcgtcccactttgcacccttcgtactcaaacaaatcctccacccgctcccgctccgccgccagcttcgccttgaaatcataatccattgtctgcttcccccatagaggcacgggacgcgggggccgccgccgctcagtccctcctcctcctccccccgcgaccgccgctccacttctccaacagccgcctctcgcgcgcgcgcgcgcgccgcccgccgcccgccgctccgcggtccgccttcagcaagggactcctcggcggccacagcagccacctcctccacctcttcctcctcctcctccgcgacggcggcggcggctcccgcaggcacccccagtcccgcctccctccttcatttccttgttttggaacctggtgggccgcgccgtggcttcctcgagctcattagcgaactcactggcccgccccatggtcgcggaggctcctgggaaatgaagtcgcgaaggcctcagcggcctgggcggttttgccggcgtaagaaatacagctcccaggttacctcgggccaccacagcctcgcccccacaaagcatgcgcgcctgcgtaccagggccgcccctccccctcaggtagcgcacggctcccggttcctgtgaaggtagaaagctcgaagttccagtgtgctttctgcggttctcggggagacactggaaagaagtgccttactctagtgggaaggggatacttcactgtaactagccccacgcagagagtatggaaagcattaaatcagcaccttgctgaagggttggctgcagtgactcgggaggcgagggctggtgaggacagttgtaccgcagcttgtttcttttctagggcagtgggtccgcctattgccccgccccccgtcccgctgctcattggcgggggctggagaatgacgtcctcgttggtgcgtgggtatccccaggctttggcttctttcccgctcttgattggtgattggatgtgctcggttcttcctgataggttgatcttttttctttacgatgcaaa

SEQ ID NO: 47166 - DNA, 861 bp, Homo sapiens
attagctagaataaccaagaaaataagagagaaggcctggcacagtggctcactcctgtaatcccagcactttgggaggccaaggtggcagtgagccgagatcacaccactacactgtagcctgggcagaaagggaaaaaaacaggaaaatagaagattcaaataagctcaattagaaatgaaaatggagacattacaactaacaccacagaaatacaaaagatcatttgagactgctatgaacaactctgtgcacacaaactagaaagcctagaggaaatagataaattcctggaaatatacaacactcctagtttgaatgagaaagaaatagaaatcctgaacagaccaataacaagcagtgagattgccaagaaaaaaaaagcccaggccagaaagattcacagccaaattctagcagacattcttggtaccaatcctactgaaccaattccaaaagattgtgaaagaaggaatcttccccaactcattctatgaagccagtatcactctgataccaaagccaggaaaggacattttaaaaaaaagaaatcttatcctatttaaaaaaacaatgaaatctatagacaaatatccctgatgaacatagatgcaaaaatcctcaacaacatatagcaaactaaatctaatagcacatcaaaaagataattctccatgaccaagtgggtttcagcccagggatgcaggaatggttcaatatacacaagtcaatagatgtgattcaccacagaaacagaattaaaaacaaaaaccagactgggcacagtggctcatgcctgtaatcctagaactttgggaggctgaggcaggcagatcacctggaggtcgggagttcaagac

SEQ ID NO: 47167 - DNA, 1144 bp, Homo sapiens
ccagcctgggcaacagagggagacaccatcccaaaaaaaaaaaaaaaaaaaaaaaagaatcaaacttctctctgtaggatgaggatgcagcccagactaaggaagggttgcccgcctccttctgatagggtatgagaagggcttgattgatgcctgtgtcagtttcctcaggctgctgtgacaaattgccacaaactgggtggctttaaacaacaggaactgattagctcacagtcctggaggccagaagtctgaaatcaagatgtctggagggccatgatctctctgaagcccacaggggagaatccttctgtgcagattccaggttctggtgttgcctgaaagcctcggcagtccttgctttatggcagcataactcaaatctctgtctccacatggccgtcttccctctgtatttgtgtaaacaaacttcccttttcttttctttctttttttttttttttttgtgagacggagtttcactcttgttggcccaggctggagtgcagtggcgaaatcccggctcactgcaacccccgcctcccaggttcaagcaattctcctgcctcagcctcctgtgtagctgggattacaggtgcccaccaccagacctggctaatttttgtattcttagtagcgacagggtttcaccatattggccaggcttgtctctaactcctgacctcagatgatccacctgactcggcctcccagagtgctgggattacaggcctgagccactgcaccaggcccaaacttccctcttctcattccacagacactagtcataatggatttagggccctcactagtccagcataacctcattttaacttgagtacatctgcaaatagcctatttcaaaataaaggtcacattcacaggttccaggtaaacataaattttacgggaacagcatttaacccaaagctgtgtccaaactttgactctgttactgaatgaggggccatcctgaaaaagccattcagtgggaattggagggcatctttgatatccatggacaggactttcttattcatatttttctttctttttttttttcagttttttttgtttgtttgttttttaaggtgggtttcactgtgttgcccaagcttgtttctaactcctgggctcaagcaat

SEQ ID NO: 47168 - DNA, 3814 bp, Homo sapiens
tggaatccctgttttattaatttccaggtaaatccttcttaagcacatgggaagatagcactgtaaattttggggggtaaggagaacctccatcaattaatacatcagcttgataaaattcaaagaaaaacatgatcaaataagttcagattatatttaacacattcagtttctagaagtagttttgctgaataaattcccaccagttgagctaatggagcaacggagctgccagtgcttcccggaggctgctgtgctcagccaattcggaggcatggcgagccacacggtgggaggtgggtaaagccggggccctccaaggctgggcgccacgttgcttttctcttctgaaataggaagacaatgcttctggctattgtataaaccagccgaggactgctttcattcgcacatcagccaaggcgtgagcagaattaaagcgccttctaattcgacccctggcaacgtgcgcgtcacggacaaatgtttagttttaacgcctggctgcgttcgccttgggaaaacacacttttaagaatggccaagtacctcagcagtcgcggtgaactgcacaagatcaaaaccaccacgccaacccagcgctggccaccgtccccgctgaaccccgccaacacccctaaggacccacccatgttttctgctaatcattttttttttctaaacagctctgcacagcctttcctcattccgttcccgctctccccacccactctgcgttcgatccgaggtttctagtccccagctggacatcacagcaccaactcccactcaggagccggccagagcccgagccgcagcgcagtgggcagctccccgcgctctccgccaggccctcggccagccagccgccactcggccgcgagtgattgacaggcggcagcagctataggccgtggaggtgggacgatgcgtcacttcctggtcttttggggggagccgggatatataagggcggtgctcacgcagcgctctcgcttacacagtatggccggcgacattagctagcgctcgctctactctctctaacgggaaagcagcggaatacaagagactgaactgtatctgcctctatttccaaaagactcacgttcaactttcgctcacacaaagccgggaaaattttattagtcctttttttaaaaaaagttaatataaaattatagcaaaaaaaaaaaggaacctgaactttagtaacacagctggaacaatccgcagcggcggcggcagcggcgggagaagaggtttaatttagttgattttctgtggttgttggttgttcgctagtctcacggtgatggaagctgcacattttttcgaagggaccgagaagctgctggaggtttggttctcccggcagcagcccgacgcaaaccaaggatctggggatcttcgcactatcccaaggtgggtccccggggcgctcgctgacatccgggcctgggggctgtcgccgccgccgaggcaccagccacgggtggagcccgagttccctcagctttcagttgggggcaagtctgcggcctggggtcgcttcggcggccttggaaggtgcgcggtttgggggagagcggccatgtccacgcgggccggagccggcttctcccgccgtggttgccgcgcctggcattgccctgggggaggggaggaggccggcgcggccgcgtgctcaggtaacgtcccgcgctgggcggcgggcggcgcggcccggggtggttttgcggcccgcgcctcccgacatttccctccgtagtagttggcggcaggggccccaggtgggggtcgggggcgcctgcgcgggttgcctccggcaggtgtggctcggcgggcttagtcaggcgctaattcgggcgtgccggcttcggggaatggagggcgggagcggcgcttgttcttgcctcgggcgcggataggaggggccctcccggccttgtctgaggggctggcgaagaggcctcccacccgcggcggccgcgggcagcatgtggcgttcgggcggcggggattgggcgggagcagttatgtcgcagtggcggggccccaccgctcccctaacatgctctgcgccagagccttttcggggcggctgggcagacggcgcagtccccggggccgccctcgacacggccgctgaggccgctgggggctgctccccaatctcttgaccttgggttgtgtaacctgctacggagccggcggagcggggcgggagaggtgcgggtggagggaggcccgcctgccccaggacataatgcctctaatgccttaagcttgagcaaaggaatctggggcccactcccactgcgggccgtcacgcgagagatacttgggctgaccgcgccgaagaggcgttttagttggtattgctgtggaaatccatgcttatataaaagcccagagatcccgtggatgcttaggccttgttcctggcggcggtcgcaccggtggccaccaatggccttcctaggccctgccaccggatccctggctcctctgcgcacgagtgcggctagggtggcggtgcagcggagtaactggcgtggccagcttcattgagaggcggcgaccaatgggctcctgggccgcactcagagcctggccccagggtgtggaccaatgggcgttttaggagtgttagctgttcttggagctgtcccttgacaaaaagcaactggaaaagggaatccaggcagacacgtgctaccgagactttaaggcacgacgggaaacccggtttctagcagtgtatcttgaacgattccattgtagaaaaaaatactagtcatagctaaaatgtcacacgtctcatttttttcaagcttcgtgtgacacttaaaatgtctatagcgcttactacgtgccaggctcacgtgagattataggaagcggactttggtcatggagaagcttagtatttccttcatttcacagatgagaaagatggtatttgtgatagacgtttggtaaaacgattgtgatcaggataattaacctagaaaatcttggcaagaacctagaaaatcttgggtaagaacagtcctagaaaacgaataacagaagttgtcactttggctttttaaatgtttgagcccttaaataatagtaagtacatgttcttaataaagggaagaagattttgttctccccaagttcttggcggtttggctgtttagagcttcctgagtcaaagtggagagaggaggaagaggctttttacaaagcagcctgctttctttaaatgtttaagaaccctttttactttgtactttaatcagcccaaattgttttactgctccagtgtggcttttaaaatcatggccaaagttaaactttgaaggacaaaatattcccttgtgtagatgatttagtgccatccattttgtggacatgtaacattcattgaacaactattggtagtacactgccacattgtaactgttgtagataaagcaagttaagcaagaactgaaaaatatgttgatttaactaaggtcccgtgataaccttcgttggaacatttttcagtgaccactcaagtggttaggttatttaccaggatgtttaaaaaagcctgaaatagtaggtgttccttgaatcacctaaaatcaacagcctagcaaagagagtatcatggacggagtccggtcggtggggacatggggccagccccagagaccccagggaaggataatcggtcatctagaagaataaagcgtgacatgttttactcaaatgacgtgattaagtgcatagcctctggaataacaagatttgaattcaaacagcatttaatagc

SEQ ID NO: 47169 - DNA, 1788 bp, Homo sapiens
actacaggcatccaccaccatgcccggctaattttttatatttttagtagagacagggtttcaccatgttagccaggatggtcttgatctcctgacctcatgatctgcccgcctcagcctcccaaagtgctgggattacaggcgtgagccaccgtgcccagcctaatttttgtatttttagtagagatggggtttcaccatgttggccaggaaggtctcgatctcttgaccttgtgatccacccgcctcggcctcccaaagtgctggaattacaagtgtgagccatcgctcccggccaagtttcctaattttctaagtgtcagtttcccaaagtgtaaaatggaagttagactaatgagggctgatatttagcttgtatgcactgattaaaaacataccagttgttaaattagagacatttttcccgtatcagccagtaacaagcaaccaccgcaagcctttagctcactccaggcctccccatgatccaactttcccaggaccctaccccagcatggctgagtcgttgtgccctgctagttaattgttaaataatcttgataattcattaaatgtcattcttgataatagttatcttttgagactatcatgaggctgataacctatatgtcacacttggtagtttacttttaaagtaaactggcttccaaattaacttgccttggggaggtcttgtgactcatggcaacatcctatccctgagtaaagaatctgtgcgctcttcaaattgttgacatactgattaatgcataacttactgacaatggaaaggacactgacttctgatcatgaagttttactgattgtcttgcacacagacattttatcctgcatgttgcaatctgtagccaatgactgtaacttctgtactgtctgtacgctccaataactttggtataaggagtactcctcccttctccttccctccctctccttctcctcccttctcctaaaaaaggccgtccttttaaaagcctgttccagtaacttgtaacagactccagaacactcctaactctggttggtgtgtcttcccagttcaatcctcacatttggcttccaataaatgtttttcaaattatttctgcctcagcagccttagtttcagtagacaaggcttaaagtgggttcagttaaagcaaactaataacacttgaccctttccaacttttcttcctctcagccatgggtccttaagccatcttttttggatccagagccaaattatatttctatgcagccaccatggttctagcccttatctagctttcaaagatttttccttgatcgccccaagcaaatttcctctgctctgttcagtttaaaagtgtttctattctttttttaaacaaaaaacaaaaggaaaaaaacagctttatcaagatataattcatataccataaaaatcaccctttaaaaatatacagttggtttttttttttttttttggtacattaacagaactgtgcaaccattgccattaatttcagaacattttcatcacccaaaaagaaactcctggctgctctgcctatggagtagcccttctttattcctttactttcttaataaacttgctttcacttttctcaatggactctccccaacttctttcttgtgtgaggtccaacaaccctctcttggggtctggatcaggacccctttccagtaacatcttcctggcaaaccatgaagcaactaaactgaggagactcccaacccaaaggaaatagaccgaagcaccacaattggctgactttggaatca

SEQ ID NO: 47170 - DNA, 2058 bp, Homo sapiens
tggcgcatgcctataatcccagctactcgggaggctgaggcaggagaatcgcttgaacccgggaggtggaggctgcagtgagccgagattgcaccattgcactccagcctgggtaacaagagcaaaactccatctccaaataaataaataaataaaaatccaaaactcacgatcttaaccactagatcacgctatcgcaagtacgaagaccgtttctttcacaatcacaaacatctatgggatacttctgaaaattctgttcaaacttctcttgcccaggtctctgtgttcctataacaatgtgtatctcttacagcacttgcttggatccatttatgtacctctcacagatcttatgctcctgcaggcctgaaacttaagcccactttctatttttcatagctcctggtgcagtgctttttactgtgtaggcgctcattagtattaaactgaatgtgcctttaacttggcttggggtacgttgaattgaggatgagcgctcacacaatattaagaatttctttccaagaaatgtgctcgggtcaaacacaaggcctttctgtccatgatccgcctgaaaccatggtttccttgttttcgcctttatcccttctgccttgccagtcctccccgccagcggggccgagagcccggcgactcttgcgtgaccgagcgggctccgctgcctacggcagcccacccccagcccctgctctgaggcaccgagaaacgaggaggcccgtggcgagtctccacgtgggtaccggcgctctcggcgcccgtagccacccgcccgccggaagccgacatctcgagttctggcagaagcaatttgcgcggcgaggagcggagcggcaggaacccaataagctgcttcgcctcggagctgaagcccgtactcaagatggcggctccgggcgggcgtggccagtgactagaaggcgaggcgccgcgggaccatggcggcggcggcggacgagcggagtccagaggacggagaagacgaggaagaggaggtagtaagcgctacgccaaaagcctgcaccgcagtggcggtgatgcctgtgctggctgtgtgtggggaagggagttggggagctgcgggccggagggaggccccactgctcctcaccggcttcttgctcctgggcgcgaggagccgggcagcttgggaccttagccctaatcgtcaccccgtacttgggatgggaagtaccgggaagttaccttaggtagcgtagtttcctcttgctgaaaacagggtccggttttcacaaatgtgggaaatttggcttcttttgctaattgctccctcttggccgctcgcgtgctagcatgttaacccctctttctttcaccaggagcagttggttctggtggaattatcaggaattattgattcagacttcctctcaaaatgtgaaaataaatgcaaggttttggtgagttttctagacttggggggattgttctagagtgtcttaaatgtaaaacaagaatcaatggtgaaatacctatccgcaagtattgatatatttatttcaccttacaaagtagtgaactctaaggataagaagtatactaagtataattaattaatatgtaattaagtataatgtagaagtacagcggggactatgggagcagataggagaaaatggctaactttgcttgcctgtttgaatgtgtggctgaagagaaagttacagatttggaggaagtaacattgtgatatggaaccgtacatatattcctgtattctcagcactttgggaggcagaggtgggaggatcacttgagcccaggaattggagaccatcctaggcaacataacgagaccccttctctaaaataataataaaaaaaaatggccaggcgcggtggctcacgcctgtaatcccaatactgggaggccgaggcgggtagatcacgagcccaggagttcgagaccagcctggccaacatggtgtaaccccgtctctactgaaatacaaaaattagccaggcatggtggtgggcgcctgtaatcccagctactcgggaggccgagacaggaga

SEQ ID NO: 47171 - DNA, 1834 bp, Homo sapiens
aaactggggaaaaatcacgaacagcagtacattttctgcgcatcttttatgtactaggcaactgtggtagtcataaattctgtcacacagatcgcatagttgtcaatagtgcccctttcacatcaatgtttttagtgcttatgtgagtacctaccgtgcaatcaatcaacctttctagcatcctgggattccttgaagaataaaatctggtttctgaatacctgactccaggtatgcacactagcgcgtacatcaaactgcgagggtctatgttattttattttatttttattttatttttgagacgaagtctcgctctgtcacccaggctggagtgcagtggcgcgatctccgctcactgcaacctccgcctcccgggttcaagcagttctccctgcctcagcctcccgagtagctggggttagaggcgcccgccaccacgcccggctaatttttgtatttttagtagagacggggtttcgccatgttggccaggctggtctcgaactcctgttatcaggtaatccgcccgcctgggcctcccaaaatcctgggattacaggcgtgagccaccacgcccggccagtgttacttaaaagtattacctcgcacctgtaactccaggaaagagccggggcaaaaatccgtaaccaagacaacagggcgcgattccaatcaagatggccgccagcgcctctagacgccctctacgaggccgtccccggaagtggcgttacgcgcagcttccggttccgcctgttccggcgcacgtaatcgccgagggcacgtgcatgccccctggttaagagttgcaggtagcggtagcgatggacactctggatcgagtagtgtaagtgcgctgggtctcagccccggggagcgttggggtgaaagggtcccgtgatgagggtggtactgtctcggcctctcactcttcctggttacccctctaattacctgggtgggggccgatcgatcaccagcccgggtcctcctcagcgcgagctgcttgccaggagacagtggggaagctctcaagtgggagccgtgggatgggagggatgtgggattgaagcgttggccgcttttatcctagccagttgaaaaacgtctgacttccgaagtatgagacagatggtatagtggggttaggagcacagccctcggaatccgacagatctgagtgacagtctggcgcgtccacttaaagctttgtgactttgggtcattaaatatctctaaatcttagcttattctgtaaaatagcgctcaccatagtcatacttcatagagctgtgagggttagtttcgagaatgtatgtagagcctttgctgcagcacgtagaaatgttcattagttttttcttttccttccaactttgtacactcctctgagttatccttgaatgatacctgttttaaatttgttcaagaatatttgggctaaacagccctgctgttacttgctgtgattttcttgctatttacctaagttaacatgtatccaaaacgacagttttagtcattcagagattttgcacacctgctatgcctctagctgtttggactacaaagagtagtttactaggtattgggactagttcacacgttaattgggagcaggcagctaataaaacatgttaattgctatttgcatttgttgctgtttaatgagatacaaaagatagaataatttgtatctttatcaaccagtaaatgatcagaagctttatatgtgacattatatctggaggagtattttaaaaatctacatgggaaacttaagtgtatgtatggtctctttttcttcccaaagtgtccatgggactggacg

SEQ ID NO: 47172 - DNA, 1042 bp, Homo sapiens
agaaagtgggttccaaacagggagaaaactctggctctagtttcatacaagctggggcttgtatgaaagaaggcagataagggagaaatggcaaagtatgtagaactcagcagttagggcatttgccaagcaaagatcaaagccccagagctgtaagtgctttactggattgggattgattcctcaaactgaaaaccaggcttctgagggctcagacagacacagagtggcagatgttggctccgtgaggcgttgccctctcacccagctggaacccagggctgcacaggcaccatctgtggacactagatcaccgagtaggagggggaacctgcaaccagagttagagccaagctaaagttgaacttgtgttctggtaactccctctgtccctctcacacactgtggatgagttacgaaagaggttcctgaaaggcaagcttatttaatttctgcatttgaaatagattttgaagattcacatttatcagcttgagcaatttattttcccactctcctacctgatttccccagagtcacttatctgacaaagcaaatagcatagtgacttgactgattagagacatcagtttagatgacaccacctgcaacagcacctccggctcagcctttcggaggccgctcggtttatggcactgggagagcgtgagaattctttactgtccccatgaggccccatttcatccatctggctccccagtcaaagctagtgaatgccacaaatatgttttgaattttacccccagcaccttcctccattaagggtgaccttggggaaaggttagacagaatcttgaaaaatcaatcaaagctcaagtggcatgagagctcaaaagcagcatcaccatacgggcaggagagtatgtgggagtggcagacagggcagtgttgtgggaaggagtgtggcattaaatgaaaccgacacaaccctcgcctgctactctgagagctcagctgagatttaaaaggacaattaaaagatacagtgcataaaaccatgggcaacaccaattagtaatat

SEQ ID NO: 47173 - DNA, 1078 bp, Homo sapiens
ttggtgtgccaaatattcataaggaaattgtatacgaatgcaagagaatggaactgaagtaataaaataagggctctgatccttcagatgacttatttaagaagccaggtggcataacgaatcttacatattataattagtactgagaggtgaatgccaaaacataaaacaaacacaatcgagacaatgttagtgtgactgtgacgctgtgtcggtgagttgaggctaacgatccagtgtggctctcctgaaggcccaccgcgcccgcacctaggagacgcgccccttctgctcatgctttgaggcggggtgacccacacatctgtgcccctctctgagcaggaggaggccccgtcgcagacgcgcgcgcagacagcgtctgccgcgggcacctggggccgcgcgccgcggggcgccccgcctccgctctccgaggcccaatcatctggaggctgtgggggcacgtcccgctcccggccacgcccccagccggcggggcggggggtgcttttaagaaccggcggctggcagtgggctcagtcgggggtgcggggctgtgacctagaggcttcagtgtcgatccccgaggtgttcgcgcgcgccagctgtcctcgcggccgcctgcgcgctggccgcctgcgcgctgccagcccgcccgcccgccaggggctccgccgccctcgcctcggcctcgttagcccgccaggagccccgcagctcctccgggagcccgctggtaactcgcgtccctcgcgcttctccggcgcctgaggggcccgcctcgggccatggtgctctcccaggaggagccggactccgcgcggggcacgagcgaggcgcagccgctcggccccgcgcccacgggggccgctccgccgcccggcccgggaccctcggacagccccgaggcggctgtcgagaaggtggaggtggagctggcggggccggcgaccgcggagccccatgagccccccgaaccccccgagggcggctggggctggctggtgatgctggcggccatgtggtgcaacgggtcggtgttcggcatccagaacgcttgcggggtgctcttcgtgtc

SEQ ID NO: 47174 - DNA, 686 bp, Homo sapiens
ttatctaggagagctactataatactattatagaataagtgaaattaagttatctgactgggactggggtggaatattgcacagtttattgagaaatatggactgtttttgcacattcataatggacatttgaggtttgttaggggaggaggtgtcatctttatggcactttctggctgggaagggagtcagtcctaattgagataataactagccacctggccacacacaagtgtgttttgccttagttacctgtcacacactgagcagtgagactcaagagagtgtcaaagtacttttcaatgcataaagcactacagatctgtccacactgttgtgagtgagcaggttggcacggtgcctgtgtgcgggcgtgtgtgttgactcacgtgctgtcctgtgatctctcaggactcaggtcctgaattgctctgttgtgactgaagcccagctgaaggtgctggaagtgcagtgaccctggaggaagaaccagtaacagcagagggtggatgaaagggaattgatagttgtgtaagaatagatatctgccgttttttgtaagccaagacacctttacccttccagtaattgtttcatcttttaatatcatttggcttcatttacagaatctgtattaaagcaaaagtcagcatgtaaggtggtattttgaccacatttgtctgctg

SEQ ID NO: 47175 - DNA, 986 bp, Homo sapiens
gcctagaagtgattcttgagcctgatttgaaggtggtgctagctgtggattagtagagggagaagggcatctcagagagaggattgccaacatgccttaattttatcagattctagagttccttatgattacctcagcatgttgctagactagcattattatccaaaattttaattattaaccaactttaatcttactttctaacaaattgtttgcttttactactgatagccttttcaaaaaactttaactagttttattccttaccataattgtttcaaagaacataatgatatgatcctttatcttcctaagaaatgtgcaattatttggttaaactgtaagattatttaatccattattcttttgacacatgcatggccttacagcttacaaactgggatcactaaaggaatacacttaatttaagtctttctgtagtcagaatatgatttcttgttgtcttgcacaatactgagaacagtgcagtacagggcgaaggttggtctacagcccttaggccagcaaaaacaggcacaactgcacctctgtgcaaatgttcctgacataaccttggggaaaaaatataaaatgcggccttttcttttactaccttgtttggtaagtacctggaaaaactccatgaaataattagatttcatagttaattctaacttttttaaaaaatgtttcattgagactaggtttttggtttgttaattgaatcactgttgattttacccttcctggcaccaacctttatttctgagctgtggagagcacagttctcactcagtgctgtgtgcgtcacctgaaatccacagaaagaggtggctgaacaaaatcactgatgaccttaatggttatttttcacatattcagattaaattaaaatacgtttagtgctacatgcttgacttactgagtttttccctctattttggttaattttttttttttttggttaacttttacttgtagaaaat

SEQ ID NO: 47176 - DNA, 582 bp, Homo sapiens
gaaacaaaattattagaggagtgaaattagtttctgtcctaaccctggtcaactcatagggttcatttcccaatcaggaggttgctttgccattttgacatgatccattttctcagagttgccaagagcaattgcaactggctttgttgtctttctttcatggatctatttggagctcagggacaaggttgttatgcggcagattgtccctgacaatgcaaggctcacagtagtatccttataaaccaaagttcactgtacactgggccaggaatgggctgctgaaggtgacctctccttcatgttggttggtttatctttgttggttggttgtgtttatctctgttcactataaggttctgacagaagcaaagtcttggtccccgttacatgtccccagcctggtggatgatggttacagagtgctggaaacttttttatttatttaaaatggagttatgtaactgaagagttgccctatctcagtcagcactgcaaccaattaaaatagaaaggcttaaaatattaattttgtttttagcctagagtcttaaatactagggtttaaaagtttcatttact

SEQ ID NO: 47177 - DNA, 656 bp, Homo sapiens
cctgacttaactgtattttatgaggattttataaatgtaaattaagaagacaatacacactctcattttcctaattagaaagactatgcattcacaatccagtacactggatttgctctggtaactaatgataacacttttctacgttaacatgagttatatttggcagagagaatggaagcttgctaatcagaagttacattagggtgagattaaacatcactctaataataacttctgatgtaacttaatgtggtttgagatgtgtaagattgtagaggcattgcacaatgcttgataaaagttgcattttgcttttgttcttccaccagtttattttagccttaaagttatagctacaacaaattgaaccctgtagttattactgaaagagagtgtggatattttaagtatctcctagtataatatgacattgttcatgtggacttattttaatgtttatttgaaaattaattttttaattattttgtatattttgagttagaaaaacacactttatcttagacaccaaagccaaattattccaagtgtatgctatacaccgcagtgcagctctgcttctctcccaacctaccctggggccatttttggcacaatagttgttcaaatgtagatcactatgctgaatgctcatg

SEQ ID NO: 47178 - DNA, 1311 bp, Homo sapiens
taattcgatgactgagcttgggcagattgttaattattttctatgacttaatctttctatctgtacaacggggataacgtggaatttggagtgttgtgagggttgagataatatacgtgataacttacacaatgacgttcaacaaatacttgtggagtgaaagatgcgcgattcattgacagatctcagggatttcagaaagctgtataaggaccagctcttcaggctcccttcgctccccaggagaccggggagccggcgcgaggcgctacagtgtaattcttggccccttttcctcataatggtttggccgcatttttacctcttgatttccctggtcccaggctgcaacttcagctcgctccgccatggggcgcacgtccgccagcctctgtgagctcagctaagtatgatgcctaggctagagagctacgtccggtctcctaggcaaccatatcaacttccggcttgaggcacgatagcggttggcgagaggccacatttccgccacgtgacccgcgcatgcgcctgcttgctggagagcgagcgtcttttgccacgaacacctgcggcgtgccgaagttcctcttctctgccccggttccgggcggtccgctgggaggtggcgcccggagggacacccgtgcctggggtcggggccagtgctcttctcggagctccagaagttctgctgagaagcgcggcggcagcaagacgacttctccggagccgccgagctggagttagaggtggagctccgtggggccgggcccccggctgcggggcagcggctcctgcaggcggaggccccggcggagaatgagccggagccggaggtggtggtggtctcctggcagagcggtgggaccgggagcaagctgcggtggttcaccaccttgatgctgtgtgcctccttcctggggctggtgagagccggggctgcaacactcccaggccggggcgttcgagtcttgccttcgccacttgcaaactgaccttgggcgcgttacctaatctgactgggcctcagtttcatcatctagaaaatgggcacaattctaatcttggaggaaatagattttctgaatacgtctttcagctccagcaagctttttttttttttttttttgacggagtctcgctctgttgcccaggctggagtgcagtggtgcgatctcggctcactgcaacctctgcccccagggttcaagcgattctcctgcgtcagcctcccgagtagctgggattacaggcgcctgccactaagcccggctaatttttgtatttttagtagagacggggcttcgccat

SEQ ID NO: 47179 - DNA, 420 bp, Homo sapiens
tccaataaacctcttttgtaaattacctaatctcaggtctgtctttatcaacagcatgaaaacagactaatagaatgatataggaagttcttagtcttactgaagcaagggaaagtgacattttgcttctacaccctccagaattcataagctccagaaggaaagaggacccaagggaaaaacgtgattgcaaaatgtgttcttgtcctctgcccaagtgattaacctttgctccagtggttttcaaacctggctgctgttagaatcacctggcagtgtttaaaaatgactgatgcccagcattttaacttaaataccaatttggtctggagtggagcctgagtatggatatttaaaaaagtaactcctcctccccaatcccccgtaattgtaatgtgcagccaagattgagaaccactg

SEQ ID NO: 47180 - DNA, 495 bp, Homo sapiens
acaccagttttgtatctcacactataattcaagagtgactatatcttcctgtaagatcagactgcttgtgattctgggcccatggaacaaaactgtacctttacaagttgctcctgttgacgttccaactcccggatttcttggttgaggatgactgcaacatgctgaggttggctccgacatttactacagatgccatgctgagttaggtcatcacacacaggacagtgtaaggtagtaaaatattgtgaaatagtgcctttccgcccttcaggttcacttcgcgaggagctggtagctttatggatctataaaaacatccattcagaagtaagcctgagtcagcttcacagcaaagctgctattttcatgctaattacaggtttactcaggcattcattcattcgttcattcactcattcaacaaatgttgagtagctactatgtgccaggcactgttccagacactggagctacagaaatgaatgaagtcct

SEQ ID NO: 47181 - DNA, 420 bp, Homo sapiens
tgaacagataaatttatacagagaatgcatcccaaagctttttgaaaatattggcttgtttagaactcagaaaactttaaaaaagaaaaaacaaaccaaaaaaaggtactgaaatggtggctggctcccaaggtagaaacctagttaatgaataatacaatggaactttatacagttctccattatttcagcaccacagaaaaaccaacctcaagtacaactgggaagttagttagaggctaaacaaatatttgtctttcactggcccctcaatcttgagaacagaacactgcttttcctatcccttgtctgatgaaaatagtgatggtggtgggaagtgagtataaaatcttcccaagagtaactctgctttcaagggtcataggaagggattcgctttcttcctacctttacttttat

SEQ ID NO: 47182 - DNA, 1303 bp, Homo sapiens
gtatctttggccctctcaggtggcagatcaagtgtaagagaatgagagcataaggtccttgcagtagctactctagcttacaggtaccaaatagcaaccaatatctccagtctcataggcatagcttcctgagcttcagcaacagatttgcttagttgcaagagttatcacactcagggaagtccaaagctgttaacggtataagtaccagtatttacaattcattcacagtcctcctctggtccttatgcaattcagtaatcatgagtcattattaccataagcaatggtgctcggttatacaactgatattctaccttatcaagcttccaagtgaacaaagctaggaagttaagccaaggccaaaactgtccgaagagaagaaaggttaatgttacaacaaataaagagattcaatttagaatggcactaagctaaacaactattaatatatttcactgaatccaagatgctagtgattatgacataattaatttttgtactaagaaaagtgctgttaagtaaatatggtgcactactgattgtaagacatatcctaattactgagatgcacaaggagggaaaatatacttcttagaattgatgaaatacagaataatccttctctaaatttttcactaaaatatttaagacatacagtaaattttcacttaactttgttgataggttcttggaaacctaaactttaagaaaaactttgtagcagatctccaaatgacattttgttcaacttcattttattataacaatgagaaaaaaacggtttcattatatgtgatttcacttaaagtcacaatttccaagaacctgtcatggacattaagcaaggacttactgtgtaactcttttctctaccttggggacacggtctgctccaacagaaaccagtcccctactaaaaattttctaagacatgtaatacctctgttcatctactctaaaaacaaccaatatcaacataattgacgcagcatagctgtcttcatcctggcatgttaaaaagcatccaaaatctaaataaatgaattagctcccatcactgattaaatcactaaaagtcctaagggcctttacaacctggaggcttgcatgcaatgttctggtaaaataaataaataaataacaaaaatttaaaaaaaaaaactgtttcaggttatccataaatatgttagttcccatataccagcgaactgtgcaaggagaaaagtggaaaaaaccttaaacctcaatccagtagaggtacactaagtgaatgttttcatctaagtgggttgtatacgat

SEQ ID NO: 47183 - DNA, 4101 bp, Homo sapiens
tatttaaaagggcagaaaacctatcttatagaacacttcatcgcctcgatttcccagcctccaaagtttcaagtgttacactttcaacacgttaaaagcactcaaattccccatctttcaaggttcatatcaaaatcatattcactagtttaaataggaatatgctaccaaatctcacaacattgacattttaacaaagagaattcacattaaaagataactgctttaaaatgagtgcttgtgtttgggaaagcgctattatcttggtagtccacagaaactgactgtagtaataagatgaatggtgatgagggcaaggagcatcaagtgggaaatgctatctaaaatcccatagggcaattcatagctagagggaagaacaacctttcctaagatgcattatttcctagaactccattatttcatggaagcagttcaaagcatgcaaaaaagcaaaaccattttaaaacacctagtaaactgggcctctatcttttttatattatcataagccccaggagtttttgagaacgtaccttctgtcacggctgtctccccttcccatcccttcttcaacatagttgtgtttaaaaaatatatacctgtacttaaaacgcaatcctacagcccagcctaggagcatttcaaaatgtctgtgctgctgagtctggctgtggttcctaataaattcaccccattaagtgtgatgttttaggttgggcaacataaacacgcatttcctacttccatggatgcacatttcctgaaagcactgcacctaaggatgctgccctgtcccccgacgctcaggcactaaactctaaggagtcacgacctgcactcacagcagagccacacggtcaccccagtgagaaagattatctggccccaagcgccactctctccggcccactgcatctccggaactggcagaggagagcgagggtgagaagagaccatggggagcgactgacaacaaggctgacacttccccgtttccagaaagcggcacttgggggacacaagggatgtcccactagcgaccgacctcagagcaggccctacgaacccgtccaccgatggacatggcgcggccacctggcccgccgtccggggcgcccgcggctttcgctctcccggcccgcgccctggagtgcggctcccgctcccggccgccacacgcagtctaaacacgcggcgctcgccacctccctgcccgggggtgggggcgccgcgcagcgctcgcgcggacccacatttttgcggctcttgtcacgcacgagagaaaaggcgaggagggcggaggggagggaagacgcggcagcgatccacggagacggccggcgccggtggcgtgtgcgcgtgtgcgcggcggggagggcggccccggcgccccgccgactcccgctcccgccccgcgcccggcgcccgcttacctgccggggtcgctccgaagactcgcaccaccggcaccttcttgacaggggcctgggtgaggggggattggcaggtatccagcccctgcagcgggctggccatgtagtagtctgcagtcactatccttactgaaaacatgttcgccgccgccgccactgcctcccttcactggcgacccggcagcggcagcagcagcggcggcggctccctccgcagcggcggcggcgccccctccccttctcggcacggccccctcccctcacacagaggcacctcgaggagcggcgggcggggcggtgtaggcgctgctgccgccgcctcctcaggagcacccggcaaggggccgcaggagagaagccctcgagctttcgtcggtgctggtgctgccgccactgccgccaccgccgggaatcacacgggctcctcggtcccaggctgcagctcttgttgccatgatgatgatgtcacggacgcaaccactggggggaggggagaggggggtgtgtgtggcgaagggaggctgcgagtagtgcgggggagggggctcggcgggaaaaggagcgagagggcgggcgcccgggcgggacacggagggcgggggccgagaaggggctttctccccctccccgggcacgcggcgagggaggcggccggcggccggcagcgcccgcgcgggatcgatgactcggctggcgggcacggtcacctgggtgaggggcagcggaaggggcggcggagcaccgatctcatggatgggctccgaggggcttgcgggaggggggcgccagtgttcggggccgttttggcggctatgcaggattggcaggagctgcgatgctcacacttgcctcgccgaccgccatttcacatccagcagaggaggcgggggcagccgctgagacggtttttcacaaggtaagaaaatccgcccgcgtgaggagggaggcgaggcgcagatctcgtgccgctgcggcctcgcgggagggaagggcgggcgggcggcggaacgggcggggccgggtgcggacgcagccggcccttctcaggtaacgccgcggctccgcgcgtggcccgggggcggtgcgaagggtgggggcgcgcgggcgcgggcttcggcctataaaagggccgccctggcgttcccccttcccgaacgtgccgcgcgagccgcggtgccccctcctctttgctgctgcagtgtctgcgccgggccatttaatgagatttattcacgcacggctcttctcagctttgcgaggggttggcagatccagtgcacagggatttcccactaccgtgtttttctcccgcccccttccttccctctcgtcctaatacatccttcgttggtttcctcggccccgcaggctgcgtcccgggcacgcgcaagtacatgtaaggacttgtcagctgccggtgacctccctcctccctcgtcgctcctcccccagcggaatgtaggattaacagtctttccgagaaaattttggccaaagaaaaaggcctgtgaaagtcaccgcgttagacgtggcctcctcgtgtttttcactaacacgttatggaaggttttactacccgaaggcataaaagcaccaccgtggggaagggccgttttgaataaacaactttattcaaaaatcgagagggggtgaagcgatgcagttagggaatttttgttttaaagagtagtaacatgcagctggcttggctattaaattggaaacaaggggttcctctctgacttggccactgatattgggcgtgaccttggacaaataattttgtttctttgggctcagtttctacatatgtaaaacgggaaggtttctcttaaaaactaatcctgaagggtttcttctcaacaaaaagatgcaagctgtaggaggcagaaagcgtgggttcaagttcgaaatttgcccctgaattaggacccttgacacatttctaacccatccaagtagagatcgttcttttacatttgtgtgttatacaggtgcattttagtggttaccaggttgccacgtatttgaagtggtgtgagagctactcgtttggaaccgttgtggattttcaaataggaaaatcaaaaggcccaaagagacagctcactggtaagaagctgtctataaattccctaacatataaatgctataataagaacttacgctccgagggatttgagactgattactacagtaaattagcttgtagtttttaacctcagagcatgattataaacatacgtggcaagatttctactaatatgctggaaattagctaatatttttaagaggcaaaatctcttgatctgaaattttagaaggctatagaagtgattttaaaatatgactaccatgctaaaatgtattttttataaaataaatattttgtacacgccgaatgtcagatacacaatatcagtgattctcagtgttccatgacacctagaattctttaagtgttgatattttggctcttactgaattatattttgggggatggggcctgggaatctgtattgttagcaacactacttgccaccccgtgattcttaagcaaaataaaattgagaatccttgtactatattataatcagtgtatccataacttttaaattataatattcctaactagaaaatggtaaaagcatcaaattaacagatt

SEQ ID NO: 47184 - DNA, 1145 bp, Homo sapiens
acccttggcccatagcccagacaatacagcatgctgaaaattggtctggtcccagcctcacgtaaacctgtttctcctctcctgagaagaatgcagcttttgaccactgcccagtgtgagagcccggcctcactgttaacacctcagtgaaggcaagaacaagtggtttgcagtggagggcatcgcctggaaggtggcaaaggccaggcaggtacctgcggcccagctgctgctcgacgatgaggctggcagccaagtctagcgccagccttttcaaaagcagcccttttgataacactgattacatttccctcaccggagccttgggttaattgagcaacagccaacttctctgggtaacaaagaggaggggaaagtaatccaaacacaggttttattataaaaaccagggagtgagagaagtgtgtttattctgtaagataacacacctgctcggtgccggggaggctcatttccatcagttgccatggcaaactcgttatacttcaaggccatgtggctttgtttccttttgggatctggtccttgtcctaccttttctaacaactccaacacaatgacatggaagcctgcgacagcataattgatttctccttccctctatcaacggttcacatttgttcagcacaggactgagtctgccttctcctttgaactccttgctaagcatgaaggcatgcttcagagagccaccctcattaacattccaggtccctcttccctgtcagcaataaacaagccctgcatcaatggcctcctgccttccacttttacaaatgagtggctcagttccatgttttgctgctgatccaggtgcccaggcgcatacaacgcgagcctaagaagcacgcgggagggactaaaaatagaacagcagttttggatgcataccagagcagctacttcatctcaacttgctttgcacgctaagcctaatgggatccatcaggcatgagttctctcgcgcgctagctccctccctctcccctctctccccagctgccgatttccatcagccccttcctggtgaagggagcaaagggaggtcaggcaagggacaagaaatgtgtgcccttatggttttcgtttacaagccctgggagatctgggggctgcagttactc

SEQ ID NO: 47185 - DNA, 973 bp, Homo sapiens
aaaaaccagaaagctttctagattcatcaaataaatgtctgcagtctggaaatcagaacatccgggttctagtcctaggatgaccttagacaagccacggctgctctgggccctgctttccttgtgtataaaacaaagctgcagggatatatgatttctagggtctctttctagactgaaagttccataacagaaataaatgatctgagaatttaattgattttcgtgctttctttcttcctttccccccgacctttggttgttgttgtttatttggttagtaggctaaaatagaactatttttcttgaaaaatagtgcataattctctgggatgagaggcatttcttctctgtggtattttcccacagtgtaaccttccttctcttttcatttgccactaggaggtgggtctcactgattcttcctggttcattaagaagaaacagaaagatcttgtgttttcagagactctttctggatcatttcccatgatcataggactttgcaatccatttggcaaaggtggtggtgacaatggggtgtttggcaaagtggatgaggtagttgacgaagcagctggggtaaagaaaaatgctcttggcaaaacatcatgaaactagggtggaatgttcaaaatggagaacttgcatcccttgctgagatgactccgagaaaaattctgtctttaaagaggtgatttatttaacaggaaacaaagaaaaaggtatcaacagtaataatttttctgagcactgagctgagaaatagctagtctaatactttgattgtagccatgtactgagacctctttgaacaatctagaagttaaaatagatttgaaaccagtcactaaaatttaaaattacatttaaaattctaaattagtcatcaaatattaggtaagaacctaaccttgcattccacaaacccacccctcaaatcggtgtaagtctgaataaagcctttgggcta

SEQ ID NO: 47186 - DNA, 1122 bp, Homo sapiens
tctggctaactcataaaagtagcctgaagtgattgataggagagtgtttgtagtcatttccatttgctgccacatcccttacattatctacttgctaagcactgagaggcccagaatggacacatcaaactgtcaggaggaacatatgggacactggcacctgcaatggtttttttaaaagcagagaatgcagagcagtcacagactccacttcaaagccagggtgtgtggaggtctccggggaagagctctgcacaacaggtttcctgggggccagagggcctctcggggaggaacagaaaaaaaccagccaggagtgctaccgaccagcctcagccagaatgctgtcagaacaaggccccaaacatggcctggcctcagtgatctggggatgaacggtgtcacaagggaaccacctgaagggtgggcagaggcccccgtggaggagccacatactcttcctctctcagcagccgcagcaggatgttttttttattcttgggccagctgtagacatgagtgttctgaagccaggtgggcacatgctcctatgggaggcagaatgacaggagcaaaggtcattagagaaaaacctggatgccagatcccaggctcagttcccaaacatttctggctttccctacatgggcgtttcctaccaaactatcctgggagttgtgctgttttgcttttggaaaggtttagcatgtgaaatgttcttggcttcgggtacaagctgtatatctcattataaaaaccacatgtgcacagcattttctgtcagtctcccagactacctaccctttgcatttcaacttgcttttcaccaccctcacataaaaggggtaggacagaggtcacacagagtgatgtgaattcccctgtgacttcagaagaagtatgccagggccgtaggcttaaatcaattcattactctttcactccagccccaggtctggcctgcagtagaaggagcccatcagacctcagtgatcaggcagaggcagaaactgttagccagggatcctgggggtgcagtgtcagactgccctcatggagtggatgttctggtggggagaggcagataataagtaaatggatagtgtgttcaacagtgatgta

SEQ ID NO: 47187 - DNA, 3459 bp, Homo sapiens
ttattggatcagaaaactggaaactattttaaatgtccaacaataaagaataggttcataacaatttggtagatgcgtctgatgaaatacaatgaagcagttttaaatgattctggaataagtactcaatgtcactgaaaactattttaattttagattaaaaatatatgcaaagaaaaaaacactgaaaattgatatgtcaaaaccctaataaggaattctatttgggtggcagaaatatgaaaactttttcttttcttttttgaacttctgggcatattttaattttgggagtgaccaaatattataatgatcagaaaaattatcttttttttttttttttttgagatggagtctcactgtgtcatcgcccaggtgcagtctcggctcactgtaacctctgcctcccaggttcaggcaattcttgtgcctcagtctcccgagtagctgggattacaggcgcccgccacaacaactggctaattctttttgtatttttagcagagacagtgtttcaccatgttggccaggctagtctcaaacttctgatctcaagtgatccacccaccttggcctcccaaagtgctgggattacaaagtggggtgagccaccgtgcctggtgaaaacttacctttaaatacagataacagaatgttaaaaagtagtttatggtattattctcacaaattactccttttaaacctggcaatcactgagaaatacagccttgaccttgccaacattcagttctcagtgattcatacttaagggaatccaccaccacacccaccctatgactgggcgcttagagcaggggtggcatccatgcactcccactctgttgacttcccagcatttatacaccacgtcccagttttaggcatcagaggctctttctcccgctccagcccaaggccccattctccttacaccctcctgcttccccagcccctgccctcattcctgatctcacactcattcttacctatttcttccaagcatcttctaagttacatttctctatctcctctttgtttttttcttttttgagttatgaattactgtgttgctctcttcactttaggaagctttatacttagtatacatgtactaatatgtaaattatggttgattacagcatttgtaattatttctataatttattttaaagctgcgcatcaggcctttggtcaggcacttcttacactctgaactactttctgtccagtgtttatttgctaagaaaaatatcaggcctcacagccctgtgtttcatctgtaaagcccttttgttattttccagtggcctcagcggagatttaacatcaagaatggtagtaggaaaaaaaaaatggtgatagaaccttttatctcaacctaagacttatcactttcagagatgcttcctgcactgatacatattattatttcggaagtagtttattgagagtctagtatgtgccagacactgtgcttaaatcctggggaattatgaattgaaagtacacgtttgcatttgcagatgcataaaaacttgcagtctagaaggagaggagacacgtacataattagatgccatgctggtgttaggtgtcccaacagggccagagcaggagggagacagaggccctgaaggagaacgtgatctggggaggtttccagagggacacttgagctaagtctcaaaaaatgtgtatgatggtggttgcataactctgtaaatatactaaaacttattgaattttttatttaaaatgggttaagggtaaaccttgcagtatgtatattagatctcgataaagcagtttttttaaaaggtgtattgaaactgggtcaaacacaccagaaggggaagaacatccccaagagagagaagagcctggcaaacgcatggagatgtgaaccatcgcgacaagtagggggactgccagtcttagagtggctggaatgtagggtagctgtggatggctcaagtgtccaaaaggatttaagcagcaaaatcacagaaacaacttcattttcatgtaatggcccgaatcccagagtctcaatgacattctgggcaccttctggttttttgttttgttttgctttgtttttgactaaaagccctttctctgccaagtctaagatggggaagaaagatgacgagaaggaagaacccatatgcccaaagattagaacaaaaaatacattttctagaaatcattttggtcatctctctgcttctaggcaggtttgttaaactaacccagacagaggaacccattttgtccttaaaggtccctagagaaggagactccaagtgggacaggctttaggctaagaaaaagcattctctgcaggccctttgcaaatccagccacacatggaaagcccctaagagaagcagaatgccctccctgcattctgacctgttcatgccagcctagtgacacgaagcattgatgtgaggcccttgtttcttcagtcacccagcccagaatgcccagaggaggtaaagatcacttacatggcacctggtgatcgggacttccaggacaatggtaatgatagttccatggagcatgtggggaaagattgggaggcagcatctgtgcacatgctggatacctctgaggttcaaactgagggaactccctggacctgagaggtctggggaggtcctgggggtaacacacggaggtgaggggcaggggcctttccagctgcctgatgcccaggacatcctggggctgggaatcatatcccgtgtctatggttggcagatccaggcctgctcggttcctgtgaggctggggccgttgcaccatctcctggctaccgcccaaggagtctgctgaggcattaggtaaactttggtctgatttgtctgagtcatggccagtgtcaggagaagccgctgaaagctgagataccagccattgattacgtttttccataaatgaaaactgatgctctgcagggagggctccaaccacagactcagacgcaggctcgctgactgcagagcacccagaagggaaagctttgcccaggcctgggtgtctcctgcagaaactgtcttcactgtcctccagaacttgagtgcgcaggcaggtgacctgccgggatacaggccgctggtgatttgcaagtttcagggttgagtgagcttgagaaaagtctccggaggaattgtgaagcattgtgggtgcagacaagctgttgggtgccatgttccttatatttggagcaggtggttctgattcctcttccggggaatattctgggattggtttcagcaactgacttgggtatggttctgattcatcaacctccacaggaatgcttcggttcattctagtttctggaacaagagaaaacatgctatagccttagaagacagataaattcttggagtcctcactttatgaccttaagggacctcattcaagatgtggtttaaattaacagtg

SEQ ID NO: 47188 - DNA, 1012 bp, Homo sapiens
ctgttttgtctttaatgtccatagtgtaaaaatactaaacattaaaaagcaatcactcagtatctcaccattgtatttttaaaatacaaagaaaaccattcagcagagggtgagagcatgtaccctgggtaagcacgagtgggcatgaactggggacagaggtgagtcctggggacatataactggatggaacagctgtgcatgtgagcctggttcttgcttgttctgacccgacccatttttctgtttttcctttttttttccaggctttctccatatttacgtgcttgtaactctggcatgacctttgctccagtctctaccagagggcggtgcctggattgaagtggaaaagccctgttttccagccatgacccagggagcaagcactgactcctcaggggaacaggagacctgccaactaggaccctgggagcccccatgctggcagtgccctgggtcatctcaggctcatcagcaaatcctggggggagagcggggctggagggcgaagaagcccaggagagttcctggctcagaacccctctctgaggctcccaatacagagcccaggccccacacccagggcctctgagtatttttgtttattgtatgtaaaatactagtgtatttttgtttaagtctcacaggtaaacaggttctctcatactttgccaagggaaatgtgatctgtgcaatttggcaataactatcagaattttaaaagcttatgccctttgacctagtaatttcacttctaagaatttcccctgcagagatatgtatatcttgtatgaaatgaagaggctacgaagacaggcaacgccgcagtgtttataatagcgaagaccagacacaacccacatgtctaaaggttctgatttttaaaactgtagtatatctgtacaatgagcactccacatcctttaagaatgaggaagggctgtgtgaactgaaatggaactatctctaagatttattaagttaaaaaaattcaagagtagcacagtgt

SEQ ID NO: 47189 - DNA, 1288 bp, Homo sapiens
gtggaaggttggttttgagtgaactgtttggctcagattcaaactccaatgaacaaatacttccaagtttacttgctgaatttcccatacagagaagttcttccactgggcttgccagaggatttgaaacagtggtgagccctggaaggaagggaatatttactggcccttggacataaacccagcacagtaagactcacatcaggctgaaggcagtgcagtatgaaccgacctgatttgaggaagtttgctctgggactcctctgagctactaaatgaggaggagaaggactaatgggaacacactgactccatcacattagaagttataataaacatttagagaacaacctcaaaccagcccatgttttttttttttttctgtcgttgtcattgttttggtttttgtttttttgtttcttcagataagatggtttctctaagcacatgtgtgatccctaattcagccacagccacggagtgaaggagaggaaggggtagaaaggaaaaaccaagagaggaagaggaagggagagaaaggaaggaaggagaacggaagagaagtaaggaaagtggggaaacgctgaaggatttttttgtatttgccttttattggtgtaggagagacacttatttacttgtaatttgtatgtagtgctgggtatgagaaggggcagttggaagagaagggaaagaatgaatataggtgaaaggtaagagtgtcatagggtaagctgggaggccaggaagagtttggacagacagctcagagtaggaagagagttcagagcggggagggagacctgttgactctgggaaggggaaagggaaaaaacactggcatcctgactgcagggaaacaatgaggcagcggagagcaagtatccctcattgctgagggagctgccaagaccccaggcagcctcagtctgtggggtgcggcctgtggggtgcgaggagaggggcacaggctgggagctccggtcagtcctggccctcctaaagggcttgagttcagctgccttatcagggaaccaagccaaaccagcacagacctaaggatcaccccatggatggaagcccacccttcttcagccagtctacaactcctggtatccgggaaggtctgtgcacacacaaggtgtgcacacacacacacacacacacacacacaaggcgtgcacacacagctacagagtgagctgagtagtcacagccaagcacatgtgtgcttctaggaggcctgctgggcacgggaggcaaagaccataagtgggagaaaggacag

SEQ ID NO: 47190 - DNA, 2308 bp, Homo sapiens
aaaagttaaggattctgtgtatccgccatctaataatgtctctaatcacagtcatcacccttacatggtattaggatgtgtttcatagtttcccttcccctcccattaaaggccccacacacagtgactggtccagctgaggagtggtttccaggtccagctacagcagtaactctggcttctggagctgggcttgtctgccagttctctggcctgccttgactctgtggacaatagcacagactatccttcctgggtaacccaaatgggacatgaactaattcgagaaactccctgttttctcctatttggctagagccagtaataaggcctcaattccaggcagccctcccgcagagacacgtgtctcccagcctttcgccctgactgctgctttacctcttgccttgagagcagacgagtgaaacagaaatcaaagcagttgacatggaaggggggtgagcacctactaggcatttggtagcatgctggattctgggaggtagaaaaatatcaggaaacaaagtcctttcctcaagggggtaaccaactggtagtgggaggtaaaattaaaatatgtgaataatcggtaaacaaaacaagtcttgaagaccacccattaccactacccctctgggactatcctggctttgttttataagggaatttgacacactcatgttagatcaccaccccccatcaatttactgatgaagaaatccaggcttagtggagtcagagtgaattgcctaagtcatggaaccacaagaagtgaagaacttgaaaccaagtttcttgtccttttaaaaaatttggcctcttgttctcctgttcctttaaaaaaaaaaaaatccccctattctaagataccatcttgaacttgaaagtcacaagaagcttgattagcttctaagatcaagttctggcatttctcccccttgttcccaaaggctccgtccagcgccaggctgggagggctggagggcggctgcggagaggggccgggaggcggctcacagccagcacagagctcagcagaacttcctggcccaaaaatgtgctgttgatttttttcccccctgcacgaaacaaggattgagaaaactgccactgacgtgttctggggctgaaagccaattacttaatctttgccatccctggctctctctttggagaagtggggcttgaattcttgagagaaacttgtggggacactaagtacccaaacgaatggttcccaggcagctccgagctgtccccgtgtgcgagcctcctctcctcaaagggttaacccggcggggctcgctggcctgaaatactatactagcaacacatccttgcagcacaaacttcactgtcattttctcagctaagatggtctctgtgcgaacaagttaaaggaggggagacgaacacagaggaaagtagaggcagaatgtttcagtaaaggagaaacagcgtgctttgggaaataggtcagaggtgaagaaataagaccaggcaagtggcaactccgaataacttaccttagatccaccacggacagacagactgggcccggagggtagtcggctctcggcggcttctcgtctccctccaccttctccgggcccaggtaagtagaagaacaggctctgaagcaggaagtggaagctgtatgcaaatttctacggagcctaggaagcctctgctcaaaatctccctgtgggcagtgaatcaacggctgaggagtcactttatttcttaaaacagaaacctccttcattcatgagaaagggccagtgaccaattaggcggcatttttgttttcgccacccagctaagaagctgcccaggagtgggcagaacctcagtgtagtcgcagtgccctcgcctgggagggtgtctccgggaggagattgaactcgaatgttaagaattagtaatcattagcagctccaaaggaggggattgtgggcagataatggggaagaagagggagtcgagcttcttccacctcctctaactgcttaaaacatcagcattgccgagcgcggtgactcacgcctgtaatcccagcactttaggaggccgaggcgggaggatcacgaggtcaggagatcgagaccatcctggctaacaaggtgaaaccccgtctctactaaaaaatacaaaaattagccgggcgtagtggcggacgcctgtagtcccagctactcgggaggctgaggcaggagaatggcgtgaacccgggaggtggagcttgcagtgagccgagatcgccactgcactccagactgggcgacagagcgaagactccgtctcaaaa

SEQ ID NO: 47191 - DNA, 915 bp, Homo sapiens
gtcaagatgtgggtcagtcttctctctcttgttagaaatctagaaggggagcatgtgtgtttgccagatcctagagtttgctcagtgaattcgtcagggttctgcagagagagaatcaacaggattacctccgtgattatggaggctgagaagtcctgtgacaggctgtctgtgagccggacaccccaggatgctggtagcatggctcagtccaagtctgaaggcctcaggaccagggcagctgatggtgcaactctcaggccaaggccaaaggcctgaaaacccaggggccactggtgtaaatgctggagtccaaaggcttgggagcctggagtccttgtccaataacagcagaggaagagtataactcagttccagcagacagattgacccattcaccttttctctgattttgttctctctggactcccagcagatagaatagtgcccactcacattcactgtggctcttccccacctagtccactcagactcacatgctaatctcctctggaaacaccctcacaggcacacccaaaatgaatgctttatcaggtttccaaacattccttaatccagccaagttaatacctaaccatcacactcagtgtcattgtctgttccggctactgtaacagaataccatagactgggtggcttaaacaacaaacatttatttctcatagttcaggaggctggaaagtccaagatcaaggcactggaaaatctggtgtctggtgaagtttcacctcctggttcataagtggccatcttctcattgtgtcctcacatggtagaaaaggggctgaagagttctctgaggtcccttttataagggcactaatgtcattcatgaggtctccacctcatgacttaattacctccccaaagtcctacctcctaatatcattatat

SEQ ID NO: 47192 - DNA, 746 bp, Homo sapiens
aaagaaaagacatttgacttctattggtttcctctaaaccaaatatgaaagttgactcctaaaattcatttttggtgaggatcatctcaacacaacaatgaggaagagtaactctgtatttggtaatttccccagtgtcacagaagcaggggttcaaaccaactcttctttctggcaccaaagcctgtgcccttcaccactacggtagatgagattgaaagacttggtcgtgactcttcactcccctttgtcataacattgcagagcccacccttcaagtacagggaatatgtcctgacctattgatgtgtgcttggccacattattagaatggccaatggaatttgagacatcgcgatgcactctgaggtcttgaaagtttgaaaggcttaacttagctctgagggcttctgtgatagccataagacacgaatttcccaggaagccactgcccccttcagcctgggcccagaataaacactgtgaaacagacctgaacttgacctgaagcctgcagccaagttctgccgtgggcaaattggaactctgagcctggagtccagtcaagtacagcagggtcctggtctacctgcagacccatgagaaaaaaaaaaaaaaatccaacttgtcattttaagccgttaagttttggaataatttctgtaagcctagcattattgtagcaatagtcaaatgataaaccactacttgacatattcaaaatatggtccttggacactggtatc

SEQ ID NO: 47193 - DNA, 1314 bp, Homo sapiens
aaaggtatatttgtccctccataggattctgaatagtttgcatgttgggaaagaatgaggtatgatttaggagtttattatgtatgagaattttctgggaacataggtgtacataaattatgaatgtctatttgatatttcaaatacagtaaaggtactatttttcattattttcttctctgtagttataaactatttttgagataaaaaatatatttaaaatttggcaattgctttagtaatctatatccccctgtatcatttttagaataaaaatgtgtttaagcttccttcccctgcccccaaaccaaaaccagtctcctccctcccttctaacaaatatttttgatagcataattgaattccaacagtattgtataatatatagtggtaagaaggtcaacaaaagtcatttaaacctattaaaatacctttcaggaacaaactgaccaaagatcattttattccaatgcaacttattaggaaatgcctatcatgtgacattctttgtcctgagtcatgactaatgaacagatgacatcccttttgctgtgggctttagtacaattctcttctgcctgttgttgaaaaccatactctttcaagattcatgaaagaaccattccaattaatatagtaaacattcttaagactcccggggaaattgcagataacattttgccacactaatgctactataaaatcctctggtgccaacacttagccacaggaggattcctatctttctcaaagcaggtaaacaccttctggtgcttgtaaggaaatcttcaacagtgtggctgtgtttgagggattatatacactcttaacttttctcacggaaatgcctggttccccatacatctttctgtgtcacgactacggcagagccaaatgcatcatttgtctttatctaccctgatgttctaaagcatgggaccctctgtctcctaggctttctaatcctcccagcccgtgaactgatcatcagaggagatcaggagctacagagaatggagtgaacagaaatcctttagtcgcagtttacaatgtctgaactttgcaaatggtcttctccgataggtttatttgattttttttttttttttttttttttttttgagagagagtctcgctctgtcgccagactggagtgcagtggcgcgatcttggctcattgcaacttctgcctcctggattcaagtgattctcctgcctcagcctcccaagtagctgggattacaggcgcatgccactacgcccggataatttttgtatttttagtagaggcagggtttcactatgttggccggg

SEQ ID NO: 47194 - DNA, 1884 bp, Homo sapiens
ggtccatgatgtccccagcaccctgtgaggcgctcctgggaaaaccaagcacaggttgcctccgcccttggggtttctaggcagccagggagacagacttcacgggcaaacccaacagagaactaaatggtggcactgcctttaggaagaagagggctcagcagagacaggaaaagagaacataagcaggagatgagggcttcagggagaggcagccgcattggaatgatgcagcatgacccatggctctccttgcggtggggagggtcacggcaggggccaggacaggcctgggtgggcccagctcacatctccggagagctgaactgccaagtctctctcttttttatttttcttggtgaccaggccaattccatagtctcagagaatatcccctctggctaaaaaactaggccaaggtggagaaggtgaagtcagtattgaataaaagaagccaaatccttcctacagagaatctgagctgtgccctaatagcattttcaaggaggaaacccattaacttcaacaatagacactgtttttctgaaccaaagagccacccagagccctttttaattataaagccactaactctgcaaattattatatccaatatttaatagtatgcaataattcaacttgaaagttactctgggtaataaaacaaaaaaaaaaaatcacaaacaatgccaataacagaaatttggtttacaggagggggaggtgacaaggcggtaccaggacaggatatcctgtgaaagaagcaaaatcaaagctgacctgacctggaactttgtggttatttaaacaaaacaatgatttcaaacccaatgaaacttggcaaagcaaaactcagaattttcacactaggccaaaggaatgactttcagatttcccaaatgcttctgaagtaatacaactgggtgttttccagttatccccggtgacgcactctgttgaaacttctacttcaagttcataaagttttagcatcatgtttttttgaaaagtatatgttacaatgggttaagattatattccatctgaaatttcataatgttgagcaagaagtttgagaaggagggaggttgggaggaaggaggaatgctgtcccaccggggatgtgagtggagaagggacaagttaggccaaggaggacaagaaccaaggagtggaaggtgggcccgaacatattgcaaagataaggttgattaagtaggcacagatccaaagtctggttgagtggaatccatggaaggaatattcaggctgagaggggtgaggaaagttccaagagagcccagagttcaagactggacagagaagagacagaaggtccatcagtgggtattaaaaattgaacccaggacaactagaggacacaggggagtaggctcagctaccagggagaatgcaggggcaaggctggactctaggtattaatcctggggttttgcagtcggggaaggataggcaggataaattgtggaagggcattcgatccagacatggaggctaccagaaggtaaactgtgacattccttccaaatatccctagaggagccaggaagtgaagggaggaaactctgggctgcttgcctttctccatcaccctccttgcaacggtgaccaatgacaaacccagggtaacttatgggggcaacacaaaagtagaggataacattaatgggcatctcctgaaactgtgggtatttagtccttttaagaaggaaatctgagaaccatcgaagggactttccttggagtacagactgtgttatggaggcttatttaagtggttatcttgggtgggactgaagaaaaaaggagccctgcttgctgttctagaatactgaggctctgaataattccaattatccttcc

SEQ ID NO: 47195 - DNA, 916 bp, Homo sapiens
ctcagcagataaacaaagccgtccctcccagaaacgaggtggaagctcagagcttgaagcgacagaatacaaatgaaggagcttttctgcttagtgactgaagtgtaccaaactcggatccgggaagcttgattacaagcagcacggttcaggcatgcgactcagctcagcgggaaagccgtgtctgacctcggagggcagggcattctgtcgggcaagtcccctggggtctctccctagacagccctcaggatgatagactctcaatgtgggctggggaggtgggggttggcatggtcattttatggcggcaccactgagttgggaacacactagtcggtgcttaagacaatggcttgcattttaaagggtttgcttttcatgaaaggatggtttgcttctctagcatgggaagaattagattaaattcagtaattaaaaaggttttttttttcttccttttctctctcctgatatttgctgttcaggtcacagcacactgtgcgggaatggcaatgctgttgttgacagagaacaagaaattcatgtgctgacgggggcagagggagggcatctcacggcgagatcagccttgatctgccaccggattacaggggcctcagaagcggctgattaataattctgcaggagcccttgagctggaaagctggcgctctgagtctaataatccccagtcgttgtaatacaaaggaaggacaggaattgaattcacagttctggattgtgaaattcaaaattcgaaagaaacagggatccacttcttcctgagtgtgtttgtcaacctagctgcctgcttgtttgtgttaaatggctactgtgctttttgaatctaaaatctgattatatttaattagtacaggcatctgggatttctaatacacaaagagttattaaa

SEQ ID NO: 47196 - DNA, 1582 bp, Homo sapiens
tattttcctagctgtgtgactttgtacaagttacttaacccctctgagtctattcctattgtttccctgcttggtcctcacgtttcctctcaggcctggcacttggaaggtgttttataaatggctctgccactccctacccctctgctgcaggacagcatgtcttttattctcctgggacatcctgggacctgccttgccaagcttcatttcccccccccccagttcagctctccagttcacttacttcttacttctctctttctagtgtttggcatggatttgaaggtgtttgggaaagggaggaaagaagaaaaatgtttgaagaaggaaggacgggaccctcgatttggaaattaagtaaggaaacgcagtacaaaggctaaaagaacaaggttggccttttgaaaggggctctgacggcacctggggacatgatggtgcagctgggcagccggcagaagggcaatcaggacagctaatgcagaggaacggctgggggccaggctgagggcagcagcctgggacccgctcagggcagcagcctgatgggaggggaaccagcgagggtgccaatcacctagggccacagcctgaggagcctcactccagtgaataaggcgtggactaaacccccaggccctattaacagcacccctgccagcatcctctggctcctggcctggcaaccttttcatttacccatggttcatgagcgttaaccacaaaccctgtagagttcaaagtccaggaaaaggggaaaaactcgactcacacacagaagggtgagcacacggctctattctagccctttccttaatcaaatattcatgtctcacaacctttgcccactctccttctgagtctgaggagctgggatctgacagacttgcctcaggataaagtccctcattcagggcaagtctcagatccactggcactcaggtcctctcggctcaccttgcctcaaattcacatgcacattcctctctggacggccagtgccaatcaaagctgcagtgcgcctttgattagagatacagcatgccatctggcccagcaccgggggtgtatgtgtgtgtgtaacgcacgggtatgcttgctgtgtgggcatttggctccaggacaagaactgccacgtgttggggaaattcaaatagctgagctgtctgaccgacatgtaattcagcatttggacagtatcggtagcagccagggtcttagtttaacatttttcctcatcacttgaggctgctaagaatgcttccattctcagatcaaatgaagggagaggataattggcatgaaatgaaagaatcaagaggaggaggaacaggggcaagagaaggagaaggaaaaagagaaagaaaaggactccagagctggccattatgaaatgcagtagaaagcatcaccctgtaatacattccagtcactgctccgctttgcttgggatgactaggctttggttagaaacaccaacaatgaaagttcccccttgccccagctataaacattatattctacatgaggagcctatactcgattgcaaaccacatacttaatcacacacttttacctg

SEQ ID NO: 47197 - DNA, 1226 bp, Homo sapiens
atatgcctgaatttaaatgagagtttatctgtacagtcaaagaagtcctttaggaaatcaactcccagaaagaggctaggaagtcagaggcttggcttggtgctgattgaggagcaggtagcttgctttgcaggagttggatccactgggggcaggaaggcacgctcagctttaagatcaacagggaagcggatctagaagcaccgagggcatttcatagatctcatgcagctctttagcagcctcagttcagcctaattataagtttctagattacataatggcaacgatacacagtagatggctagcttgcatctcatgaagaatgagaacccattttctgctttataatttacaattttcctcaaaagtgaaaattgcaaggaagagaagctgaaatgcagttcattcattcccttctactctcaagtggttataggtgcacagaggtttttggtagaaattatggacactatttgcaaaaatagtgtagccagcactgaaaataatagttcttctccccactgaaggatttctatccccatggcaactggcaaactcacagatataagctgaagtgacaaaaccccggagaccttttgctcactgtgtggaccctggatttggttttgtttgtcttggccaggaaatgttggcagggtcagcagctaatggcctggcctttggagctgcaggcaaaatgtggagcagcccggactttatctggataaatttccgagtgcagacctcaagggttcacagttcttttgatgcaccttgaaagagattttattatgagactaggtgcttttaaaaagaattacaaattgggaaattttctttaggattattgaaaaaaaaattaggcaaatctccacgaagggctgtattttccttttcccctcttcaccaagtattgagtgtgaattaaatacgaggcatagcagcagtcgaagtggagtgacaagcctcatccatgagtaaatgcaacacgtggcagacgctgccgctgccccatacacacacagcgataaacacaggtcactgtggcctaataaacttgaaggaatgtcaaacaacaataatttcctttgtgaatctcattcaagaaaacatttcaacgtcaaacaagtccttagagcattgtgtactgtggatgttattggacaagctgtcgctgtaaactgccagaacctgggttgcatttgaattatgactctgggaat

SEQ ID NO: 47198 - DNA, 801 bp, Homo sapiens
aagctaattcaaaatgctgtcagaaatttggaaccattttgctggctagaacttgctagtgaaggcatagagaagcgtgtttccttttccttagggcccatttataacatcctggaaactgtccttggatcctaagtctctgctctctgtgtgctaaggcctccctctctaacccctcacctcctctctgtcagtttgccctctcccctagacaaaaataaacctcattactttcctgtaagtcttacctttctcacctcacccagaccactgtctaattttctcctttcctctggttcttggagttcattaccatcctttttcccattcccagagatggcctgaactctcacaaacatcaaaatgatcttcctccaaagtatttactaagtggctttctgcatgcagtgctgtgctggacaaacaccaaataagttcatagagcaaggtccacacccttcgggtgtgttgtctttctgtaaaggccaacagggatgggatgtcgagaagttttggttagttaataaacacagtacttctttcttttcgttttatttctcttgtgcatgacctctctcttttgtctgtaaaatgggaacaagatcacttgcctcacagagctgtttagaggagtaagtgaggtaatttacccaaaagtacttgacaactataaagttcccttgtttttatttttaccacctggcataatgcctggaatgtcaggtgcttggtaattcttttgttggaagaataagtgaatgaaatttttaaaagtctctgcactctgctagaatcaggttg

SEQ ID NO: 47199 - DNA, 1326 bp, Homo sapiens
atgcttgggaaagattcaacaggaaaagctgctttaaatgtgttgttgaattatatttgatggttatgagtacagaatctaagattctttagtcaagatgttttacactgtctctaaattctcatttcacaaaggaaactcaaatgagacaacatggaggatgcattatatgtgtggctcataaagagagggaacaatacagcactctaatcagcacatctatattcaaagaaaggcattggctaaataaaaacactggtgagtaaatagacaactcagttccctgctaaaataaaatgtttgtataggcaggactcctgcgagagcccctttgactgcccgttgagcgccctctgctggcccggagggaagggtgccacggaggggacggcgtcagggccccacccacggtttagtttcagatcagcgcttttcagttccaagatacagattccggttccaatgaatgctggttgaaaatacggccgtggttttaaatatcatgaaactattttacgtccgtagtactttcatctatttttataagaatgttttgtaactgagaaacctaaagagatgatgaatttcccccaccgcccccgactattttgcctttcagtgacgcggtaatattttacgataggtgccgattcaaatcagtggctttcagaaagtacagctgctattctttggtgccgctattcagaatgacaatgtgaaataaaaatgattctgactatgggaaggtctgatcttcctatgaatgaaaacaatcatgtgggccacagagagctctctctttccagctatcgagggactttttgcagagagagaaaaggatcctaaagccatgttcccgatactgcagacttggcgagatggcggcgggctcctcccacctctgcggcagcgtcacaatcaataatgcagggctctgcggcagaggaagcgcctgcttttatataggggcgcccggaccccagagcagggctagtcccttaacccattccgccatctagcgtccgcaggggctcatggcaggttggagccggacagtctggaaactgcaatctagattttgcagaagggtgacctttagccttctgcaaaacctagatctcacttaatgtagatctcactgaagaaggcaaataaaaagtgagtggagtgtttattcattttcctgtaagattagtaactttaaggctaaaaactctaaagtaagtatttcccaagcccctgctgtaagtcagtcatgttgtgggtaccaaggctatgaagatgtctcagtctctattttcagtgacccagtctagtagggacaag

SEQ ID NO: 47200 - DNA, 1554 bp, Homo sapiens
cactgtgacagactttaatcccatcttacctggtgtccacatttctaaagaagctgcttattgcctcatcataaattcctttctaaaaagaaaaacatatgttaatagcatttaggttttgcttctcgcccaaatcaagttctttcaattttaattacataatactgtaatggctaggatgagactctgataagaaaaaccaagtatcacaaaatgcggagcctgactcttcccaatctccttagaagagtaaatgccagatctacagataaaaagttcagcagggggtgctaaagaaaggatttcacccataggactgtaggacaggtccatcaaatgagcgttctctggattcttcgtaatctttttaaaagctgactggttaaattaaggaatacaataaccacacgtgttatctattttacaaagtactttcccatatacaaatctcactgttctgcacacgaacaccaataaagaggagaccctgagaatcaggaaaaacgttaagactaaggtcgctggccagtgttcttttagtttagtgtgtgtctgacgcaacatgtttaaaaaccagtacgttctttactgggaagatcccatgcatcttaaacgggtcagatgaaagctcaagtcgattatttcctgcgtatgggctggaagacctagctgacaggcgagggggctcgcggcggcgggcgggtacctggttgaccgcggcgtgctcccttagtgccaggtcccagaagcagcagccgatctggtttccgcactggccgactgcgaccggaggagaggaaggaaagagaataggacattaagcaggaaacatggccgctggattccgcggcgaccaggtctctacccgcccggcgtagcttaccctgtacgaccaccgactgggtcatggtggtgcgccgccggctccgggagcttgctagcccgcggccgcttctgcattcccccagcaacggcgctctgctagagagctgccgtaagtcacgctactgccgcaagcctctgccgtcgctaagcacgtctgtaggttcaggctaaggttttccgtcagaaggccgcgcaagtgcacttgcgtgtcaccgttaccgtagcgactgggcttctggactgtatatcctagctgccttgtcaacatcttcgagcatcggcagctccggaggccggggtaactggcaggtaactaggctttggagtggtattttaaaatatgtgtcgttaagctgttcgtgggctatcagaggtttaatttttgttcacagcctcaacacccggggcggtggatcagtccgtttattcagattccacgggacgctgcgttggcatctctgttcaacaagccctttattctaatagaaaatgaacaatggcgttgagcaaagagaaaccccagagaaatagtcatgtcagggcacaattgaaactagatggttatacgctttgacaaaaatggcaaagctaaggtcacagacccaaccagtatttgttgaacgctgtatactccccaaattaacttgtaggctcgctgggaagattaga

SEQ ID NO: 47201 - DNA, 573 bp, Homo sapiens
ctaaggtggctgtgaagatgacagatgaagaatgtaaagcaacaaggacataagtgataattaatcagtggcactatttagctcagagctgtaatttctagctaaggaaaccgagactcagggaaatgagccaacgtgtcccaggaacacaatcggcagtggcagaagttggacaatgaccaccatgactcatactgtcacctgttaattcttattgagcatttactcagtgccaggtcccacactcaaaactttgcagtattatctcataacagttttatgagacaggtaactttattttctccattctgtacaagtggaaattgccacttggagaggtcaaagaacttgcccgggtgggtcacaaagtggtggagctgagattcacactcacccaggctaatgctcaaatctcttcttttcaacactctactttcactttccaaaccagtgctcttgtctggagccttccactccagcagcagatctgacccagccttactgggtaatggcagagctcatgagcatcctatgtgggctgaggcatttatcatctgtaattccttgtcagag

SEQ ID NO: 47202 - DNA, 3679 bp, Homo sapiens
aatatgtgcttctcagtgaaaggcaacacccacaatttattttcgcaaacagttgggtaaaaacattccaacagaattacatttctttggccttttaccctttattttgcttgttctgatttcttagcctacttaaagaaccactgtcagttaagagtccagaacaggaacccgcgcttccatctttctttgaaggtgttccacccagcagcctgcccacgcttgaagcatgcaacatctgctaggggcatctggagtcatccgcctgtagctggtgtcctgctgtttcaaacagatgacattttccttaactggagcgatttccatagctactggtagagatggaggacgtctggccaacccccaaataaatacatgaacattatgcaaatggtccctgggaacaactgcatgaccactggtctctgtggcgaaggcagactcggtggcagggccagccctcaagggttcgtttttgtttctcatcagcattaactgtttatgttttgtctggttttggctagggaagtgaaaacactgcgtctctctcagcccactgtaaccactgtggtgcccatttcaagtggaagggtgccttttgctcttagaaaatccttaggaacttagagaaaaatagactcggccctttgtttgcttaatcccctgaagcattatttccttgctttcttgtaactggaaatccaaatcctgcgtctgtgggctcagcttcatcaatgtttcaaaatgtaattcagagtctaaactagacgcctttctgaaaagtcctggaactttcattttatagaaagtagcaatatgaatttcttaaaaagctgaaagaggcaatgggcatttgatttttgataagatatttgattagtatttgagattagctaactaagttaataataagtccagatcaaaggttagaactttttaggacccaagaatatttgttctgttccatgaccacagatgaacccctcctctccttttttgcagccagtttccccagcaagggattcaagaagtagagctgttgtcactacagagaaaaatctgtaaaatcccttggtctctcacacccttaccaattcctccctactcctacatgatatttacttataggtgacacactttttacttcattttcgttttcagtaggtttttcaacctcgaatctgtactattagagacttgagttttcgtgtctgtgaatatgcatctagatttagagcacattctctaagtcccttcagtgctcctttgaaccctggatccacttacacagagaaaaaacatgggcagacatggtgccttgatgcctttggaaactgtttcctctttcaggaaaggagactcattccacagttggcaacttttgacttcatttcttaaagagttaacagcattcagaaacgcttcttgctcaactaacataccggatactgtgattcaaaaggtaaagggtcatttgctctaggagtttcaaaacactgctgtattttgacctatcttaataaaggtgagatttttgactgttttactcactgctgtgtcaccagtgactagtgcatgactggcacataataagtactgactaccagtttttataccagtgtataataagtgctcgataaatatctgattgcatgtagacaaggcttctcagtccatagggaatgatgttctaaaggtctcatatcccaagaccaggtaatttagataagaaagtcttgtcatgcaaatggggtgaaaagtgcaaaagtggaacagcataattagaaagaaccatctgagattgcctgcctaattcatctgctactgccaaaaaaaaaaaaacaaacactgcagctcgacgcctataaaccttttctgagcagatgaggctacacaacatgtttatgagagaatgagtgaaaccagctatgaggaagttggaggtaatatatttaacaatatataccatggcaagagaactgtgctaaatatctcaccagacgtgattaaaacgaatgcttgagagcagaatattaatgaacaatgaaaaagtataccaagacggagtgaagggagctcataaatcaggacatacttgagtgaaaataacagaacagttaatgtttgcgttttctaccctcactgtgagtaccatcccttttgcacatgttattaatactatcatacatgaaaaattacagagcaaggtctgaggcagtttaacagtttctgaagaaggatgggactgaaactcgtctgactactctgactgttagacttgtagtatttgaatacatcacaagctattaggtgaaatgttagttgatattggtgttcaattaaggaaaaaacatcgggggaatctgattgccatctgtctttttcttttctgtttatcagtaagtgtgtgagtatgagtgagtgcgtgtgtgtagtaagcattcagattttaaaaagtcattttatgtgtatcatttaatctttacaacagctatcaattacgtaaatattacatcgaaacacttagaacaatgccaggcatagagtaagaaaaatccaagtgttagaaaaaatatagcggtatgtgttcagtaaaggcaacatctaccttatgcctttccatgtttagggtacaaacccaaatcctccacacatattatcctagtccagtcctcacaactctatgatgcagatccttacttcctagtttgatttactgtactaaggagaaaatctgaaatactgggctggtaaatgaatcaaggagtagagccaagatctgaacccaggcttcttgacttcaaatcccatggaaagtgagatctagggagaaagtaacttttctgagatcacacaggtattatgtgtccaaatttgaatatgaacctagattggctactctttctacttgtggcataataaaaaaaacagtatttagcctttggttcctggcacagactcctgtaattcttggaatttcctgagggaaaagactgtcttttgttattcataacaggcacctttcaaccatatctgagtttatgctaatgaagtgactcacagtggacccctggataccttgagagtgggagcctatgaccagaggcaccaccgaggaaccaaacatgtaattggacgttgtgaatttcaaccctccccacccccaacctccagggaggagaggctggagattgagttcagttaccaatggccaatgatttgaccaatcatacctacaacatgaaactttgataaaaactcctgagcaacaaggcttggggggcttccggttggtgacacgtggaggtgctgagagcatggtgctccagcagagagcctggagtctctgcacgcactccttcttcactcccacttctccatatcctgctctatgcatcacttccatgtagctcttttggagttgtaaccttttaacaaactgacagtcataagcatagcacttttctaaactctgtgagtcatcttaatgaactgtcaaacctgaggagaggttgagggatccttctcaaatttacagtcttctgggaagaagtgtgactagcctggggaccccatttttggctggcatttgtagtgggggcattcttgtggaactgatctcttaatctgtgggatctgcactgactgtggaaacttagtgtcagaactgaattgattg

SEQ ID NO: 47203 - DNA, 994 bp, Homo sapiens
tttctgcgttggaacaaagtagttggaggaatgttggcagcttcactgagtgcacatgtaaatgtgtatatgctagcccatccctaaacatttattagaacctgttatgtcacaggaccttggagggaatcacatgatgtttgttcctctcaccactaggtcagagataaagccatgattgctcccattctgacaatgtcattgtaaaaagagtggcttagtcatttctttcaatagactctagcaggagggacttcttccctctttaatttatctcagtcttgcataatattgactgcctaacagcagctgatgtgcttgacagtctccactgctttatattttaataaatcagataacaaacaacctttaattggtcaaattatcagagatgtacgttattagttcaagtgtatccatgggatttttccccccaaatgtcactgggattaaaataacaggaaaccggagatggaagcattagaaaggagtagactttggcagctgcagaagcctacactgtgacagaggacatcctggttgtaatgcttatttaagaagatgggggaagggaaaacaaatatcaggactaaataaacactacaaagagatagcaacattagtattttgtcacttaattctctgtccctagaaaaatggcaacttctagggttaaagatcaataaaaacatttgcatttgcatcttaatgtgtgaataaaatatcactttcatgtacacacctaagaggccatttaaaataaaaattatctaatagggacaattatgcaaatgttgagtgcatttaaataagtattcttatagtttatgcaaaaatactcttgtagttttggaaaacctctttttgccagatgggaacttgaagaatttttctgctgtatcacacagctcacgaaggaaaacatgctatttgagcataagttcttataaatgccctctatgacttccactgaagccacttctggtaaatattt

SEQ ID NO: 47204 - DNA, 803 bp, Homo sapiens
cacaatgccttgtatatattaattgctcaatgaactcttggtgatttgggtggtttggacaaggacagcaaactggagacatatatactattgggagcccacagaatatactgataatccatccactgctctctcctaagggtggatttcatctcaactctttgtcaacagtccagcagccagtgcctaggttggacagcatgcaagatgaaatctttgtgatgtgccaagtttaggaggagagttcactgtgagagcctgtcattatccacttaccactccccaatctgagattatgaccttgggtgaaggataacttggctctgatctcttataatgtgggagatgggaagaaaagggaggtacgaacagggctgtgttgagtcatttggccccccgccgagagggcgaggagggctggcagggaaacctggcacactacgttcctgctgggccttgtccacctgaaagaattatatttttcagtcatctatctgggggccctgggcatgccctgctagagcacatgtcctgggtagcttgcgtctggtgttgtggaactttggaggactccctggaatggagtttttaagtggttcaagagaagtttgagtgtactgaaggatgagctgttaaagattgtttcctttaggtggaaatatttcatcatggctccagtgagtcctgttatttatttatttttactgaatctttctttgaaatttcgaaggacctggcaaaattggcctttttgtaatatcaaaaggccgatatttccaagtatgaaagtagaacgatgtatt

SEQ ID NO: 47205 - DNA, 1059 bp, Homo sapiens
aaatttccaaaatattccacccttttctaaggaggaatgacttctgagaacatatgaatatattaaatgagtaggtatttcacaagccatttttttctgtgtcagtaaaaataaaatatggaatatctgaaatggcaagcagttctgaatttaagcttttgctaacttttggctccatatgtttttcagatcaggcttaacatgtcctgatttttagtgcacaaacctataaagtgccaaaatgagctaaatggattatgtgttgcagttaccaagaagttggcttcttgattgattttacttgaatctgaagacaattactcacgcatcctcccttgggtatctctaagctcttgtttgcataattgaaattccccacattttaataggcaaagttaatttttagattttgacagcgatttcaccataactcaattaggaaagtggtttcaacattcttcggaggtttatgcagttcaaaggcatttttttcttaggttggcataataaagctaggccaaaaaccaaacacagactatggtgctggtttcccctacttggcctagagagttacctttgtgcttactgctcaggccccatatccgccatgccttgctcagcttacaaaacactccagttctcaatttaaccatcaataaaatagagactgtgacttagagcctgaggaattccaaggagcacagagccatcctaaccactcttaagccaagtcctttaattttgtaaagagtggagacagggttatcacatgtttacatcacatttctgtggctactcctcagcactcttcatgggcttcatgggtggaaaccagtgctccactcacagctctcaaataacagtccctgaaccctgttcatcaactatttggactgtagataccaacagccttggcgtgtgttgaagtacttgctacgcttgctaataaatagccctctttatttgtctaattgaaacaataaactaagaaaatccacagcccctacagccgtacaggttttcttttagaaatgttgggtttgaggatgattgtattta

SEQ ID NO: 47206 - DNA, 1427 bp, Homo sapiens
atgaccagccactctcactcaccccctcaccttccctgctgcagaagacttcttgtctaatatgagacaaaaagatcctgcagtagtgttcccactgtcctaacagcacagaggagcaggaagccagtgacagggcacacacgttaagtgccgtggcttgacaaaatgactactgggacacgcaagtggcagaagtcaccgatgtgctgctgcagtccccggtgagagtctagcggatgaactcagagcaccaacacatgcactctcacccctttgagcagacacattccgaagcctcaactttcaactctcaacatccaaatgcaacttacaaaggaaaactctttatttcaagtttccgaactgacctagcccaggtgaaactctcaaggcactggggagaggaaagaggcggagagagagagaaggacgagtgtggcacagcccgcgggggcgcaggtgccccagcagggtggcaatggcagggacactgtacctcggccgcaggcggcaggcgtcccagagccacgcggggttcgctcgtctcaggcgggtcttgcctgccaaccgctgagctcccttcaatgtcaaaaggaaaagcgttgtcgtccccggacgcggcgcgggagcaggcagcgctccagaggagccacagaggcagaaccgagcgccaggctgagctcaaagccatttctccgctgacatccagtagtgctcttccagggctcgggcgctgtgggtctccgtaggtctcccgcgtggtgcggcggtgcctcgcttattttccctcctctccgtgtgcagtatcccgaggtggctgcgcaaccagcagcttaggaaataaagggaaagtgcgagagtaagggagagttccagcctctctctccctctctctctctccccttctccccctctctctccctctccctctccctctttcactttttctccttcccgcagaggttctggctcaagaacctacagatggacggagcttacagtacggcatcaaaaggcagacggattggggtgagccccgccagcgctaggccacctcctctccctggccgttcgggactggggactgcgctgtcctggcttccttctcacattcattctcaccactccctttttaccttctactcccaggccctcccactctaagctggcttttcagacactgaggtccgcctttccctgcggtcttccctcccctctcagtttggagcccctccaagggctccagaagaatattcagcttttgtgacgcttcctcaccactcttatttatgtagtcaaggtaccggatgtcttatctatatttacatagatattttatgtggcccccgctagtttgcaggaaagtgggtggaaaagggattccagggcaggaaccaaaggtagatgatctctgaaggcagagggtc

SEQ ID NO: 47207 - DNA, 927 bp, Homo sapiens
atacagatgaatagtaaaacaccagtgtgatcgacttctcaaaagtctgacccacagtcagacaaaaacagattggtggtggtgtggggggaggggattctacatgtcaagtgacatggactcatcacaatgtcagtgtcccggaaaccttaaaaaaaaaaaaagtggtgcttgtgctggctgttctaaagtaaatgagatttaagggacatgacaagcaaatagaatgtagaaacttggagcttaattcttaattgtgatagtgtgattataaaggagaatgccttttttcttaggtgctacatgctgaagtatttaaagacaaaatgtcttgacatgtccagcttatttttaaaagttatcatcaatgagagacagagaatgacagaaagaaaaggaggcaaatgttaaacaaacaaacaaattctgggctaaatattgatttggagctcgcactggaaaattccctgttgcttgttcaagtccaggcaagtctatgagttcgccaattggcttcagggtataaattggactattttgacacgttctaaagatctatcgttagcctggcttccattcaagttttagctaacaggaagcacttgattctctgaagaggtgtgtcagagcagaattacttacagatgttccttacagacatattccaaatttgtttctctcaattaatttttcaatcaatttctacacccacttcattagattttacatttaatttgcaagtaaaatggcatttgcattttcttgagtaactgtgtcccttctattccctcccatccccatttctagaatctcaattatgttatgatacgtcccacaataattgcattataaaatgtcatgaaccatgattatagggaggctattcagaaaaaattccctcactgtctattcacactaaagccttga

SEQ ID NO: 47208 - DNA, 2714 bp, Homo sapiens
gaacagccactgaacttaaaactgcattttatatgttttttttcttacccgataaaaataccaatcccaggattcaatttgtataattcttctttcatactccagtaacatccttaaatattggaaaaatctttactttgtgggggaggggaagaaaacgataacagatcctctaccacatgataaaccatgatattttcctcagttgttagtcacattgtacttttggccatgccccagaaaccacaaccctcaattacatttgctttcagacatgtggaagaaacacatgctaaagtaattagcaaaactatgacatttacatttttcccctgtcagtccctgtgattcttcagcatatgattctacgtgaaccaaaacaatcatacatcaagctgaccacatttatccttatctagtgctttgaaaatgtcaaaaagtaaaacagaagaaaacagttttttcatagacttagcacactctactccctgtttggcaacaagaaccacatgtgacaatggcaggaaggtaaagcatcacgtcttatcccaaagtcattgcactctgcagacagccaactgagtttgatgactagtggctctgagctgtctcatttgccctgcatttgctgttcctccttctctgttgatagattctagtgctcattaaatgaaacgtgtagtacaacctgaaattaatgacctttaagtagaaaatgaaaatagaacatcaaattttcatagtatcaggagatttgttgcagcaatggtaagtgtatcttctaactccatcagccaatatgtaatagaacatcttagagagcagtaagagtgttgtgcatttgcttatgcccctattacccaatttacttgtaggactttaataattgttcaccattgacttcatatcttcataatcccacaagcattcattaatcatctactgtgggccaagcacatagacactgcatgtataaagatgaataaggcatggcccttgctctcaggaagctcacaaaatagcgggaatgacagacatatatgttaatgatattgcatagtgggatagagttataaccaagctaactaaaacactctatgaagcacagataaagagacttcatctgtgagtcacaacggaagctgtgaccctgaccacagccaagaaatatgtctttagtaatcatgctacctatctttttgtttgcctttctagatctcctccctacctttctccaccctgttcttgccccatgaagctgacctctgaggactggacaaacaggctcttttgccctcttggcaagagataagaggattaaaggaagagactaggctatttgtttccctttactttcctgcctagtttccatggactggtggcatctttctaccaaaggctatagctcctgtcagagccctttccacacaactcccctctccagattcccagtcccactctccccttccccttttcagcctaggagaaataacgatcccttgttggcttcctacactctgcccacacctaaataaaaaaataaccctttattaaactctcttcagttacccagtttgaaaattttgtctgcttcttgccaggactctgactaatgcagtaaccctctaggaatttaagggattcaataatttcagtgttactcatagagaatccagcttgggagcacacaactagggtctcaccagtcactgagcaaacccatcacaaatgtcctcaaaagatacccctcctaataattccagttcttacccaggagagccacttactctagaacaggccctacctcatcaatcctgccataggcaaactgaaataacaacagagttcaggacatgctacacaaaaatatggcaccctagcatgtgaggaaacagcagaagtaggatatagaaagaattccacttgtacctttgcccccgaagcaggccataaaacctcccctgaaaataggtcataaacctctcattccagaggagtcctctgtattcctggaaaaaggaatgtcacagagatattaagaagcattgggacaaagcggccttcttaagtccccccagtttattaccattagatcatactcttttgttctctaatcatacctctctgcgtgactgtccataaaaatatagttttccctgtttctttgggtctttatttctgaaggctaccatgtcacataaaatttgtattaaataaatatatatgcttttcttttgttaatctgtcttttgttataggggtctcagccataaaccttgtgatgcatgaggaaaaactattaccttttttttttttctacactaacacccaccattttgcagtgaggtcagggggtagacagaattctaagagacctccaagcttcccagcccctgacacacacacatttttcccagtaatttaatcgaatgctgatctagttgctgctatgaaagaattttggagatgtgactaggatcccaaataagctgtccttaaattacagctattatctggtgagcctgatctaatcccatgagcatttcaaagccagagagttttctccagctgatcgaaggagtgcatgtcagaggtatatgctctggctgacttggaagacagcaggcatccatactatgaactgcctatggaggccatgtagtaaggaactgagggtgggctctgggagctgagagaggtccttggccaacaac

SEQ ID NO: 47209 - DNA, 633 bp, Homo sapiens
cccttgttaaatgaatatacctgcagaaaaaacaaaatgcattccagcccacacacgttagagacatttttcaaacacctagatgagagaagatagctattacaaataacatatttgttggagagagtgaagaaatcacaaactggcttggataaatactattaaatgcatactttgcctgccgattgcgacagtttccctctggcactcactgacaagcttggctccagctgtaaattaggttgcaaaacttccttgtcagagaactcgccctgtgaggaggactcaaccctggctctgaatctgcaaggacagaaaaatcaatgtgacagagaagcagttgcttgtgtcaggcctcaccaaggagagaaaaggctttaaattaatcatgatttaaggatgctggcaaaacagtgcaaaggcacattcctggtgtctctgagaaaagggaaaaaggagcctggagcactttgcggatgctccccacagatcctgcccttctgttataaacagaattcagtgtttactgtggggatgagaaagcactatggatctcgtgtaaacagataaaatgcaacaagactgataaaagtttggtgaagcagtattggtcagtgtgtagcatggggataa

SEQ ID NO: 47210 - DNA, 4115 bp, Homo sapiens
tccctccttttcagtgagattcaatcctgctaattcagtttaaatctcccatacccacctcccccactcaccaacaaataaacaaaactcctagtttattgtcccagatactaagctatccaacccatgggttaggtattcaacttagctttattaatcatagggctcattactttatgtatcctgaaatacaaactccaccccaccaccaggccacagtttaccatgcccctcattttactttatctccacatccacttcttccaaccttgcagaacccaaaaacagagatcatgttttcctctaattgactctgagccacttacagaatcacaaaagcaccaaaatagtttcctccctgtgttttccctccatattcaatatgtcaaagtgattatacatcctgtgtccccaattaacatagtagcattcaatatttagtacactctgaatacatattggtggaataaataaaataagccatgctggaactttatctgttgttcttaaaagaaagagaagctgccagaattggagcttgatccaggggcttcccaggggaccatcctctagggaagaagatgttggtttcatagttacttggtccattacagttcacagaggacagtgcacacaaaatcagaaaagcaggtgggcttattgcagtaaacgtgaagcaatagctagtttcattttgatagcacaaattttagaccctaccctaatgaaactataatacatgaataaaaaatgaaagttaatatatgaaaatgaaaccaatcattacaataaaaggatgggattgaggctatattttctaattatgaaaaatctcttttatgatatttaatgtgatttaaaggattttcaaaacacttagtacaaatctctatgtaaatattaatgtttaaaaaatattgcagcctaggcaacatagcaaggctctgtctcaaaaaaaatattgcagactattcacttatgttacaacatatactcaagtgggaaattccctggtgacaaaatatctagaaagtatgccaataaacacacacacacacacacacacacttcaattaaaggaatgagcccatttaatgaaatggactatctcttatcatgatatgtaaatagcatttcagttatagaaaaaatactacaaaaatcactagagcaatttttttcattgcaagacctgaacataaggtgtatatttttgtaactgtgttttttagaaaagaagaagtaaaagaagaaccacctgcacctaggtggcaattccccatcacagggggagggagccagtcttggccactgggcacagaagagactgcttaggaaatccctgtgagctctaaaggaagtaagaaaacacagaaatgcaaagctccaatactcccccacgtatcacagactcctctaaatttcccactgggtgtttcaagagttggtcctggtgaggtgggagggggagaccaaagggaagagaaaaaaaaaaacaaaggccatttgtggggaagctgaaaggacatggaggtacagaggcagaaatggtggcagtgacgacatatggggcaaatatgcccagaccctcagcctccccactgcacccacactgtccacaggacaatcggggcaggaccttcatctgtgtcctccggttgaggggttgcctacataatctgaaagagaagcgtgaaactccagaaggggaaaaaaatgcctcttttgaaggggacttcccttgccagtgaggtttcagatcatgttctgtaacagcctactggcctgtgacagggcctccaggaaatgagacaactcagatgcagagtactaagggaaaaatttcagtagtggcttgagaaaactaactgttgagtctgacaaagcaaagttctaagatagtgcgaagtataactagggctgctttgaaaaggaaacccagagagcaaggacaggtgtcgcttagttttaaaaaataattagagcttctgtttattgaaagcctaccatgtgtcaggagccttgcatgccttatctcttactcttacatcagatgatatgaaattgacattattatccccattctcatctgtaaagtgagaaaacatactcagataaattaagtaaattagccaacatcatccagttccagggccacgattcaagccaaggtccatccgataccaattactatgcttctgccttggcccttctgtcattaattcatgtggttcactgtgaaagtcatggacttctttaaacctagatttccccttatgacatggtacaagtaagcctaaagttagataaaatcatagcctatgatgagctaatttaagcttcaatctgtctctgtcactagccagttctgtggaaatggacaactcaagtaacttctccaggtctcagtgttcccatctaaaaagtggggttgtagtgggcctctacagctcttgacttctatgaggcacaccgagtcctcacatgccaacataaaaaaggaaatttcaaaattgtctttgttttttaacaaagtatatgaggggattattccagttctctatgaataatatatatatttaaagagcctatgtttaaaaaattaaaatgctttaaaacattttctagatggccttacaaatggaaaaaaaaagtattcctagccaaccctctgtcagcagaaaggccacacagaaaaaagcaaatcacaattctttacccctctcagcataaatcattactcaccgtgggaaaatgattacttgccaggaagtagaacctatgaatcattatactgttgtcctcgacctctgatagagcaagaattaggggaaagactgaaaagctggggagtgaactctgatttgacaatagttccactcatggcatcgtaaggcaatgaaaacagaaagctgatcgagccgtagggctgtcaagtcccggtgctgctgcagtgcacgtctgaacccagagcagaatgacatgggcccctgactttctgagtcactccttgggtctgagtcttcacagccccagagtcatttatcagcaaatagaaacaatgccatccctgggcttgtcccgacagtcaacctacttgttaatgcctgtgtaagagatacccagcttggaaataggagcaaaagtcacaaggaagggattaagttgcctaacatcagcattcatttcctaaaataaaaacacatgaaagatagacaccacaaatatgtgttcccttgtggtatcagcaaatattgtgctataatttctctactgttgctaataagctatggcacacaactgtaaattctttttttttttttttttttttgatacaggatcttgctctgccatgcaggctagagtgcagtggcacaataatggctcactgaagcctcgacctttcaggctcaagcaatcctcccaccttggcctcccaaataggtaggatagggcaggtgtggtggctcatgcctgtaatcccagcactttgggagtctgaggtgggaggattgcttgaagccaggagttcaagaccaaatagctagcactacaggcatgagccgccatgcccagctaatttttgagtcagggtctcactatgttactcaggctggtctcaaactcctgggctcaagcgatcctcccacctctgcctcccaaagtgttgggattacaagcatgggagccacctgtaggtgggtgaggagcagtgatcctcccacctctgcctcccaaagtgctaggattacagacatgggagctaccacacccagcttgcaaatactttttatattatgtttttctacatggcctttgatgtctttagaaaatgtttgttttaagcaaggatctttttgtgactaaaagcacagaaaaatacaacatagttagtatgttacacaccaaatatacaaaatcctagaaacttatagaaggagataggaaaattgatcttataactaatctgaatattgttctctactttccttaatgtttttaaaggtagtgaaagtaaaactatattgttctgatgatgtagaagggagaatgtttaaaattcctcccagtttcaggaggagatattagaacctgtctttattatactgcattga

SEQ ID NO: 47211 - DNA, 2202 bp, Homo sapiens
tgaatgacataatcattattaatttattgtgaataatataaatcattcataaaaattcatctttttaaagattatatttattaataatgatacatttatatatttttattattctctttttctgtacctcaatagatcatgtgcaccccactttgggaccactgaccttttagcttgcttgtcatgatagaagtcatctactaaaggaactctggaatgtttgagtctctaaataatcttgttataatccaaaatagcctgttaatttcaagattgatcttcaggcgactaaactaagcactcataagaaatcacaaggtaaaagagttcaggtcactgtttggttagcttacaaagagttacttctatttccctaaatgtttttgaatcactgccctttggctctgaagggacaactaaatatcatctcatcagtaatgccattttccctcaagtgtctttaacacagagctgtttctctagaagagaacaaggttatataaatgggagagaacatgtctccctccaagatagttatgcaacatggggaagattccacagaagagagacaaggctgaacagagatgatggttcttttacttggacatggtgataacttgagtttctagataaacttgagtactattactcagtactggtactgttggaagaacacataaaacgtctggcacaatcagtgaaagaaatatgggcctgggtccgggtgttaaatgggtacaggaaagcactaaacctctcacactcactctacacctacatgccccaaatcacaaaattcccctacttgaagagcgtacactccccactcaattcacttcccatttaaaagtgtatttgtttgcttttctaaagattcctagtgggttggggaaactcactaaaccactattaacacttagtgtgaccttcaggaagaggcctcatggactaataaatgtgctaagaggatctgaaatgttggtgatgggggtgtggcagagaaggaaggatgaaagggagaaacccgtttagaaagcctattgatttctaagggggtaatgctggggtgggggaaagtagtgaataaattatctgacaggcaagcaacatcattcacacttttgtttagaaatcattctaatgacagccaccctaaattttggttctatgttgggttagttccacaatcactgaaatgaggaagtgagctcaacaattttgtaaacctcagagttgacaagaagttatgaaaattcccagtggggttacattagactctagcacttacttaaacaaggaaaagcagggagattccattgatgaatcatatctaagggacaagggaggctgtagggttttctcagacaaaatgggtctttacaaaattggagagaaccaaatggagttaacaagtttggaagatacaggtgtatttcccatagaacatgagaatgaacactaaatgagaaattcttggaaacaaagactgatgcaagaagaatgcctggttggaagtgaaaaaagcaagagcaaagatgctggttctgaggccagaggcaatgttggggaaggatcttgggactgagtcagctgggaccaaggaagagccaaccatacctggatggatttaaggaatgctaagacaggtccaaagttggagagaagaggtaaccagagagcctgaggacagggccagacactgtaataccaaattccttacagaatcagcagggtagcacaatgtctccagggcaggagagatgaccttgccagaggtattttgatggtagaggctgaaggagacagagattaagtgtaccgagaagaagtacatttatgggagactaacatagatgaaaatttcttgtaaagttttttcctgttgaacacatctgctataaaggctttggcatcaaattttgtatgatacaaaaatcataacagcactgaagtgactaataaatgtgtaatgtcaaacctaatgtgagcataaaaaactttgaacaccttagatggtaatttggaaggttctaattgcaccttgacaacaaaacataaacattagagtctacatgatgtcaaaacatctgaatggaaaaagaaaaataagcatctttttctgcaaagcccaaacatttgtatattttggaagactaaatatatatttgataaaaccacagtatataaagtcaaggcatttta

SEQ ID NO: 47212 - DNA, 1021 bp, Homo sapiens
tccaaataactgtatgatgtatgtatttttagtgcctgtattttgtacatgagtcttttacaaataaagtgatttgctcagtcacacaaaggcagaggcaggactcagaactatacttacctgtttccagaatcctagctcatcctacaactggccatttacatagttttaattggttttaaaaagttttttttttacattagaaatcatttctgtaataacattttatcttattgcatcctgttttattacagtgaaaggacctgcttacttattatctccccagctacactggaattcttccacagcttacatgaggtcatcagcctctggccatgtctggaaaacagcaggagctcaactaatgtttattaaactaaactagatctaaaatggatacaaaattaacagttctggctgagcacagtggcacacacctataatcccagcacttagggaggccaatgtgagaagatcacttgaagccaggaatttgacaccagcctgggcaacacggaaagataacaagactctgtctctacaaaaaagtttaaaaattagccaggtgtgatggtgcataccagtcatcccagctacatgggaggctgaggtggaaggatagcttgaatccaggagttaaaggttgcagtgagctatgatcacccaactacactgcagcctgggcaacacagagagaccctgtctcaaaaactaaataaataaaaatagaagagttttgctagagttcagaaagcatgtcagatcatttgcatcttaattaatggtacattcgcttctagacttaagcaaacaagtttcatctacaactttgatttcattggttctttcaatattaacataacttcaatgcagttttattgctctacatgtgtgtagttcagcttgtttattatgactttcctttttgttttccctcaagttgattacctgccagcttttctacacttctttctcactccccaccttgtcactgcctctagacaaacctatttagtcattt

SEQ ID NO: 47213 - DNA, 1768 bp, Homo sapiens
cgagatctgtctcaaaaaaaaaaaaaaaaaaaaaaaaagcgggggagctaaaggaaatatattgagaaacattcagcaagaaatcacaacttcctgatccagggaagatggctggggctttttaagcactgagtctctccaaaatgatgcaagctgatactacatcatttctaaaccttccaatctactcgttaaaagcatatagatttatatttaactaagtatatatactaagtgggagcagagagttctggagtaagggaataaaagaaataaaagaaaggaaagaaatgtatttaaggaactggatctgagctgtgagccttataggcactatctcatttaatgtctaaaacaaaactgtaaagtaggtatgactatctctgagagataaacagagactcggagaagttaattaactttccaacattgtcgtagctactaagtgaaagacccagaatttgaaagcagctgggctgattccacagttcatgctttctacttgctgaactctgctctcatgccaaatggcaccacccagaagatgctgaaaatccatagggggaggatagatttacattgataagggggaaaaaggtctacttaaaaaaggaaaccagcaaatacaagataggatacaataaaatgcaacaaggaaggtggtcaagaaacataacgcatggccatggacaaaaagcaaagaagaggaacaacctgtgttggatggaggtgagctttgatgtttcccccttgagctcattgatatttacctttcctgggctgatgtggaatttggattcattggatgattgctccacgctctctttgaccttgtttctgaatgtgtatacagagtcctgggctccccatgtattgttgtcatttttccttccctaacctccttgctcacctatccttaccaaaactcttccccaaaataccagctaagctagtaattcttgaaaaataacaaggaagtagaatttgaaattgttttgataacatctgtgcaaacagctgcaaattctacagatcacatcatcctgagggctgcagtgtttacagtaacaaagagtcaaaccaaatatttgcatctggggctttacctgttagaacagcagtgaagagttcaaagtccaggctcaaggcaaccatggagggctatcagcaagctttatgagtgtttccctccaggttcctaagagctgactcttggccttctgccagctcctttgaaatggagatatcagctctcctcattcacttatcaaaaacatgtccatttctgggccagataaaattgtttgagtgctcatttgaaatccaaagcagccattcctgctttgctccaggaagacatttaaagttacagactgacaaaagaagaaaaataattgaggacccttatccacaccatcaacacctcttgtttccttcccagaatttgaactgaaaaccctagtatgcagtaataactcggaaaatacccggacattcttctgggaacccccaccacatctttctttcattctttggatcattatgaatcaggattttaaagggagtaacttcattttggttttggtagattgaaattaatttaggccattagatgaaagaaagagaaggagtggaaatgtactcatcctatactaccccaagtctggaaacattactcttgaaaaataaaattcgttttaaatataagtttagcacaaataattcccagtgaaaaataaacccacatttcttccaataaagaatattg

SEQ ID NO: 47214 - DNA, 905 bp, Homo sapiens
cagggagtgtgagaggatggggagccgatagtgttccatgaaagtagaaaagttttctgattcaccacaaagatgaatttgttttccacataatgaatgtgtagtatttgattctccccacactaaagtggttcggtttatttttacatcaagtaaattttagccatctcccttgctttattaatactctctaacccaatttcctttcatttcaaaaccaccaatggtgaggaagggtaaacaataagaacgacatgtaagaaattgtggtatccaaaaacaaaacgaaaagccctatttgctttacctcatgtcgtaatttcccagacttgttcctcttggcagtgttgagctccgcgttttctcccagggagcagagcaacttcttacaaaaccttacttcgtgggttttcccaggtgcctgttatttcctgagcagcacatagtagcagtcccttaatctttacagttctgaaagttggcaaagtgccttcagaaagtcttgtcttatttcaattgattcctttgcaacaacccaataggagtcaggacatgtatcattatttccagtttataaacagcagaaacttccatttctagaggtacataactggcttacactatgataagccacgacatggagatcagaacccaagtctttggagtgtaaatgaggcagtctttccccaggactcctgtcctcttaccaatacatcagtgaatggctggaaataaaaatttaataggcaatgacttcctgctgttctctagtcttgcctacccaaatcctcttcacactcagaaaatgcacatgagacactattgacaaaactaagtacaagtttcgaagcattgacctttgaataggaaggaaaaagaaaaaagaaatttgcaagcataaattt

SEQ ID NO: 47215 - DNA, 1839 bp, Homo sapiens
gagagagagagaagggaagcaccacacttttaaaccatcagatttcatgagaactcactcactatcatgagaacagcatgggggaaatcctcctccatgatctaatcatctcccaccaggtccctcccctgacatatgcggattaaaattccacattgggtgggaacacagagccaaaccgtatcagtacctctgaatgataaaatgcgacaaatttcctatggtataattatactctgcctgttaagtttctatgtcctgcctttcacatagtctcttgtaaggagtagggcatcattcctgccttcaaggggtttatggtctagtgggtacaacagacaaataaatggattgcttcaatttatgaagcagatttaatgaaggggggaaaacagtgatgttcaagcagagaagagagtgatccaaccaaggttagtggtcaggaagattcttgaagcagtcttcttacctctacaagacgaatgttcctaaaacagaacctataactgtttcatcttagtgatccacggtgtctgctatgatacctggtttatttacccttaaaaaatattgctttcacttttgcatgacagttttcttacacaatactatagccaaatagttttcagaactttgcaaacacctacatgattgcactcaatgctatttcttttcaattgtttaagtacttgaataaaatttattaaaccatatgatatgcaaagaaagaaagaaaaaactcttgtttttctattcaaaagggaattttttctcactctctcttctgttttgacttaggagaacttgactctgtgtgttttgtataagtaaaaataaaaacagaattctaccaattaaatgatataaatgaatcgaacaattaaaacataataaaaacagactcatctttaaaatattcagtaagatagatagcctgaattattttacttataatacagagcaagaattgaaaagttttaaggacatgttcttacaaggtctataatttgctcacccaagactgcctctttgactccaacttccttacctcctcccttctccattggcttaagcactggcctggacaagcagtgtgccaacactgcctttttctcagaatacaagaattgtgccacccacagtcccatggctggaggccagggcactgccagcagcacagacatgagtcaggctgtggcttgtgtaagaattcctggtctaggttctttcctgacagttcacttggaattgccaccattgacagtatgatggcaagaagtatgtgataggaaagtatatagtaagacaagtcaggaaacttgactcccagtcttactttctggaggtgtgaccattagcatttctcctaatctgctctgtctacctcatagaattattataagaaccagaatgagacaatgaaaactaaatatttaattttagttagtgagggaaaagagatattctcatatgccattagtcagagtatagattacaatactttttggcagtaattattaaacataaaaatgtccagacctgtggcctagttattccttttctggaaatttagcctcaggaaataattaagaaagtgcagaaatatgtatataaaaggatgtttaccaatgtgctatttgtaataaccaaatattagaaataacaaagtgtctaataatagaatttgggtaaataaattagaatatacctacatagcagagtactatacagctataaaaataatgtaaaaataaagaatatagctattgttatgtgatgtacaaaatgtagttattaaatatacaaacaaatcacaaatgtgtatatataatgacacac

SEQ ID NO: 47216 - DNA, 474 bp, Homo sapiens
atggaagatctacaattttgagaaatttatgtctgttaacagacccagtatatttagcccagttcaatttattagaatatcaattcattctttacacaatatcaattccagaagtaaaacagttgagggagtatactgtctctacaagtcaaacaataatacagtttaaataacaaaaccaaccatgtgacaatccagttatttcaattacttaaacatctgaatcataaaaaccacagagcagcctgaatgatgtcatggtacctggcatccagctggctttgaaacctctgcctaattgaaactgcttctcctgatattgacttaaatagtgaatctgtatcttttgacaaagacgaaccaatgatactaggtaaccgtgagtgcaactgatggacatatgttagttgtaaaaagtgatttttttaattgacaaaacctggattagtgaaaagacagagtcagcacaatgtc

SEQ ID NO: 47217 - DNA, 2094 bp, Homo sapiens
ggactagaagggttacaatgagttaacattcccagagatggtcctgtttggaagggtttgctcattaattcaaacggataaatcttgggggcaggagggtctgtagtggtggggctggatttgtccaaattaattttggtcagatgggattttccatctacctcaaacgtaaccacaataaactacgtctgtgtctgaagccatcaccatctatctttcctttggagtttcaatctttcattttatgaggacaccactaagatggacgatgtatgatgtatccaaccttgtctacaaactgcctgataggcctgaagatggtcatttagaaaatttctgtcactggagaaacagcaaagccttttgtaaagcatgtgtccatatccttcactgtttaccaaacaaggataggaggtcaaaagtttttaaattcatttaactcagaaagcaccactttagtgtttccaaggttaagagacttgaccacggttaactggtcaactaataacaaataacagagctggaaatggaaactaactctaactctccttattcaaatcctttaattagtaccaaggcttgatctccttatctgcttgtgatggttgagaagctaagaaagagattatatggctcctaaggcccctcctaggtttatgactgtagggatttgactgcagggaaagtttcatcagaatagtgacaaattagccaacattgccccacctaagggtgactcagggacattctgctgtttttatctggagtgatagggtcaattgtctctcttctgaggacaacatttaatatacaaaggcacagattaaaatcttatgatctgccaggtgtggtggctgtcgcctctaataccagcactttgggaggcagaggcaagtggatcacctgaggtcggaagttcgagaccagcctgaccaacatggggaaaccccatctctactaaaaatacaaaattagccgggcgtagtggcacatgcctgtaatcccagctactgggaggctgaggcaggagaatctcttgaacccgagaggtggaggttgcagtgagccgagatcgcaccattgcactccagcctgggcaacaaaagcgaaaccccagctcaaaaaaaaaaaaaaaataaaaacttatgatcatcatagaaaaaaatgtccaatgcatgattcagacttgtgtaacatcacataatgatgtcattgtattagtagcacattcaaaatgtttatgcagaaggggtaacaatctggttgttagctgagaatggggatcatggccaccttctctttccccagtaccaccttggcaaggtccaattgcatcaggagcatagcagccacatcctccattttcttcttaataaggagcatgaactctgcaattagcccaccctttttccattttgagtaggatccttacttcaaatagcctacttctgtcccaccccttccctacctatcatctccatcacttatattcatcttctgagcttccccactagtgtccctatctggtcctgtcttccctggttgcctcttcctacctgcacagtttacattacaccctctgcctccccatttctcccttgtgaggtagttactattaccctcattttacagaggaggaaactgcagcaaagagccagtctagtgatattggtttaaacaagagtacgcctttagaagtgaaagaaggggttgatgaggctgtgaagagcaagaaatacttaaagaagctatcccaaaaagcaagaaacgggaaggacactttcttcctcttgtttttcctccagcaaaggcccactttacctaaagacctggaactcaagattcttttttattttttcttcaacttttatttttagctcaaggatacgtgtgcaggatgtgcagatttgttacataggtaaacaaatgtgtgtgatgatggtttgctgcatagatcatcccatcagctaggtattaagcccagagtccgttagctgttcttcctgatgctctccctcccctgactcatgcccctccgacaggccctcgtgtgtgttgctcccaccccatgtgtccatgtgttctcatcactta

SEQ ID NO: 47218 - DNA, 1598 bp, Homo sapiens
cagcactggaatacatatgaaaatcaggaaattttcaaagatgtaatgcaggaaatcaaccagggaatattcaaattgtcacaatgtgcttaatattttaaacatttcttcctcttttaaacaaatgctgagcaaagcttcctgtgtttcaaaagcaacactgatggactctcaaaatggcaagtcccacatatttaccatctcttctcttcaccctgaatttattttcctgactcaaggtagtttccagggcttaaaagatggcctatgtggcacttaaatgtatttatgtttaaactcctgtcttcatggagtagataagaagtaaaatcagccattgtcatggacaacttgctcctctgagttcttaactgttttggggggaaagtgaaatatcaaggagtaagaaacctgttttcagttcttgagagacttacaggccaagtgagaagaggtgatataatgctaggaacataaacacaaggcactgttatctgtgtttctttacctctaaaatgtgggaatattacttacttggtgataagattagaaaaaatgattgttgcaaagcactcaggcacatataagtgctgtattaaagatcattatcattgaagaggaattcccagatgagtaattttaaaagatgaaggtgagctcagatactggggagaagcagctgtcaagaacagatgagacagtctgaggcagccccggaaaagtttcttggacaaagcaggacttatactgggccttgaaaatttagaaagaccagctaaaaggcaaagaaagtctctgtttacttccaaaaatggagattggcaggactatctgaggtgatgacacattccttgaaactcctttcttgggtgatcctgacagactgatttcccatatcttttaaacctgtttttccaactaagtgcaaacattagagatgagctcatttacaatttagtcctaacccaaatttgccccagttcaaactcctccagaggacaacctgagagcactcactagccaatactttctgaaaaacctctacaacagggcaacactctgaagacccttggagatcagtggggaatgggtttgagagcaaactgaagccacctttcaacataagtcaaagttaaccaggcaattcctttctagtcaccatggacaagtgaaagccccacaccccttgagtcaatgggaagtcatttcttaactcccttttgagaaatgctgctggtgattcagcactacatcctggctcactgggacactgtaagtgaaatttcctttaacagccaccccaccaccttgtgaaaggtgagtttcccaggctagaattactcatgagcactcttgctacgagaggagagagggtcagagggtcagaggttcaagggaagtctttccttcaccaacatcggagagactccagaagcctctttgagtcagtactgtataatttactatccaaactgggaacgttttgagaataaaatgtggcaccactaataattgtgcagcaacaacagatggaaatgggggaatttccagtcaaatcagaacacaggattattcttttttctcttttcttttttttt

SEQ ID NO: 47219 - DNA, 659 bp, Homo sapiens
tgtcattatgcaggttttcaagaagaaccacaaccgtttcccatttcccagcccgttcttcctcacccatcctccgccgggacccccttccctataagctgaagaaatcccttgcttggacgacgctagtcgctgggggaggttggggaaagggtggcccagccctcagcggccgccggcagcgcccccaaggagcctccgcctgccacttgctggggactgtcggctttccagctaccgtagaatgcgcttgcgtatcaaaaagaaatcatctttctactgtaaactagagaccgagaccgctcgtggggagggaatctatgtgtttacactttttttttttttttttgccccggagctgctgcgggaattgattggctcccttgcgcccctgacgctgggactgtccccccgccgcgccccgcccgcaccccgcccgcaccccgccccctcgcgcggccatctgcttcgcagtctgtctcccagtctctcactcggcccctctcccctccaccactcccagcccccgtctcccccaccgtcaccccccagcgccggctccgcctcttccccctccccggcccagtgctccgaatcttccccggccgttgccagggagaccagccgataccaggcaaataggcgtaccagaaagaaaa

SEQ ID NO: 47220 - DNA, 4931 bp, Homo sapiens
ctgtttgagaattcagagccagcaccaggagaaatgaaccattccctcgactgcttctcaccttcataagcgaaagattattccttgcaagatcaccaaatgtaaacgagaaaaggtggtctgattttgccacgagtgaaaactttgggaagaaaatgcttattaagctgtttccttggttcccctcacccctcatactttaagtcagtgccttgtctctcacgcacaaaaagcgtctggtacttcggtggcaaggagtgcagtgacagatggaggtatcctgtgtaccattatagaagcttttcctctaacccaagttagacttggagagctcagggatcttgctatctctcaacatacagaacatttctccttagaactgcaatccggtttagaatgtcatcgttgctgctgcctcccttcctttcaggagcacattcgcctgcgtgcgcactcacacacacgttcaaaaagagtccattcgattctggcagtaggctgaaaacgatccatattgacgcgaataacatcccaactgtaaatatggattcgtctactcgaggctgtgtctcatttcaccatagaggaaaattatgtcatttaaaacagtgataaaacgcgaagagtttcgatcttctgtaaatggctctcactttgaattgtgggggaaaaaaatcactaattgggaatagccagagaagggggaatttgttgagcgcccaaggccaatctcaaaatattttatttcatgccaatgtgggagagggaagggagtgtggcttcgctgtttgccgcttttgcattttccacatctggcctacagacctaattctaacttgcgatctcgcttgatgaaattcgatcttcgtggtttaaatacctttcaatttgggacgatttaaccattgcagcagttcaaaaaacaaaccctgagcattatctgtaaaaccaatatggaaaaaagaaagaaaacatgctgcaaacacacaaatcgcaaccattgtctttaacactcgcatacacacacatacacataaacacacggaaagatgggggaggggagcgagtggagagagagagacacacggatatagaccgacgagagtcaatgcgagtcaagttaacgctttctccgccccgatgcacaagtacccccctcccgtgttaattaattccaaacaaagcaagccaatcaagaaatgcattattattttcaagcagagagagacgagtgccatgtattttttaattgatttatttatttggaggacattaattctcggtctgaggctgattttcaaaccgtttgcaaagcgcggctccattgttcgccaggcgcgcagaccccgccccctgctttgtgtgcggcgcgcggattggccgacgcgcgcgggggccgcgtcagcgcccgcgagcccattcatctgtgcacttgggcgttggaccccgcatcttattagcaaccagggagatttctccattttcctcttgtctacagtgcggctacaaatctgggatttttttattacttctttttttttcgaactacacttgggctcctttttttgtgctcgacttttccaccctttttccctccctcctgtgctgctgctttttgatctcttcgactaaaatttttttatccggagtgtatttaatcggttctgttctgtcctctccaccacccccacccccctccctccggtgtgtgtgccgctgccgctgttgccgccgccgctgctgctgctcgccccgtcgttacaccaacccgaggctctttgtttcccctcttggatctgttgagtttctttgttgaagaagccagcatgggtgcccagttctccaagaccgcagcgaagggagaagccgccgcggagaggcctggggaggcggctgtggcctcgtcgccttccaaagcgaacggacaggtaaattctacctgtggttgtggtcatttatttcgtgtctttctctccttccctcctggtggctcccaaggctcattcgtggagaggagtgtggctggattctagtctgaaagttgaatggaaatggatagcctaaattgtggatttttcatagccggggtccccccacaccaaaggagtggttccttagaatcctggagaattcttgagtagacgggaggaaaggagtgataaatcgtctaaaatggcgtggtttggagattggcagaacgtgactagctaggtgccctccttcccccgcccccagccaggtttcatttgtgtttgggggcacaatggtgtttgggtgtctctcgggtttgttgtcgaagctggattgtcttcgagatttctgaactggtggtgtgattgtgtgtggcgggggggggagtcgggaaaggggggcgcaatggggatggtggtggagaaaggcgaggagggaaaggctgtcttattgtatgccgcggcggcgtgccctgggttcttggaaaggtggctggctggggccagacagagggcttcggtaccttttgatgaggctttcccactgtcctaaatctttattcgtagctgtctgtggaattacacatccatttgatttttaaatggtatctgtggggtgggaacactcggtgggtcctttaagaacctttccagatggtcaaaaagaggcggttcgtgcctttcggtcgggattgttcttgtgcgtggcgcctcgaccacccgcgaggggccgcccggcgctgcccggacccaggcagatagccacgattgggtggacccgagaggtcggccatgggtggctgcttcgcaaacactgggcacccaccacgcctcttttcctagagaagagatcgtgtcgcttcgcctgctctaacctactggggaaagcgaggtctgccaagaggctttaaacccgttaaaaatgcaaaatgagccgccgaggcgcgcccaggcttcgcagaatcgcaggggaaggtgggcgtggaagcagaggcgagacctcagaaataatgggtttccccctgccttgttggtttcagcccgaccggcaggccaggaaaccacctgagctttgtttgcggactgttgggctgcgcgatccgggctcgggggcgcctcggcctgcgggcagggcccggctgggcagggcggggtggcccggcgactccgcccctcctcgcctgcctgcgcccaacgcggcgcggtggaggcacagcgccccctgccggtgccaaaggcctgggtgggcgcaggagctcggagggccccgcgcgggcgctcctggctcgagtgctgtgatccccctgggaattcctggtattttgaagaggcctttatgtatttagggcgaaagagggatgtgaaacgtaggcgcgaaccaccagctctggctctgtgccttcttccaaagggcgtttgctgtgtcaactagtccctggcaccttttttcccccaagcccccgataaagcgagggctggcatggttagcctttgcttgctacgtttcggacttcgtctttagggcacttgctgaatggctgggaggccattgccgtacttgggggctacagttgtgttttcggggggtctccaggcagcggtgcccatttcctcgttcgtggggctctcttctgggcatccacccgcgcctccctccccacaacggcgggggtggggtctcgatggccacaggggccttagggggaagcggggcactcccggtccagggctgggggcgggaatggcggcgccccggccgcttcagtgacgctcccgctttctctgccccttaggagaatggccacgtgaaggtaaacggcgacgcttcgcccgcggccgccgagtcgggcgccaaggaggagctgcaggccaacggcagcgccccggccgccgacaaggaggagcccgcggccgccgggagcggggcggcgtcgccctccgcggccgagaaaggtgagccggccgccgccgctgcccccgaggccggggccagcccggtagagaaggaggcccccgcggaaggcgaggctgccgagcccggctcgcccacggccgcggagggagaggccgcgtcggccgcctcctcgacttcttcgcccaaggccgaggacggggccacgccctcgcccagcaacgagaccccgaaaaaaaaaaagaagcgcttttccttcaagaagtctttcaagctgagcggcttctccttcaagaagaacaagaaggaggctggagaaggcggtgaggctgaggcgcccgctgccgaaggcggcaaggacgaggccgccgggggcgcagctgcggccgccgccgaggcgggcgcggcctccggggagcaggcagcggcgccgggcgaggaggcggcagcgggcgaggagggggcggcgggtggcgacccgcaggaggccaagccccaggaggccgctgtcgcgccagagaagccgcccgccagcgacgagaccaaggccgccgaggagcccagcaaggtggaggagaaaaaggccgaggaggccggggccagcgccgccgcctgcgaggccccctccgccgccgggcccggcgcgcccccggagcaggaggcagcccccgcggaggagcccgcggccgccgcagcctcgtcagcctgcgcagccccctcacaggaggcccagcccgagtgcagtccagaagcccccccagcggaggcggcagagtaaaagagcaagcttttgtgagataatcgaagaacttttctcccccgtttgtttgttggagtggtgccaggtactggttttggagaacttgtctacaaccagggattgattttaaagatgtctttttttattttacttttttttaagcaccaaattttgttgttttttttttttctcccctccccacagatcccatctcaaatcattctgttaaccaccattccaacaggtcgaggagagcttaaacaccttcttcctctgccttgtttctctt

SEQ ID NO: 47221 - DNA, 1352 bp, Homo sapiens
gattatagacatttaataaaaacaaattgaattttgtaaaaaaagtacttaatatacctagtaaagttttatatgccaagtttgtattttaataatatttttattttaataaatatcaggaagaaataaacataaaacataggaagtgcatgttcaggttatctattgtcatattacaaaccacctgaaaactcagtcgtataaaacaacaattatttttaaatttttgaacagctttatatataattgacatataataaactgcacattttaaagtgcacactttgataagcatacataggtacacacctgtgaaaccatcgccaaaatcaagatcatgaccgtatccacaaatttcatgattctgtaggtcaaggattagagcagccataagcagagagtttgtccctgatacacgatgtttttggccacagctgtagttgtttggatagctgggggctcctgggatggctagagtgggatcatatgcctggagtcttcattcttctccattggatgtttgctgggatgagaaggtccaagatagtcctttgataatgtgtcgtggtgcctgggctgggatggctgaaacacaggagacctagcagaaattctctatactcaccgccatctccggatagtcagacttctcactcggcagctggcttcccccaggtccgaagttcaagagactttcaaaagacaggaagtgaaagctgccagtctctttcagcctgagcccgagacactggcacagttttacttccactatgctttattggtcaaagcagtctctgagcccacccagattctgggaaagaaggacattgacaccacctcttgatgagataatgtcaaagaattttgaccatctttaaagcaccacaacgcatgttggatattctatattcctgagtgaaagaagacttcaatttggtcacatgaacaaactatttctgtgttttacaagggcaatagtagggaaaggaggtggtagtaatatcagaatttccatcaactcttctgtcttcgttgctgtttatcaagtaatgttcttcaaacaaactggagttgctatgccttgatatggtataaatgagtgtgttttggatacaaatacacatggtaaaggtaatatggtaaataccattgtttatttatattatttatattatatttatattgtttatttatattaatggtatactttagccaagtaagtttttatcaagattccaaaatattattgagacataatcaattcagtaaaaaactatttgagatggacacatcggattctagtgatgttactcccccagggtcttaccctattgggaatctattgtataact

SEQ ID NO: 47222 - DNA, 1998 bp, Homo sapiens
ccacctcttatttcctacgaagtctttctgcctgaaactggaaaacccgaactattattgaggaagtgaagcccttccatttgaatcctgagaaagacgcgctcaaagaacccagcgaacaaaggagagggttggagcccacgcaaaacatgggtgtgataaagccacacgcgacctgagcccccaccctcagtaactactctccagcgcccaccgggaggaggggtccggggaaagggtaagccgaggaaggagaagacgctccggccagaccgaacgcagggtaggggaggcgagcaggcgaggaggagggaaggggacgggaggggcggagctctcgcggccgcggggctttgtgtagagtcaaggccgggatagaaattttgcctcgcgggggacgggtcgagggggtaggaggccgacgcggggcaccccaaacctgcgttgccacgaatggtgggcgggagaagggagagaatgggccgcccccttcgccgccgccaccaccaaggcggggtaggccggcgccgtccccagcggcggccaccttcgaggctgcggactgcacggccgaagggggagaggcaggagacaagacgggcgggccccctgattcccgcccgcaggaaccgcgggggctgcgccaggaagagggtctcgttctaactgtgccgggccgggaacgggttaagatgcggccaaatgtcggtccctcctccttcccacccctcagccccggcgcccactcgcgacggcagccgcggaacccagcgcccggccccgcgcgcccaccccgacaccggcccggccgctcaccgtcgtagtagtagcagactttttttttgccgcctccttgactgtacgccatgggctccccggccaccgccgccaccgggctcctcctcctgctgctgctgctgctgctgctgccgccgcggctcggccgggagagaaaagggctgagggaaacgtgggggcgatagtcccgcggggaagggcaggccggtgggaggagaggagggggcgccgggaaggctcggtaccacccggcagaggtgccgaaagctcggaatcggaggtggcagcggcaccaactcgcgaggagggggccaccaaaccacctcaggaggccgcagggaggtgagcgcatccactgcggcctccacgggggaggaaggggcacggctggagaaggaggccgtttcgggctcgaggttagaggccctgttagggtgaacaacctgcgcaaggcggcgccatacacagtgttaaaatgaggaagaagacaagctttcgctgcgcaagtagatccagggagcgtgcagccgggtggacgttctccccctcaggtctgcgcgcagtggttgcgcctgtccccgagcctgcgcagtcggcgcctcgtagccttggcggtctggacccctcctcggcgtcccacgctgctcccctcccccactgtcgcgaagctcccgcccaagccgaccacgtgccgcgagcccggcggggagagcccactcccgcgccccttccgggcccactaccccgccgggctgtggcccatcgccccagtgcctggtagcctagttttctcgtttgtcgtttgttcacttatttattattattattattattttgactcgtaatgggtatgaggtgtaagggggcctattacggatgttaaggggagagggcaccgctcgggttttaataagcatctgtggagctcatttataaggtacagttctaagcacttgcatttataatatattccattgataatctatttataatatttaatctcatttaagactctcaacaactctaggaggtaagtggcaattgtactccttctttataggtggaggcagattaaggaacttgttcttactgctaactgataagtctggaggtttgaactcattctgcaaactccacgcaccctagctgttccactctgcagcaatgctgctggctagacactggaagattggagcagaa

SEQ ID NO: 47223 - DNA, 737 bp, Homo sapiens
tgagttttacatgaatggcaatgactggtgcagacctgaggtgttatcaactgtgcagtttcaataagataaattaagagcctacatctttatcagtaactgaaccagcgagttcacatagctctaaagataatttctatgcatttttgaggttgcaggatctacccatctgtagttcaataactacagcagcactaaaacctctgatcaatagcccaaagctaaatagtgacccaggagaaaatctatttttgccagaaatgtttgaatcttttcctaagtggtggaccacagtcaccaccaaagtatttaccctgattaactcctcatgtacaattccctcaggatgaattaaaagtattttctacccaatcttctaaacggtaaattctctaatttcccccaaattactgtcgcattagtcagctggccgatcctttaaaacttcatgctgggattctttccaacaaatttcaaaactgagctgttaaatctaatatgctctctaagaagtaagcagatgttttaggcacaactatttctcaatagatcacagtcttgctttggtccagcttgctgtaaaaataattaacaaaaatgtaagacttttcagtattgcttcagtattccaacacatgttaactctaaagaaatggctatggcataaaagtggactcttgattctcttacagaatggatgagattaagtgtagcaaaatgttgccattgataaacag

SEQ ID NO: 47224 - DNA, 569 bp, Homo sapiens
ctgctgggatcgcagctcctgcagccctgcacagggatccctattggctctgccctgccagctgcaataggagcagccagagctctttttcaaaaattattctatcagattaccaagagaagccttaaagaatcttttttaatgaataattgcccattcctttttggagggaaggtggatcagtttttgttcattctccactaagtttatttagattttcatgatcagttatattattgattcctacaatgaatgtcctacttagttcactgttgtgggtaggtggttctctgtgagagctctgtgaggcctgatttccacatgattacccacatttcccaaaagagacctaagttcaggaaggctcaccacacagctgctgtgtgcacgcctccaggttcctctagtccaggttgcttcatctttggtcatgcagctctcattctgggttacccttttggccatcagtaatgcactgtcttttcctggcccagctttccataagtgagtaccttctgccccactcaacagattttaaggcccataaaatcaaggtactttgaggtggt

SEQ ID NO: 47225 - DNA, 480 bp, Homo sapiens
ataaatgaaaagaaaaacttggagaacatgagtgctattgtcctaggtcagcagacagcatacaacaaagcttccccagggccctagcaatgtagagtctaaagcttgcatgggccaggttagacaggatttaggaaaatggaataggatggatcctctttataaaggagcagcagttcatattgataagttttaaaaatgctaggtgaaccttgtcccagtatgggctggcaccaatggttgctggatctgatgtgagacagggttgtgcagtagagcttttggagtcagttatcagcttcaggcaggtggccaacgtatgagtcaggaaagttccagacccatttccttaaagaggaaataaaattgatagcaggaattggatgaaagggagtcagtatacatccttacatccaaatggaataagaagcctgagcagatagtctattatatgaggggaagattaaacaggtatatccc

SEQ ID NO: 47226 - DNA, 566 bp, Homo sapiens
tgaaaaaataaaaaataaaataaaagagaatgggaaggcagaacacaaagggattggcctttggtgggagcattgtaataataaaaaggcagaagttgaaggttcaggtgtaggctgactggtaaatctggcggtgagaagacgagaaagtttgtttaagtctgattgtttctattttttcacagatgtgagacacaaggcatataagacctttgaatggatgtgtaatgtggactttgtagggagtagaagagccaaaatgtgttaggcaagcaaactgcaaatacaggtgaatttcagtgccctttgagatttgcattcatgatcttagataaaaaacaatcagcaggattggtagttctttctcctggttgcagattagttagtgagtttaaccatggtcaaagtttgactaacctagtcagatagtaggaaagagagacaagagagtaaagtaattttcaagggattgacacctaaatacagagagaagtggggaccttctatcatataaagatatcactaaaaacgtaaagatgtttgcagtaggctggagaaagaataat

SEQ ID NO: 47227 - DNA, 1305 bp, Homo sapiens
tccttgtttgttcattctctaaaaagcagagttacttggagctctatgcaggatcctctatttttctatgtctgccttcctacacaatcatatttactaccagggccttaaattctacctcggtaaggttaactcccaaatttttatctctgagcttcagaatttatagacaatcatatatcacatttccacttaaatgtctttaaactatcatgtacaaaacttaaagcttaattccacctctccaaaccaatcttcttctgaacttcccacataataacctcaggccaaagacctggagatcgtccttgaatttttattccccttgccttccgcatccaatagaaaatgctgttgtttcttcttctgaaatatacacagagctttccacttcatcctattttcaatgacactgatttaatccaagtcaccaccttttctgacatagtcccagcaatagcctcctttctgttccccaaattttgactcttgccccacctaatttatcctccagaataatcacccctctattattctctatcacagcactcttttagttcccttggtgcacataacatttggtgtttttgcttatggttcatgcattatctgtctcctccacaagactgtcagttccctaatggcagagatcaggtctgtttgttcactgctctctctgagagacctaatatggtgtctagcatgcaacgcattctgactatttgatgatcttagtcatcagtccatgatatcttggaaattccctgtggtggttttgactgtgtcaactgagataagctggagctatattacctcgaatctcactccttgtgtggtagcttggtaacaagagaaatgtgaggaggagagcaatagccattatgttctgcagtttgtggagggtgtgaggtcccactgcaacacctccacattgttatgatctgatagttcacccagatggcgtggggcagctcctccagctcctgccagacctcatcgacttctccaagttctatgtatctggtgaaggatggcagcttttcttagtggtcacctgtatcactaagtttcaagtctgtctttaccctcctcatgggcatccagcatgtccttgccctcctcatcttcacactcagcttttccatctgaccatcagccctgcaggcccacagccactttaggccacatcacatgcagagacaatagccttcctttcatgaaattctttacctactcacacaattgcttaatgtctactccctatgataaattcttttctatatcactcaaagaggttttgctctt

SEQ ID NO: 47228 - DNA, 819 bp, Homo sapiens
tggcccatatcaaaaaaaaagtctattgttttgtattaagtcatagagagttttgaattctatattatagcagctgacattattcagtctaaaacaagatgtaagcatgaaaataaatagtatgcagcataatggcaaaacattgctgctatgatagccaaaatagctaggccttttgatatcaaattcactcaataagaaaggaaatgtatggaaattaagacaaggtggttactaaccgtgagctatgtggtatcttctaaaatggctcccagttaccagtacctcctgatattcaagcccttgtgaaagcctcttctactaattgtggcctggacctagtgactcatgtttaacaacagaatatggcagaagtaggtgggatatcacttccaagattaaattataagaggctgtgactttgccttacagataatctccaccctgttgttctctcgcttgctcactctaataaagcaagctgctatgttgcaagctgcccagtggaaaggtccctctagcaaggagcaaagggcatcttgcagccaacaaccagaaaggaactgatttcctcagtccaacagcccaggaggaagcgacacctgccaggagtcaaatgagtgagtttaaaagtggatctacctccatcagagccttcagatgactgggtacttgccaacaccctgactgcagccttataagaggacctgaaccaggagacccagctaagctacacctggattcctaaccacagaaactgtgagataataaacatttgctgctttaagccactaagttttacaagtttctccagtggtt

SEQ ID NO: 47229 - DNA, 1556 bp, Homo sapiens
agtatacttgattaaaacaagccataaaattgactctatcactctagcaatgcaaagaaggacaccttaccattttgaggaatcacagtatccataagataaaatcatgaaaggtttttagaaacagtttgactcttcctggtgcagagaccagggagaaatttctcccatgaaatcctataatgtggctttggaaataaacagtgtgctcaataccgtcttacaataatgcatgaaattccacaggactgttcattatattgtacctcaatgcagactggtaacagaatgccctaacacagttcaataaaagcaattccacagagcctaaaatgatgcagtccacacatgcaacgttctagcagtattgcttcatccaagggtaagtcctgtaggacctacaggaataactaaaccgtgttactttgacctagtctggcttgcagtggctattttgttactgttgccgcccacctaccattgacccttcttctgttaacagcacccccagttttcctcagagaattgttgtttctctgaaagcgtgtggtccagagggacctggtagccacctggagccgaagaagacataattagtgcaataagaaccaaggaaccccaattccgggacttaatagttccagaaagacaggaagagttttgttgctgtggctgttgttttggttttggtttactgatgggagtttggagctattgacagaatcctggcctccagacaggaagcaagcttgcctgagaagagaagcagcccagtgggaggcagtcttgatttggaaagtgaagcttaatcccaggagccagccaagcctggcttttcagctacaagagtcaattaattacctttttggttaaactattttgaatagggatttctgcacttacattcaaaatattgactaatgcactttatacctatgctttcacttagcaaagttgttgataagtattgggcagcatttatcaccagaatgctattctgcattccttgctaaatatataactttatgcttcaatgattagtcaggctggtgcaatgctcttatgataggaaagaagacatcccacttcccatatggaggtttactgagggcatgccaatagctaggaatttttttttttttcaaaaacaggaattggcacacaccagaaaagctaaaatgaaaaaagtattaacaaggaagtggagtgacttcccacacacagttgatggaagagtaatttttaccaccactctggaaaactgtttttccttatctactagagttgaacacagtcatacatgtcatacagtaattccactcctaagcataaaatcaataaaagtgcacaatatattcaccaaaacatgtgtttaagaatgtttttagttgcctgatttgtaagggttcaaacctggaaacaatccaaatgttcatcaacacataaatagaactatccaaatgtttatcaactaaaaaacaattgaattagctaaaaaattgtcatctagtggaatgcaaatttgtaaataaacaaaaactgcagctacacataac

SEQ ID NO: 47230 - DNA, 3491 bp, Homo sapiens
atgactaaaggacaatatgtcctgcaacatgtcagaaggcagagtataataacagttaagagtgacagcatctcattaggaagttatttaacctctctatgcctcaatctcctcatttgtaagtgagaataataataatttccttatagccttgtttcaagattaagaagaatgctgcatgtaaagtgctttatgtctcgacacattcatgctcaataaatagtagagattttaagataattaattgaaggcagatattatcaattttgttttaggcatgttggatttgaggtcatgctgggacacgagtgaatatgtgagcatgaccttatttctttgtttgtattaacagtttcatcccaagtgactcttctgtcctgcctgctgttctggactaggacatgctgccaccaggtggcagtaggccattttactaatccaaaaagggaaaggagagctgtcctgtgattaactggacgtgctttattttatgaaaaaggcagtgagccttaaaaaaaaaaattgcagtataaatgaatatcaacatttacataagataaatatcttaaatattaatcaaaatttagggaaatcaacatgtaaatagatgtgttacctcaattaaggttttgtcatttcatctaatagaatcttattgtgcctcactgacgtgtacaaactaggttcctaggtaactcataattcttatcagatgaagataattgcctcttacactttttaaagagaaaactcatgcccagcaactgatggctaggatttacaaaagttaacatatgacttctttttataatgtctccttaagaccaaggcagtcagccttcaagtactatagacagatcctaaaaaaataaactcttaagactagttccaggaaaaaaaaaaaacatccttccagaaaatgcagaaaggaaactgggtcgatcaacttggcctaaccagtcatagggaaagtaagctaggatgatttccctgtgggagctcagggttagcagtgtctttcatgttttcatcacagttacacatgttataatgggtaaaacacctattgtcctcatgaatgtgacttggcaggcatcgctgtcacccacattggcaaaacaccttcaatttgcagggcacactcataaccacatttagtcatttatggtatctaaatgaaaggcttgattcatgccccttgaactattatggttcggtatgactcacctgcatctacctgtgtttccacaacactatgaagaaaatctctgtgagagttcttcctgtcaaggtaattatttccctccctttccacaaaaccttcttcggctcagtatccccttggttcccaggaagttagccctgctactctttcccactcacatggaatgataaggacaaagaaaaaaaataatgctcgcaattattttgttattcattccttcctttccatttccctcaccataacccttgtctaattcaacatcgcctcttggattatggaaatattttactgcctgttctctttaacattaacaatttatatttactgatcacataaaaggaggcaggcactgttgctacaagctttacatgcatttatctcagactctcccccttgctcacaccaccaccactagatttatcatctccccacatacacataaataaggggtattttgcttatggagtaaaacctctattaacctggaaattcaggccttccaccatctggacacaagccacttcttcaactttatcctccctatatcagccctctgttctagctaaattcacactgctatcactacttatactggcaatactaaaacttgactgctcagaattcctacagtattcagtgactactcctctgttttgatatgtagcatacaaaagctagcgatgcattttaaattcttgtttagattattctttgtttacacttgaagctacagacctccccagcataaggacagagtctgataacttcacatatctgtggcatgaagcactggccacatgccctgtggagctgttaaataaatacttgttgatgaaacattaatacattgtacttcaatttgggcattttatatagtcttctggtttatactgaacattgaactttagataatgcctgtgtttttgtgtaatcttttatttgagcttgccacatagcttgcagtataaagtgtttatgggagaaggcttatctgctatggaccagttgcaacacagtttctaatgttaattggccttagaccacagatttcaatctgacctctctcttttcccccaaagagaacactttcatgtgaatgtaaagatcaaaaatgaaattgatttttctgtcctttaaaacacaagcatatcagggctgtacacatgtaaaaaatttgtgataaagtgacaatgtcaaattaagtatcagaggtaggacttgcagtcacatagaaatcctttgcttgggtcatttgataaagcttttttgttgctgttattcacctttatagtcatcataaatgagaaattttgaaggaatttctttagaggggaagtcaggtgaactcatttgtgctttcttcactgggggaggtgactatttataaaagaatcttgttatagtctgaatccacttccctgagtctggtaatcaaaagtatgcaattcctcacaagaagtttacaaagaatacaacaaagttcatataaatattcaatctcagggcactttttttgtttcaaaactatcctctatttggggaagaggaaaagacagctaatattgatttctcttttaaaataaaaaacaaaatgtgtgcctatataatgacatttccaatcatcaagcctgaaataaaaatgtaaattttaatgcatctgctttgattttgtacaacatttgtgataatgtttgtcccagaaactagaagaatatggatgggttagagttgaaagctttaatcattaatttctatctttgtcacatccaaagaaagtaaatgcacttgatcttatgatgcctaggaaaatgccttattttataaaataccacaaatgttcattcctattctctatacgaataagctttggggcagtactatacttcttacatgggacactatatggttatacaggacactaatttcagaaatgacagtcccaaagaccaaagaccaaactcaagtcccaactcaaataccaaatttgagtttagtcagctagtagtcattgtgtgtaaaccattcaagaagggtcaataatgtcaagtgcagcctgctctgtattccctggatccaggtttctcttgcaaaaagtaaaaaagagggagcatctttcttcccttttcctatactagaggtgatattcaaaatattttatgactgctatagcacacacacacaccatcagaaaagacaccagcaaaactagaggcttatgtctaagcttcagccctggggcttatcattttaacactcagtgatgcac

SEQ ID NO: 47231 - DNA, 1070 bp, Homo sapiens
gctcccaacacggagaattgatcagtgtttgaggtgatggatatcccaattaccccgacttgatcattatatattgtatgcatgaatcaaaatatcacatgtacaccataaatatgtataattattatgtatcaaaaataatgtagataactaaaatgaggactaagagctgaccaacaagtattacgatatggaatttccttggtgacttttgataagagcagcttcccagagtagtaagaagaatagtctaactgcagtgtgttcaagagagaatgagtcagcaaaattcagattgtgggaaattccacaggcaaaggaaataaattgcaaggaaactaacgcagagagaagatccatattaaacaagattaaaagagacaaatcaattataacaaatggactttatgtggactcacaagcaaccacaagacatacccacaaaaatctggattcaaataaaccataaaaaacaaactataaaactgtgagaagttttaccctggatacttggtaatattagggttattttattttttaggagagattattttataattatgtttgttcattaagagtatttcatgtattttagatatacttacaaaattatttacagatagaattatatgatgcctaggatttgcttcaaaataacaccatagtggatggaaattgggtgggaagaagaaatattaatataaggatgagataagattgccatatgttgagaattgttgaagttgagtaatggtacctagtggtactgttctctatcctttttatatgtttgaacttttttataataaaaattttaaaattgtggtgtgggggatcagagagagaagaaaaaaataggaccctgagtataggcaactttttcagagttttgctatatagtagagattcgtgtgcagtaatcagaggggaagtagagtcaagcgttgtttttaagagttaagaatactgattttgtttgctgctgcttggccttccaagaagaacttagtcctgacaaatgatttaattctttactaatgagaatttaagttatagtggtgacctcaaga

SEQ ID NO: 47232 - DNA, 1810 bp, Homo sapiens
tctacgtaataacattgaatgaaaattctgtttcaaagttatagtctgctaatataactcactagcaaagtattagcacatgacagctagtaaatttggattaaatataaccaatgcccaaatcaaaaaatgaagaagcaaggaaaattgtcatacgctgtatgtagctattccttaaaatcaaactatcaactcattggcttattagtagaattaattcttaaacgttttccttaatcactactgcactcacttttttttcaacattgctggctaacaagtactcagttgttgcaacaactacccgtaaataaatagcgagcaggtgaatatctgtttctatggtttctatttacagtagagagagattgtttgacacttgctactttccttttataatagaaatttaagtattaccttctccctattcttatccttcttttcctccatcctgtaatgctatctattttctttctcttcatctggctctctttctcaatcaccattacctctaagttccattaaaagtgatttaatttcagttttccattctaggaaaaatgtctggacagaaaaggaacaagcagtgggagagctgcctgcactttttttaaaaataagtttcagcaaatatactttgcttcttaaactagatcagcaacttaagaagaaatgacagagtttccttctttgcttagacaaagcctctttctatgacaaatcttcgagtaacagggatagttccctccacctccatctttcagcagtgtctgatatctgtttgataagataagcttcaggaatgcagtgagccaattacttgggttgccctcagcaaatatacttacttactgctggatcaaactaaaacattcattacttatacccctatttctatacatggtacaaaattacagcaaacaaaagttggtaaaatataatgttacattgataacagaaaacatgagtttgaaaaataatttgggatcatttttctcataataccctctgtacaaaattgaatcacccaagtgtgctcaatgacctgtcagtgtacaatgatgcaatagaaatggtaaaacaaaatcctttatatcatcccaaaactgttgagcaaagattcctgagagatagtcttcccttgcttttgagaaaattagcttctgggaagtgactttcaaagtcaaacaaggtggtaatattcttttgaaaaggaaaaaaataatactttattcattaaataagtaaaataacgttacaacatagatatcaatgtacttaactgtaaattaaatgtacagatatgttgagcaaattaaatgagcactgtcctatgtcaacattggaactgtgcagaaacatatgaaccttctctaatccaagttcaattatgtattcctttaactcctcaaaaagcaatttcatattctacatgtgagcatgccaagagaaaaaaagttacttttagtattattaacatagtatttctttgaatattaagtcagcaaataacacatatttcatgtttgtcctaatggagaatgtcaggcacacccaaatgtatcactgctttctttgtagactttctgaatcactcagccaagcaaagctgttaacttactctaataccctacagaagcctttggttttaccacctttaaaatgcctgtacagccaatttcccattagcaaatataaaagattttttatattactattaagttgctttaacaaatttaattttaggtccctgaagtctcttacttggttccactgcctgtacaacaggtgttcgtatttttgtgcattg

SEQ ID NO: 47233 - DNA, 486 bp, Homo sapiens
atattttataatactaaaaattttggataatggagattcatgctttaaaagatggtagaaatttccttaagcaccaaaattttcaaaagtgaaaaattatctattgggattctttggtctccactaattactatgtaataattttgttttctatcattttcccgggacctactaaatcaatagcatgtctttccattttcctcaactatcgcttccctgagttagactttgataaaagatagcacagagttcaaagtgattcatcatcaaaaccagtacctgtctgttttgctataaactattgcataacacaaatgcaaggtattgagttgcttttttattgtttttatctgaaatgtcactgtattctctggattataacagcctaaggctaaacagaggaatactctataaccactgtataccagaaaagaaaaccagggcttcttaattcattccctatctgtcttctaggaaagtgcaaag

SEQ ID NO: 47234 - DNA, 2521 bp, Homo sapiens
attagtatcttctaagtgttgtcttctacattagccctgtatattcccatcagaatgaaagggattaggattagagctagggctagagttgatatattaccctggaatgtttcaaaagttttttttaaaaaaaagaatctgaagtttagatttgagaatatcattaagggaagtcttataatttaccttcaaacaaaatgcaattttattgctaaagtgaggcatgagttattttacagccaaagagaaggtacagtattaaacacatcatttgtttattttgaaaatacaccctggacctgtggatgtacatactgtaattgaagtcatctcaacaacaattactggccagtttcacactcacttagcgggggaggtgtgtttcaattagtggtttcttgccagtacttcctcatactttttaggcaactctttggacattagggggttgtagagaagtagaaaggaaaactcattacccagccctcagagagttcagaaattaagtataagtttgtactactcacggctctgcctgtaggcttctgtcctcagccacgtagttagaaggaatatagccttgtagttgctgactggagccatctcgtcttttctccaagtgtctggcaaaccaccagccctcatgcaaagtgtccagaacttgaagtttgtcacctgctcggaagctcaagtcctcagcagtccgagcctggtaatcaaacaaagccacaaagtagtggccatgcctctgtgactggggagagcaaagggcccctggattttcaatcacggttgacttgtctgcctccgtggacaaacaggggagatagggttctaggtactcccagagcctctgacagatgttgctcattgtgccttggtggggagaagaggagcagggcttctccctctccccttagtctctgcgatccaccttatcttccttcaccaggcaactttgaagtcagcaccaactcaccatacttcggagagtatgcaaagtcccgtttcagatcagtccagcagctgggttgcagcaagtcctacctggagagacttaccggcttgctttctgtggctggaggtgctaccccgaggcaaaactgagcaggagctgggcagctgctcactaggaaggtgtcttttcttcttatctgcttaagaatcccacaacaaaaataaaataaaattaaaagggctttatttagacaaatatctgagaacagaatggtgccatcttgccttttgtcccaataaaaagttagcaagaggaagctactaacccctggtaaaacctccacgtcttgctttcgccaggagctctccccctgtttcaagtctgttcctgtctttcgaccagtccggatctggacggctctctcctttttgctaatgaataaccaaccagcagaggctgttgcctttaacattctgagctatgaacagactgtaataatttccccttacttcctggtttctttctgtctgtgatctaaatggtattctgacctctttacccctcccatctcccacacccaagatagaccagatcctttaccaaactgttaaagcagccgctaaaatctatattccttttgtttcatcctggagaaacaggctagcccaggtagctttttgtcttgttatgttcccagcactgaaattcacggcagagatttttttccctgacaaataggagtagaattgttttgccaccactaggggaaatttaaaaaggcaaattaaagtatttaggtatttcttgtcagacacagagcaattggaaaagaaccatcaagtcactcccttttctcattaccaagaatagattttaatagcttcaaagaatagtcacagtctggaaaagtaagaaagcagctgactaaaatgctgagaacccaaaatgttgctttttcccacagacatttaatttcctatccttcaagtactatttgggaaacacacacacacacacacacacacacacacacacgctacacaccaactaggtgaccagtagagaaaaaaagagtagaacagaaaaagagctctttgcacactgctgtgggggctctttctgctaaactttgacctccagatctatgctagttcttactaacttggcaagaactcaggaactaatgagactgacatcaggacagccatctctagacaggcagtggtttttgcttgaccttccctagttcggagcagctgtctcacaaatatgtgccctggcaaaaacagccgggcaatgagtctggcagatcaacgtacggtcatttatactagtagacagcattgcaaacttgtttatgaagtgtcactgatctctctataagactttttttttatttctttcttaaaaacaatctttctaaatgttgtgagacccttgaacctggctaacctattcctagtacaagctcataacttctgttctttttcaaattgcaaggcatttagtaatcagaataatcaaactcaagaaaaaggaagaaagaaaggaagaaagaaagaa

SEQ ID NO: 47235 - DNA, 561 bp, Homo sapiens
aaataaaaatattaaccaaaatgacttgatgtggtattcattattgctgttcaaagatatttccagttctcatcttctaaaatatggcagaattgtactttcctaaccctttgaagataagcaaagacatatgatttgctttgagtgatgaaatgttagaactgattacatcacttccaggttaaataaacacacacacacacacacacacacacacacacacaagatacctttcagaggaaatgtgcagttacacgtgtttccttcccctaccatgatgacaatgttccagatgaggggtgatctattagcctgcattgttggctaagcaaaacatggaagagcttccactgacctgataggtacatataacctaattgaaaaataacctttgttgttttaggcctcagagaattaagggttgttatcctgtaggagtttaacctaacccatactaactgataacctagataaggtgagatatctgtggaaagtataacagggaagaaaaacatccaaagaaatagtaagtaaactgctggtaagattagcaaaaggctt

SEQ ID NO: 47236 - DNA, 471 bp, Homo sapiens
aaagaaaaaaatagaagtttattcaataaaatatttcaaccaatgtacccaacacataccaggttatatttatgctacaatattgatcagccctgccctctgcaccctagagtaaccccaaagcctaagctgccccacctaactggaccagctttttctgtgtgttccagcatgctaaataaacttcaccattttctatgtgagtcatgacacgaacacgtttggaaagcactaaactatttatggtaatttccactgagttgtattactttgccttggggcagagaatacagagtagcccacagatggaacagaaagagaagatacagaaggaacagggggttagagacagactggccaacagatggagacaccattcccagcctaattcttatagattggaataaattttgtggactatactgaagtgaatgagcttttacaagaatggccactgtagcagatggcact

SEQ ID NO: 47237 - DNA, 1485 bp, Homo sapiens
atatttctatgaagtttctgatgccctttcataaaaaattcattacaataacaaaataggattatcaagtaataaccaatattggtttccataacaagtatcatcttgcaaaatggttcttcacgatgtctgatacatttattttctaacgcactccagggtatgaaatagtgaaaggtctgtcttccacttaaccacttaggaaaccaaggaatataaagtttttggtttaaaccactatcaaagatcacgtgggtgaaaagaccttccaaattgtaggctaactgggtcagagggatattagcggatgaattttttctatgatcttactattcctcacacaggggtaaaaggtcaggtctaacctcatgatctcctggtttccgaggcgccctgaggcgatggagtgtcccggttaattttgtggtagccctcgggaaaggctacgtgcctacaggtctcagctgtgcagcagcggcaccgctcctggacccctactgccttctgggctcctaggcttgcggaacagatcaggagtcgccggcattggggtaccaggaggacgcgagctgactacctgactccgggcggcgcaggacgcccgccgcgcgaggggcgggggctaagcgtatcgaggggcggtgctcgagggcgcgggaggcgggagaggctgccgcgccgtgtgccctggcagccgcagccccgccccgccgcgtccggcccggtcctgtcccgcagcgtcccgccagccagctccttgcacccttcgcggccgaggcgctccctggtgctccccgcgcagccatggctcagcacttctccctggccgcctgcgacgtggtcggattcgacctggaccacactctgtgtcgctacaacctgcccgagagcgccccggtgagtggcgcgggctccggggcgcactgcgcgcaacctccatggcggctggggcttgagtttcctccaggtttgggcaacggcggacgctgcccggggcctgcggcggccgagtcttgccgcagagcgcggcctccagcggcgagaaggggcggaagtgtgcagcctccgctccgcgccggtgccgtggggaccggcacatttacctcagccattagctaatgttgagagggatagggaagaacgaaggaggggcaaactgcgcaagaccgggctggggaatcggtgatttctagggccgaggaggggcggggtcagggggactagggctgtccttgaagatctcacgtcgtggaactttctctgcatgtctttctggacaccagctgattgtggacacagccacttgatttggtacttgcattttttttggctgcatttttctgtttgcacgatcaaccacccatcagtgtttaaactgcaatctgggagagatgcgtagtatatagtgtagtgtattgaaaggaacactagttgaaaagtcattaagatcttagccctagttttaccttctatcaagagaagaaa

SEQ ID NO: 47238 - DNA, 1409 bp, Homo sapiens
gaatgcatattgatggatacttttttcctctgcagaaatctaatttggtgtttcaattttcctttatggcttttgagttcagtgccatgcttaaaagactttccacattgcaagattttaaataaatttatatgtaaggttcaaaaagaagctaatttgatttgtcaaaatttatccaaattctgaactctcacttattaaaattctgaacaacctcaaacccctgaaatgtaataatgtaccatgtgaaaaaaaaaaagagtaaagatttgtggtgaccctgtagttaccatagagtccccaaatgccttgtaactgggcagtattgcacaagctccgaaagcagaccgcctgcattcaaattccgattctgccacatggtagctgtgtgactttgggcaagttccttagcctctctgtatctcggattttcagttgcaaaacgggaatcatataggacctgttcctggggtcattatgaggattaaatccattaatagttataaaggtcttggaactgtgtttggcaaaaataagcactcagattatgtcagttattatgaggataattattataaataatctattttaaaagtgatattaagttaaaaccatggaaatgttttaaaataaatgttaatgccataggaaattcctcagatacaatgctgaacagaaacacaggtaaaaaaaactatatatggtatgcttaaaattcccacagagttagatatgaacagaaaatatactggcaggaatcacatagaagtattagtatgtttggcagctagtctacaaagatagctctctaatgaatcatgcctcccagaagtcacacctttctgttttcttctccttgaaaatgagctggacctctatcatcagtaaaattcagcagaagtgctactgtaaaattcctaaaactaggtcataaggagccttgcagcttttgcttgtcttaaaacacttgctctgggggaaacccaccgccacttaagaagtccaactactgtgagacccaaatgcagagagaaagctcaagctagctaagtggagagatgtttgtttcaccagctctcaccgttccagccagcccagcccaggtgccagacagtgagtgaagaaacccttagatgattccatacccccgggcacaactccaagtgagaaatgcctggctgagttcagtcaaccctcagaatcaggagatgataatacattgttattttaagccatcatgtttgaggtggtttgttgtgcagcaataaaaaacccaatacaatgaattttctctagcaaaagtgtatcatatataagaaaagcaataatttaatctctttaaatagttcttttttccatataggttcaacagtaagagttgactgtattttatgtatgtttttatattg

SEQ ID NO: 47239 - DNA, 2961 bp, Homo sapiens
agcctgggggtcttggcctcggtgccagcggattggagtggaaagagacaccacccggccagaggatctgcgttcatattccttgacaagcccctcatttcggaagtaggggttgccctgaaagatgaacttgaatttgcagcctgctctggggtgtttaagctcctccacctccaaattgatcatgtacctcagcatgtcttcatcttggccactgatcataggtgacagctgggggtggtttcgaaaggcagtaacccagaaacctgggatattctggataatgaaacttctgcgctgcatgtggagccttcgcatgcggccaaacttgcgctcaagctgaaggaaggccctgtcagcctgggcatttacgtttgacaactcttgatcgatggcctccagtgagtccatgcagttattgatcttcggggccctgggccgtgtctcctctttcacccctcctgccacctttttttccttctgcactaccttcttttcctccatcgccgcccctgcttctccctccttttccactgctgccgagatggcgcgttttttagtcgtcacttccttggccttcttccccggtatcatctgagaccccaagccccctgcgccacaggcttctagagccttctgcccagcagggccacggggctctccaagctgacagccatttttctggctgctgtcagcagcctcggcggcagaggctgcttccagacctttcgtagaaggtggagcatcctcctgcccggctttggtcgctgcaccgccgcgactcccggcaactgggacgcggagcgcggggccacagtcgacaggatcctgggatgcacccccctccgcaacggtctccaggctgcccccacctgtgttcgccatcacctgtgtcgcctcggtttcttcacggagcccttggcactggtctcggtccggatctcctgaggcatggtcgggagcagccaggccgccggtttgggcgagagggagcttgttgcccccatccaggccgctcattttggaagaagtcagactagtgggagagggagagttccttgtcctccgcagcggccgagctctgcccgaaacgtctagcaccacccctcctttactctcggcggtgctaccatggcaactggtgatgtcagggcggtagcgtcgtaacatcgcgcgagaactctctgcgcggttgactacgcttatcaatccatcgtattcctttgtcttcttgtcacaaaaagaatttcgtcagtctggaaggggagttttacttacgtaaatggatgtagaccagactcaagcatgtaagaactgtgttaatgtggatttctaagcctctgaatgaatttctaaggcacctaacctattgtttctgaaaatatttactttaaggtgagttactgtctattcaagtcagttcatagggcttctcctgagtaggaaagtggattcacgaactcacaggccttccttcttttaaggtgtggattcatggctattaccaaagaatttaaatgagcagagtttgattttaaagagaagtgttgctgtgttgttatttttaaaattaaggagcagctgaaaggcaaacttctctcatcctaacaagacataataaaggaatatttcaatttgtcttacagattttaaagtttatataatttggccaacatctacaaaacaagtggacaatatttcctcttcacttttaacaaagagtagcaaaatgtttttccttacgtagaggtgactggcacacgagcacaaatttaggcttttaagcattactgaaagaaatatctcaggggattttaatttctaaactgatgcatatgttcttttcctcaggttacaatcttaatctaaaagtggttcctgcttcataatgcctgtggacatgaagctaacaaatcttttcaaaatgtgttcatgtggtaattcactgcagcacaggagcaataatcagctatgtgcaggcatctatgctactgtctcttaaaatactttaaaagtaaggttagttattgtctattcgagtcagttagctcttacaattcatttgatagtgattatcagtacaatatattagtttgttggagtgtgagaataatggtgttaatccttagaaaaatgcaagaccaaagggaaatttaaattttgcatatttatgtttaatgtcaaatttatattcaaataaacggttatgattataactctttgtaaaagaaactccattttaagccccccagattatgatcactttcaaatacaggctcagaagtacagatttagagaaaaaggattcctcttagaggaatacatcatatatactgagacttctagcgagggaaggagtgtagttctggttcaactaagataaagtactgatgaaaggtcactggcagacaatacggagaaacagcctgccttgcaggattttttgtatgcctagtcagcctacccaaggacaatgtgtccagaatgacctctttactgcctgccagctaatcagttatcccataagaaatatgcaaacaagattcacacagcagagagcaattatttttctctccctctttcctctttgtcttaataaacgctctttttttatttgtggggtgaaatcaatctattgaggtatcgtctttgtaaacacataaacagcgtgctataattgactttgtgactttgaattattgacactgctctgtttcttttccaaagaacctttgcactgttgaaagagtaacttttccattataacctgagtcaagatgaagagaagcagggaatactgaatgaaagttacttttccatgcagcaggaaaaaacaagtttgctactatacaaatttatagaaaagtataaaattacatgtgaacttctttttctttttgtgtgtgccaaagttttttaaagatttatatctctactactcaaagcattcccatctctagc

SEQ ID NO: 47240 - DNA, 1840 bp, Homo sapiens
atcctctttaataatctcagcaattttgtcggactctggaaggctgtggtctgaaaaccaagtgaagaagctgcagatgaggtcttggtttctgcgaatgaaggactggggttcatgccccctgcgccatataattggagtagaaagagacaccactcggccggaggatcttacctcatattccttgacaatcagcttgtttctgaagtaggggtttcttctaaagaagaacttgaacttgcaaccggttctagggtgtctgagttccttcacctctaaattggttatgtaccttaacatctctgcatcttggcccctaatcatggcggacaactgggggtggtttcgaaaagcagtcatccagaagcccgggatattctgaatgatgtagttcctccgctccaggtagtgtcgacgcatccgcccaaacttgtgctccagctgttggaaggccctgtcggcctgagcattcacagtgtccagttccagctggatggcctccagagggtccatgcggagagcctcatgcaaaggccagggcccttcttcctccctcgcctcctcctccaatctatcctcctccgccacttctatttcttcaccttctggcggctgctcctctacctccatctgctcctccattacctccttctccgccaggccttccttcaccacctcagcgctctccctctcagccacggctgctgagacggtggcgcactttcctgtcttcacctcctccgcctcagcctccgcccccgccgtcagctcagacgcggatctctgggcgccacagatttctagggccttctctccaccctgaacgccctttttcaggctgcggtcggctgccatcaccacagaagcggctgccaggccttcggcgggaggctggccctcttcctgcccggctttgatcgccacatgaccgcgacccccaacaactcggatctggggagtaccgccacggcccgcggcatcctggggtacgcccccctcctctgaaggcggtggaggcgggagcgcgacggtctccgagcctccctcacccggctccgccatcacctgtgtcgcctcgctttggtcgcggagcctcaggtactggtgtgcgtcctggtcgctcgggacttggtcagaaataatgatgctgtgggtttggaggggagtggtcctcttgaccccatccaggccgctcatgttgctaacagtcggaccaaccgcaggcgaacgcccgttttcctcagaggccgaactgggagctaaccgccgctcgcaccgcccaccctacagtctcactaacatttcagcggcggtgtcgtcaggactggagatctcacggtatcgcgagaacttgctgagcccgggattggttccgccgctccctgccagccaaccggattctctgggctttatttctgtgaatttacccatagcaacagtaattttacctacgtaaataaatgtcgattgtgctgagtctggaagcgcggacgacccaccttgagatgcatctagcgactgctcccagcatgtaggagcagttgtaaaatcacagccgtaacagtgcctgctctccagtgtctgaaaacaaatgtttttctggtcttcacttttttgaggcaggaaggtaaatctattccctgttactccacgtaactagcagcaaaagacttctctttaagattaatagcaaaatgtttccccccttcttagtaaaagtgacataaaaatatcaattcttgcctctacggttactggggaaaaaaagctactcagcagcctcttaccactaaagcgatgcatagtattcattgctaattttcgatttataatctgcatc

SEQ ID NO: 47241 - DNA, 1159 bp, Homo sapiens
gctgcgagcggcgagtcccgggagaggaggagcgggagaaagcggggcgggcctgcggtcggggttcggccgggggagggggtccccgtttccctctcctcatcctcgtctcctctggctctggtgacgttgcggtttcctcccccctccagcggagcctcagcgcccgccgcgtccctccctccgcccctttcgcccacacctacccgcccccgccggcccggctctcagtagcgtcgcccgaggctgcagcagcgcatcccggggcatggcgcggcgggggcgcggagggctcggttcggagggggccgggagcccgggcgccctggagtgaggaggaccgggagctggctctggaggctgcggaggcgacgccggagagaacgaagcctcggctgggagcggtaagtggaggggcgcgcaagggacgagctggggcgcgcggcgcaactttcttcgggagtttcgggcgggtagccttcggggctgtcccggcgcgggcgggagacggagagccacgtccccggctgagagcggagcgccgcgggttgcgcgcccgggcccggctcggctggactccgagagagcgcctgacgcgtgaagcctgagccacgggcttccccggcggcggagcagcctcgaggggcagcttttcgatcctccccacccccttgaacgccgagcaccgagccgggaacacgatgagaacctggagatcgcattccgtgcgtcggatctggccggcccagccgcgatttcctcgacggtccttggggcctcggcttcactctgcggggttgggtggcacaccctcgcgtcctcctttccctccgtaccccagccatttgggggcaggggaggtggcggcggcttgtgtgcagatcctggcgctggcaaccctactttgcggctgcagaagccgaggaagagctccccaagcctctcccagacgctggattccagcgctcctgggctccgccggcactcggagaaattgttagtaaacctcatccccgaggcagtcccggggaggggaggaggcgggggcttgactcacagactgggaagctctgaaagcgatgccacatgggctcaagatctgtcggggctggaatctgagctaagtttgtgacctgagaactttttcgtttatatcgct

SEQ ID NO: 47242 - DNA, 2238 bp, Homo sapiens
aaatacagaaaagtgggcaacagcttttgagtattttcttaaaattttccatttttcgacttagcgcaataatataataaaggaacatgggatcctttattattgttaccatagtttttaatatcattttcataaagctaaccatgtttatttagccattttcttagcttttgccatcatggttctttgaaaattttctttgtaattgctgcaatgattttggagatcacagatgcatgctacttgctcaagtttattcttggaagtcgtattaccaaattaaaggttctcaacatttctcggggtactgcaatttttacattgcatatgataattgttattactgagatctacattcctttcatcaattcacaaatacacaatcacagacatcttgagatctatcatacgtccagctgcgttcatttcacaaaatcagaagttaagcctaaagatctgaaccgagaagccggacctccggtctatttctccctcctggatccaccccgacttattaagcagttagaccgacccttccatactcattcaaggcagtgcagagcttttgctcccctgcccagtggaatctacactggtcccagcctctcgtccaactcccgtaggacgccaagcaatacggagttcgagaagctcagaaatctcctgagccccaccagtccacactaggttgcaagcccgcagcacctacgccacggcgtcaaaccggaaaccagaaaaggtgaaggcatcggacgcccctcgccccagcccggccaccagcgacactatccttcactgacgcgcgatgccggcctttcagcccagactcatcgagcgaggatgcagcgctgagaggcttctaaggctcaggccctgcaaagcccaggagccggctgtaggtgtccttggcgaatgccagaccgcgcgcaccgtcccagcaagtcccgagcgagtgtgggacaggcagcaaatcagtgccccctggccaggcagaacgagtcgaacgtggaagtagggagcaggcggaggccggcgcggagctgcagttaagcaagccgggtctggctttgggccctgggccttccagccggggactctgcgcctgcgcccgcctggccgccgcccgctctcccggcgcggcagctgtctgggctgctgcgcgccgcctaggtgtctgggcgatctatgggcaagagcaagggccacgatgacagattacggcgaggagcagcgcaacgagctggaggccctggagtccatctaccctgactccttcacaggtgactcccgcggccgcaagcctgtagccgccccgaggtggagtaggacgggcaggagctgccgcagctctgggcctcataggttggggtggagaaggggaccttgaggccgcgcggccaccttgccctccactcctcaagttcttcagtcacttaccagcaacccagtgactttttctccttctctgcttgttcccggaaatctaaaagtccgggtgatgttggagggtgtcaggcctgaaaattgagtcgggattactttggtttctgtgtaacctacagcaacctgagatttataatacattaagagaaaaaatactccaagtgcgattcgtttttccacagccgcaagaatgttagttttcacatttttagctttattaaggtagaaactgtttttcatacgatgctgttttagtttataggattcagagtgctgttttcagttactcaaatcggttttgagagtagcatagtccctgaagtctgtcgggtttcttttcttatgaaaaaaaaaaaaatctggcattcagcagaatgcctaatggataatgtggcccaaatttccgttctgctataaattcataggttgttagattggaagggagattaaacatcatctatcctggggctcctgctccaagccaaggtcatgggggttcaggaaagctaagtggcttgctctgtactgtccgccagcgagttagcggcagggctggtactgagttatacgtccagaacgcttgcctgttctttcactttccagacatatgggacttgggattcagctccagctgagattgagagagcagaagattacttggtaggttgggctaatgtaaaatattataatgagaagttcattaggtataatttagaggacgagatttctctattaagccatgcttcggatgattataaaaatgctacataactatatcaatatggctcctctgag

SEQ ID NO: 47243 - DNA, 1272 bp, Homo sapiens
actattattatcgctctacacataaagaaattctggctcagacaggtcaccacaagcagaaaaaggtggaagccaaaatgccaaccccgtcgtgctccacagcctgtactctcagccccaagaataaaagcagaagtggtatagtagaaaaaagcacttattccagagtcaagagaactgggtaataatttcagattcatcattttgggtaaggaatctcatctctctgaggttcagtcaaagactactgtaaaatccaaaggtagttatttttggattttatggacaaataaagtactgactactgacataaaagtgttaaaaaaataattttaaaaaaagcaatcacttcgccaccaccttcctactacaggtcatcgttcagctaaagactatttaaaatcaaacaggaaaagtaatgacactatcacttcatttaaataaatttacctttaaaatacctccctacattgtccttatttttttcatttctctccagacaaatggatacagtctctgattttagaaggcagttctcccgagcccccagtgggattaatgtcacacccggagtttcttctcttccggtggctgggacacggtcagacacagaatgatgaacttggacatggactcagattaagcgggtaagagacaagagagtacccaggtgcctcagaggaagcgagtgagaggcatgaaggacccagtgccaagctaggtacgtggtgggtgaggtcagaagaccgcaaggccgagtctcccaaacgttccgcgccaaaggcacaagccaggcacacgaaactagcaggcactaactgggtcaaagctttgggcctggggaataagggaggggaccatcaattcttaccggcccagaggccagcagctgccacactgagctccgctaggcttcccctttgggcctcgctggcagacgagtgcgtgcgcggcgtccagtacctctcctggcctgatgactgaggccaggccttcccaatacgcagagtttcacagttaaccgaggaaagaattaggaacttccaacaccttggccctcagtacctcattcaaaagcacttccttactcccacggaaaagaagtaatcccagaatgcgccgctccacgccggtctctatgcagtgcattctgggagatgtagtcttttttttttttttttttttttgagacggagtctcgctctgctgcccaggctggagggcagtgcgcgatctcggctcactgcaagctccgcctcccgggttcacgcc

SEQ ID NO: 47244 - DNA, 601 bp, Homo sapiens
agacacgctatggctctttagatgaaaagaaatcagctaagcacacatttccattcacagaatggcagtttctacacatgcatattcaaagcatctttaaatgttcagttcctattgtagctactccatttctgtagatttttttttcttgatggtggcacagatggactcacaattggagagaatgtaaaaagattctatttagcaggtgaactaggaaagctgacctaccttcctctggcttggttgatcattacctttgatcaaataaaagaccacatgttccagctgcccttatgccctgcttactgcagtgagagaaggaagggagagaaagacagaaaaatagaaagaagacttagacaagatagatattatgtaaatttgcatatcatctgaaggcaagcatgtttcatgtgtccacattcttcattaaaaaaacaattagatgagttgaaaacagctcacaatacatttgtttactcttactgtagagtaaatgataatctcttgtaacaaattcaaacttctaaaattaaaaatgtcatgcaatatgttcatagaaaaaaaaatctggatgctaagataggcataaggaaga

SEQ ID NO: 47245 - DNA, 503 bp, Homo sapiens
ggtaagaagatactttcacctccatttattttgaattctatgacagtctttcttttccatctctcagagataaattttttccttttttttttttaactgatatgttaagcaaatcaatgccctaaaatcagaactctgacgtttaaggaaaaaaaaaaagccctgtagttttttttttctgtactttgaggggaaaaatagtttaccttctcactacaacagatggttttaaatgcagtgattacaaaattctgaaggtaaaatggtttaattacaaagtcaataccgcctctaacctgggctgagtctttagcgtaaaaacaacagacggagcagtgcaaacgctgggacaatgtttaaccagaactttgcatagctactgcagtagggctttccatggggctttagtaaaccacagagctcacgattctgggtttctattcattgaattaccttaaggtgaagaatcataaatgtgtgtatatatttcactatgcaatata

SEQ ID NO: 47246 - DNA, 533 bp, Homo sapiens
ctgtgttaacaatagtaatatgaatggtatagtcatccttccatttcttttcagccaagaggatggaattcagcataattcacagcctctcaacttctctcagcaagaccctcagagttcagaaatgccactgcttaatataccataagaaagaagaaacccgtaaagaatcaattatagtgtttccttaaaaaatatcttggaaagtttaaaatggcaggttagaaacactaattaaatatcacacagtgctttatttgctttcctaatctcagaaaataaatatgtactcaatatgtgtttactcaaacacatactcaagaggtcaatacaccctcattctcatttctttaaacccaaggcaaggaaatttaaagggcactcagctagtcctctttttgtgagagtcactccctaaatccagaacattttctcacctggcaccagggtagtacccactgagggctctgaccaggggcctggcctctttggagaacttgctctcacagaaaccttgtatttcatagcactct

SEQ ID NO: 47247 - DNA, 1113 bp, Homo sapiens
cacaacgccaagcagttcaaaccttcctcttattccagcaaggccagtaaccacactggggacagagcactcactggctcctatggcaagggcaggaggcttccattgaacaagagcctggtgagagccaaacagcaccgaaagctcctgcgggcggcctggcagagggtgcagctgggaggatgagccaaagatgaccaagttaccaaacccaaattcttctatgtgactcaggtcacatcccacgatgaattcattaaaagacaaagcatcctgttggaaaatgaccttgccatctgtgacaagaaagtcattgttttcacaagcaaaacttttcacatcagcaaaggggatgcgaggtaggatgagatgggaagcagagccatccagaaatgttgacatgaagacttgggcagtgtcattgaagtaaatgattcgcttggcttgtggcttgattgcaaagtcctttaacgtgcaactctccacaatacgcacagcttctgcacaccggccagatggtacaggaaggtctgctctataaatgccatctctcaggaggtaaaagacatacctgacacaggaacaaaagaaacctcatgagattcagtccaaaggttgatgagtaacctcctcagctaattgcttcattctgttgcacaatcagaactatgtatctctgatgttgctaagtacaggattttccaaggtagaaaaaggtaatttcctaagatatactctattcgtttaagttacaagttggaacattagaaaatttcagcctcacttgtaatgcttagtctcttaattattataagtgactttttaaggaatcaaaaaattcaaaaacaggaagggtcttttatttttttgagacaaggtcttactctgtcacccaggctggagttcagtgacacaatcacagctcactgcagcctcaacctcctgggttcaggtgatcctcccacacctcagtatcccatgtagctgggaccacaggcttgccaccgtgctcggctaatttttgtattttttgtggagacagggtatcaccgtgttgcccaagctagtcctgaactcctgggctcaagtgatctgcacaccttggcttcccaa

SEQ ID NO: 47248 - DNA, 1373 bp, Homo sapiens
tggaatttggaggaatttcagagtagataaaaggaaaactatctgtggtaaatattacaattattatattgaagcagggaggaagagaaagaaaaatagaaaaggtgaagagatctggtgcatgggaagaggaggacagagtgaggaggagaagctggggtggaagaagatggggaagtggtggtaggaagaaaagcagaggttttacagtaagtctgaactcaatgaggagacaatttgcagtgcaaaaagaacagcatagaggaaaatatttctaataccaggacaatacactgtttcacacatctgatgtcctttaggactactaaacacaaactattgctgaaagttacatgctgatttttatagaaactctcctatcatggtatagagagatggttagaagacaggccctggagctagaagtcctggagcaagatttcttgttccagggcctgtctggttccactggttccatcgcaaaacagctgtataatcttagacaattacggaatcaacccgtgtttccctttccttatctataaaactagaataataaaagtacttatttcatagggttgaatacaaattaaatgaattattggacataatacacttagaaacacacattcagtataaatactaattatcattatcatttctagtcacattgcaaaatctaagcacaaatccattttatcctaatggaaaaaaagagccactgaagacctcagtgatcgcatttgaatgatcgattagtgggtaaagttcattatcctcagaatgagtcattttgtgtaagtgtcaacaacaaagttacatttcataggaccgtagacctttacacatgaaaacagtaagatccagagaatccttgtcctacatcacaaagcattaaatattccataattcagtaattcattcaaacctagaagttaaaataaatctttagtaaattgtgaatgaataggaatagaaagcttgattttaaaatctataatgaacaatcttttttaaaagaaagttttgtttgtgaaaaacatgttatgagctgtattttttttttcattcaaaatgaaagcaactttattcctacaggaaagaaaaaagtttaatcttacaaacatgggctttgcctactggttactaatctgttattatctggtcatatctgagaaataataactccaaaataactttctatgtgtttatccttcatattcatatatatctggagttcacaaaatacatgcacaataaatacctcattttgtcttcaaaataacccaactgggtaagtattattaccttccctatatggattgataaatcaatggtcatagacatgatattacttgcttcaggtactactc

SEQ ID NO: 47249 - DNA, 2009 bp, Homo sapiens
gaacttggagtgagctgagatcacgccactgcactccagcctgggtgacagagcaagactccgtctcaaaaaaaaaaagtttcatctaggaacaagaagaatgagaatctttcaggtttctttgcttcaaaaattattgcactgttaaagtgaggttcttgacaaatcaagaaatggttcttgaactttaacatgtatggagagtttatcaggtggtagagcatgttgttagatactttgatgcactttatttctcttatcccgtacattaggcctgtaacactaaagccctcaccttttctattgttaaaaaaatgtaaaaaaaaaaaaaaaaaacttaaggcaaattaaatttaacagagtttatttgagcaaagaatgattcatgaatcaggcagcattcagaaccaggagaggttcagagagttccacccagcagcatgaacaataagcttttataggctgaacactgaagaaagtatataaatcatctgattgactacagctagacagttgcctcatttgggcatggtgtgatgagtcttttgacttattggagcatggtctgatcagttgcagcctatgattgggtgaagctcaactgtttgttacaaaagtgtgctcctaaattaagtgtttatttatttaagtactaagttatattgcagtgtattacataaaaacttaaagaatggagatattctcagggcaatggcctcctacttatttaatctgacaccatctcctagaaattacacagtaattacgccatggactcccatattagtcatgtccaaccctgatgtcaccacttataagctaagtgaccacaggagttacttaagttctgtctgcctcaattttctcatctgtaaatggaggtaataactgattcaacctcaaaatgttggtacccgccacttgggaaattcctaataaattacctcacatgttttaaaattttgtaattttagaagttcatgttgttcaagttagagggtaaattagtcataatgatttgtcacataaagattcaacagttatttattgcctgctatttgccaaagactgcaaggcactgtgaagacaacagtgaactaaacagataaaaatccctgtcctcatctgggtagggctgggggaggacagggcagacataagcaagtaaaacatgtaagttattatttggtgaaaagtattaaagagaaaaaaggacaggcttgtagggattgagggctaggtgtgcaggctgctattttaaatataataacattacttaccccttacacaattttgttaattattagtgagatattaagtttatgattttaattaaaaccatgaattagtctttcctaagtcaacgaggttatctgctcacaaattaaaaacatctacacaaatttttgtagctatttatatttaatgaaaaagtttatcagcatttctcacatactttcaatgagagcactctgaccacttaaagatcacaagtaagcataaagtgtctcattttagaagttctatcgtaatgatagaagtactatttaaactcatagaagatgaaggagtaggaaaccatgccttcagacttagcaaagatcctcatttctttcttcaatcacctagtctgcatttgcaaatattgcaacatacatttcagacaaagttttcaattgtaccctttgatacaaaatttcacaatgcaaaatggttgcaaaattcctccaacatataacaatacaatatttactttactctcaaagacttggcttcgaaagcaggttagtgcaaaccacaggcaccagaacattaataggaaagagtctagagagtggacctcagtgcagatctgcagtatcatcaagaaagcaggcttgtgtgcccattgcctgcctagtgagtgggaagtaaactgctttgggagcttctttcaagattcctatttaaaaggtcattattaaggaaaagagagtctgccgtaggaattttgaagatatgctattgta

SEQ ID NO: 47250 - DNA, 2648 bp, Homo sapiens
ccgtggctgctcactactccgaggaccaagttaaacatcctttaggttatttagctgcacgtcctggcccctactctgtacactagcttctacatctggccgtgtacccacctgttcactgtgctccagctacctggccctttcctccttcagcttctttgcacaacttgtctgttttggctcctgctttaatctcagctttgatgccacttaggcctttcctagctgattcccgccctcacccctgttacccgccatctaattacagctctctaaatgtgcttcaacagcacctttcatgtcactgattgcaatttgcattgaatacttgcctgattatttttgtctgcaagtgccacatgggtttagccctgctcctgacaagcacactgctgaactgagtaacttttgaatgaatgaatgaatgagtgaataaatcagtgaaggtcctacttggcactgtcatcatcctatcatcaaaatatttcgagtccctcggtgttgctatccctggcatgcccatccccgcgggctggcaaaaccctggagggggcagcctcccaaggcaccgccgcgggctcagcccatctaggaatgactcccgcaccacgcggcgaggggcgggtccggcggcgaggtgtcctgctgcctagcaggttcacgtgtactggtgcaggtggggaggaaggcaaggaaggagcgcagcagggcgcgccagatacgtggaggggagcgcgggcggcgcctcgctcgcctccggcttcgccgtcggtcactgcctgggaacgcgacttcctcctctaggggccgacgtgcggggcggggcggggccgggcgggagacgcccccgcagggctgggctgaaagccgccccaatgggattcggtgcggggcagcgactgcgccccgtcccggcgccgcgctcgtccgcagaggaggcggcccggcccgggcagctgcggctcgggatccgtcgaggggaggccgagcttgccaagctggcgcccagcggggtcatggtgcccggcgcccgcggcggcggcgcactggcgcgggctgccgggcggggcctcctggctttgctgctcgcggtctccgccccgctccggctgcaggcggaggagctgggtgagtggagcgcgtccggctggcggcgggacccgaggcgccaggggcgggctgagggctgcggggcgggccgggccgggccgagggctacggggcgggccgggcctggggggacggagcgcgggaggaagtcgggctcgccgcctgccatccgcggagtccggctctacccgcggggctgggggtgaagtaggttactgcattccttgtcgctcccccaccaaactccttccttcccccaaaaccagagaattaacctggcgtctctgcactttctctccgccgccccccagcccatttcacttagtttccagacttcctgactctgctggccccgtgagaagtgacctgaccccgagggtcgccttaggggacagccgtgtgcagggccagttctttccagctgccttttgacaaagccgctcctcggccggcgctgggccctgccctccctgccgtcgctcctcccgcgcggaattggaatcccggcgtgtgcgttcggggctcgtgcggaatggccggggcacgtttgccgaggttggccttggacgctggcgagcaggcggtgctgccacctcctctcgagtgtcctgctggcgccgcaagttggaatcgtgtggcttcctgtgtatttgagccggtagactctcaaccaggctgctttttctctggagctggtctttgacttggagttagacctaattaacccacaaccgagtttaccctctgcctgtccagcatattaaagcagcaaccccctttaccagccctgggtgtccctatttcattcgtcctcattaattagtgcttttttttttttaatagcaagggccagctttctgccgagttgtttcagtgtttcctctcctcccttgctcctggccgtatatgcctgagcttatttaatggcgctgagtctatccggagtactttgacagctcccccaaccaccatgctttctggtgaaacaagaatcaaaactaaaaccaatgccggcatttttttcactgaactatgcctccattctgaaacattgatactcgagatggtggtggtggttcctaagtttatattacataccagtttgtttaaaaaaacaaaatccccaaaaccctaaagtgattttgtctggtactgtagcacaatactaggcagattgtaaaattgtaataaatacgtaagattttgttaaatgcgtaggacttttataatggatgttttaaatatttttatttttttctcaactcacagtttgaaggtgcacctttaatactatacgtctgtgagaatcagtccagcagtatgttcctgtactaatctggccaaagctgtcacttatctttcccaataaagatttagattttgtatggtcatccaggctgttaactgggcactttgtgagagcggttctctaggaacaagtgtgattgcttagattctttttaaaaacctattatcattattgttatttttgagacagtgtctcactctgtcgcccaggctgcagtgcagtggcacga

SEQ ID NO: 47251 - DNA, 913 bp, Homo sapiens
tttttgagacggagtcttgttctatcacccaggctgaaatgcagtggtgggatcgtggctcactgcaacctccaccccccaggttcaagcaattctcctgtctcagcctcccaagtagctgggattacaggcacccaccaccatgctcggctaattttttttgtatttttagtaaagatggggtttcaccatgttgaccaggctagtctcgaactcctgacctcctgactccgctcaccttggcctcccacagtgctgggattacaggcgtgagccaccgtgcctggccacctacagttttcattagaactcattggaatgctatagaaatttaaggagagattactatcatcatcaccatttggggaggggtgtattactgggttaatataaaaaaatgtgatttgaaaatattctaacttattaaaagcaacaagttactagttacttcacaatattcatccttaggtttacaaagcaagtgtcttcacccctcttatctgtgcaaagaacagaggaatttcaaacatatctaaaacaaacagaataagttggaaaaggcaagtacagcaatctgactcaccttaactttgcaaaaatgcttatcattctacttatttagtctgaattgcctatctgctgtgcttgtgagcaagagtaaagtttataaaaatccatattattcattacagaaatttttttcttgtttctttacacttctcttcctgacttctccatagtatttaaaagtgacacgattaaaaatattttatgaatctcttagttggatttggcttttagaaactgttgtaaaaagagcatttcaattcaattcaaactgtttgtgggaggctgtcacctgccaggtactatgcagtctgttggagataaagggatggatataaaagttcct

SEQ ID NO: 47252 - DNA, 1661 bp, Homo sapiens
taaagacacccacagttttggactggagtatagtagagatgaagtgagaccatgtggtcatgaggaattgcttcaggatgactgcatgagctagtgataaacttaataaggcactgatttctaatatgcaaaataagattagtatatattcttctagtgaaatcttgtgacctttcttataaatgagataaatttatagataattctacatatttgtatgattttctaaagcacatggcagctgccatctcatttaattctcacatcaaccctatgaggtaagtactattatgatccttatgttatatagggagagagaggcagatacattggcttataaatattcagtaggactttttgtcttgataggaagaagaagaaaggaagtccgtatggatcagcagaggctcagaaaacaggttggttgaaaactctatctacaattttatctgtctttgaggaagggacaggatctgctgattgaaagcataaggaggccagtggcccacatttatttggttaaaagacataagccctgtagcctttaaagtagcatatctataaggaagaaatttattgtgttctgtctctttattttaatggccactttacttttgttcaatgtcatcccctatcatttgtcaacatccttttttcttggccactggagtttaggccacgacactgtctgccatcaaggaggtatgacaaaagccttatcagtgaactgaagtaggcccgtgttgttagcatctgcaggcctgtgctgtactttccaccctgagaaagtgagaaaaagaccaggcagggctggtgtgcaggtttcagataatcctgcacaccagccccgtctggtctttttctcactttcccagacacaggtgcccaagcaatgagttagccatggtccagagagagagggcagtggggcaggacccctgagaaagctcagggaccatttgagactccacctccccagggtctaaacaccagctgcagtgtctcctctgcctcacagatgccatgccagtgcagattgtcggagaccatacccagatgatctcacaaagggagaatctgggacctgatgagggcaaaataccttttaaaggcacagcggaaagcatggttagagtagtgtttgctgttgtggttaatgaccttggcatgctgttcttagcacacacacctgaggaggacattgatcactgtcagctgtcaggaggcagcctgacctctgactcatcaaggaacatgttctggaggacgcgcattacatttctgacatattcatttggtttatgttacctttattccagactgttggaagcagattaaatatccctttgccagacatcagtcagctgagtttaccatcagctatgataatgagaaggagatgacacaaaagttagatctcatcacaagtgatatggcaggtaagtgtcatatttctaggactgtgctattagattggaggtgctgcttgtgggggagggagacaggagagaaataaggcaaaatccttttctatttagatagggtccagtaaatctgaaatgtgttttttctgcattctgcacagaattacaaactgacactgagatattacttaaaagccctattcagccagtcttttcacctgcaggggatatagtgac

SEQ ID NO: 47253 - DNA, 1712 bp, Homo sapiens
tgtcaaaaggtggcctacggtattttcatgacagagaatctttgttaggtttgttaatgtaacatgtgcaatggaggctggtgtatgtaattagtttcctcctcagagagatactaggaaggtggacgacagtaccccgggaactcacacgtcggtctagggccctttttgtcccccaccctcacctcactcctcagacatgcactctcccatcacatttgaagccccggtgggcagttttctagggtcgtttcactggagcgttaaatggcatctgacgccaccgggcagcctggggttggatgccatagccgccagcacccacggctcacctccagcttgtggttgatttgagacacagactgggctttgtggcaaagctgtgcaaagcaggagctcaggctggtcatcttctgtcgcccctcataagtgatgtccgcttggtctggatcgatctctcccaggagcagatccacatccacaaaagctttgtcgaactccttctccagcacctccagccaccggaacatggataccccgccaggggcccccacggagcaggaggcgccccctgggccccctccggctgctgctgggcatggaccgcccgccgacatggcgccgtcaagggcctctcccgactgctgaagaccctcgccgccccccgcgcacgaagggaactgctgggactgaggggacccccgcgcgcgcgggcacactccgtcacctcccttcacctcgcgccgttaacgccagcagcacagtcacagaaccgcaggagtaacgaggctgaagctgaggcggcaacggcggcgacacacggaagactcagtcagtcccacctcccagcctgcccccgctgcgcatgcgtagcgaagagctgggcggacgcagccacgagggacaaaataggcggggacaggatgcgatcttggcctatgaaaggcctcagcttgggagcggcctgtcagcggccatattaacaactggcaaactacggcttgaatccctgagaaacggaggcgcgtggtttctgcaccctggttggaaaggcccgaggatgagaaaggtgtccacgtcgcagaaaggaaggatttccgccggtttgacttaacagttggcgggagccgttccaaaatcctcccagaaagttgctgcggtggcatctagggtcagggaggggagagcaaggaagggcggtgtgagcatgcgcaatagccacgtttttaccttctcgattccagttcctggataggatggagtgggtgtacacactggctgttcttggtaaaccagaccccaaattccaggtgtggactgcctaaagctgcgcattgaagcggctgaccagattttgcggaattaatagaagactttttgtcttgtgattaagagtcaggtagacctggattcaattcttaccctctgtcacatactacctgtgtcgcctttcatgtattaacctcgaaaccaagtttccaaattttacttaactcagttgtaaggtaaaacgcttagcgtcacttcttggcacacggtattcctcttaatacaccataggtcacacatttcaaaagcaactacagtagtgcttcacttaagatggggatatgttcttaggaatgtgtccttaggttaatcatcccttagggaacatcctagagtgtatttaaacacaaacctagatagtatagcctactacacacccaggc

SEQ ID NO: 47254 - DNA, 1048 bp, Homo sapiens
gtacagacttaccgcggggaagtacaaaaccattctagaggaccacgtcgaagtccacatggacagaaacattagggtgttaaaggggatgataaggcttggatgggcagtttgcttcaaatagtggcggtcattgaagtcaggcacaatttctattttttttccccactgtaaacctaacccacggcggttggtcaaagtcttgccgaataaaaaaaaaaaaaaaaaaaaagaattaagtgactggactgccaagctgtagagcctctattaagcaatgtacagccaggaaaggataccttagatgagaatgacatgggtagaggggtgtttcaggaacatggctaaagagcctcgctcccagcctcagccgggaggctgaataaaggacagtagcaggatcactccagcctttgaggacacttttggaaaccctggtggattcccagcatcaacacttactgagggctgctttccatccctaggttctttccggcatttgtaatttccaatccacttaggacacttctactcctcagaaaccgtttctgtcggggccgtgagaggagacagtataagacttcctggacccaagggacgccgggtcccctggaagcgcccatcgcattgaagaccacgtgtgccttgctggggtcccattcagacaagtcccgggtcgttcgctcatcgccctccacgcgaccagggggcgcccgcggtatcggcccggctagttcgcaggcgtgcgccttccctcactgcgccggaacgggccacgttctcggacccagaagccgcgtcagaattccacgctggccaatcggaactgtccatgtactactgggggcggggctgccaagggaggaggaagatggcggcgggggcgaggtgaggtgttggcagtggaaaggggttcgggctcggggggcggggggacgcggagcgatggcccgcgccggccgcaggggcggataaaaagccgtcgcgctgcgggagtgggcgggagggagagggggtgtctgagggccacaagagtatgacggggctg

SEQ ID NO: 47255 - DNA, 1333 bp, Homo sapiens
atattataccattatagatgggtatatattataatttctatattaaaaaccagaagatacgtagagatggtgtgactggatagccacaggcaaaagaataaagttagacccctatttcatagcacccatgaatattaattcaaatgaatcaataggcctaaatgtaacagctaaaactataaaactcttagaagaaactaaataaaattcataaaagaaatcttcatgaccttgtacactgtctcttagcaaccattaataacaaactaagaaatttattcttatatgcttacataaagcaagatgaaaagctggtgttaaggacaataagttcttcttcaaagctcccttggtctcttgctttgtacacagcccttcctgctcaatctgtaatgagcatgtgttcctcagcgtaatctgtaactagcaaacctcttactctgtaaacaactctttgtcagcccagacatgtccagacatgccttgaacttgttctgtaggcaactcttcccaccttagcaacaatctcctcctcccctcctctcttagcaaattgcatgttcaccatagttagaaaagtttaagtcttagccagtcaggttagtttagatggtttggtccgaccccagccaatggggaaataacacagaaacaggaactgcattagggataaaaacccttctctcctttgttcaatgtgctcttgcgatcgttactgacgcaggcaccacccttctgcagaagtaaattgccttgctgagaaaacgttttgcctgagtgctggttcttctttgtagcactgagcaaagaattacccatctgggatatcattctcctccgggaaagggtctccaatcacctctcataaggagacatgtcctgctgcctcactgcggtggcctcaggggtaaggaatcagaacccacccagtgtgaagaataaacctggactctcggcaacacaggaagaaaaagcctacagtacagataccacggcgacaaggtaactctgtgcacagaccaaagtaggaaaagccagggggcagcaggagtacttccttggtggtggggacatcctggaggttgaaagtgtgtgaatgagacatacaattaagtgcgaagcgagtgtggagtccagatccatggttccatggtcacctgatatgccttagggtagctttcctgtcgagggtttataccaacctaaattcctgcgagggaagtgaccagagaaggaagaagtgaaagcaaaggagtgcaagaaacctccagttggttggggggcgggggcagtggtgagcctctagggaaaaggtgcaagaaatctctagtaa

SEQ ID NO: 47256 - DNA, 1936 bp, Homo sapiens
gttttgtaaataacagctttggaaatgtatgcaaaaatatctctaagttacacaagtcgagctcaaacactttgtggagcaaggttacttaacaggagtcccagaaacagctaaaattgtagggaaaattttgcgtatgtatatatggcattgttttttctgcgcagaatgtccatataactcagtttctcaaaaggcctcaaaactcaagattaaaagtgcctggaaagaccatcatctttagagaacatatcacaggcaacccaagacttattttttatcccaagttaggggaggatttatcctaattttgtggctcctacacaacttctgagcgacgcaagcatgaaatggctgtccgatacaaacagaccccttcagatacggaatgcagcaaacccctaattttccttgaaggggccacggaaagccaaacggattcgtaacccggttgctcaatggtccattggctactgcaggacgcgccctcctcttacgccgcaggggctgcggggcggcgaccaggttcctccgaggggctgaagttcccttgggggtggctgagagcggccgcatctctggcagcatcctccctcccgaaaacgcgccctaaaagtagcggctgcgggcgtgggcacagccaaccccagcctgcgcctaccagaagtcgggagggcgcggaactgcggcccctccgagacgcgcccgggccgccgccgcagcactgtcgcagcgaccttcccgcccgggtccccgcgagcaaacgggcaagccccgttatcacgcaggtcacacaccccacgagtaaaaggaaaaaaccgggcagacaataaagcccaacccgcgggggcccaagcgagctggaagttgggggcgctggggctgcagcccaaggaggagcggcggggacgacgggatgcggggctgatgcgcctgggacgcggcaagccatatgtcagcccgggtgctgacagcggggaggacactgggcacgcggcggcgtcggggaggcggccggggtaagacaggcctgaggcgggaggggagcggcggcgaggtcccgaggcgccgcggtcggccgtgacccccaccccagccggggcgctgtcccgttccttaccggcagggaagctgcgggctccgccggggctatcccggccgctggcctccggagccaggaagcgcccccacatcgcgggcgagagggccgggtgggccagggacgcccgactcctcacgtccgtcctcctgcttcttcggcggcggaaacttgcgcggagcgtgggcctcggcgacacgggcaggaggaaaggcgggatggctggttaacggctgctcagctacgggcggggagcgcaggggccagattcgccgcactgccggcgcctgccatggccaagccggctgggctgaggcccgcgccggggaagcggcgactcggcggtgacggctgctagatccccggctgagcccaggctcaaaggctccaggcgaagttgcagctgcgggttctctccgccccctccgccggcagagccagagccggggctggggccgcgagggggcggggcctcgggcaatgacttcaggcgtgcgcggcgccgcgcggggcggggactgcggggggcggggactgcggggggcgggtgagctaccccgaccccgcttcgcctccttggcggcgactgggctgtcccgccctcccgccgcatccctctgtctccatcctcccgccctgcgagttgagtagagggcagcgacttggcctattttgcgatactcgcccctcccttgggtaatccctcacgccctccctccgggcacctctgtgaagacacgtggaagacctgcccctggcgtcacaaccgctcgagatgaaaaagccaagccagggcgcggctgagggggcttccagcctcccttggaattaggattg

SEQ ID NO: 47257 - DNA, 931 bp, Homo sapiens
ttctaaatcctgttaacctcactttaaccctgttatttcaccatttaatgacaaggcaaaaccatcagctcttaaatcatgaactttaaatgccaaaaacagtgttgagaaatttttaaaatatgagtgttatatagaaaaagaatgactaacactaaaagcaaacaaaacaggcagttcattagaaaccggtaatatagaatagccccgattttgtacctaacagatctcggaaagggactgacagcccacagagaaacaagagcagcacatcaagacgaaggcacattttcttcccaactgctgtcatttaaggaaaacccatgagcgtgagttctcttatgggagggtagcgacctccatgaaatcatgagaacattcccccagtctaagtgctgcctggctttactcccacatcaacagcaaaacaactgcatagcaacctacatttgcccatttcctcactcattaatgtttgtccagaggaaacacccctgccagtccctgtctgctttgtaaagtatgtcaaacaggagttgagtgtgtacgccagattgggaagtgacacatgctggcatttctcagcgcatgcggctccccactcggctttctggagctctgccttttggcgacagagcagctagagctcctctcccctcccccatttcctctcataaagataaccagtaacaacaattggcgtgtgtgtgtgtgtgtgtgtgtgtgagagagagagagagagagagagagagcgctcccagttggccaagtaccctttacatccagtgacctgttttacgaataataggaaagactttccagcttattttctgcattctcaggagtacgcagagttcacagtaaatgcagagtaacagtcatttctaaaacaaagataaaacactccaaatgctgctctgcaaagaccatt

SEQ ID NO: 47258 - DNA, 4167 bp, Homo sapiens
tgttcaatccactgacaaaaaaagggaactcttccccactctaaccggttttcctaaatgtacgaggggttgacattagctgtctcacattaactttcaaaagaccatcagatgaaaacgtttcatcaaaagccacctacttaagtatgaacaatgaccaaagaatgacaaatcaaaattctgggcactatactaagagaaaactcttccagaacacatacttaagaattaattttctctctgaatttggccaagtttggtggtttcattcacaacatttaaggaaaaaaatgatggtttatggctagcagataataaaacaaacctttataccacttactaaatagaaacggtttaggctcacaaatatgttaaagctttctctttccccgcaatggtagccaagcagcataaacgaatcaacatttcctcagttcagacctcaactggttacaggcaagcaagggctcctcagaatttgctttactaacggtttaggtcagaaatttttttgaagatcaaatgtcttgctatgtctttgtgttctttttcccatctctattacgtttgttgccctgttggtctcctaacacttccattttctccttttatgttcctgctatgctctccaaatggcagtaacctgaagtataactgatcacacctcttgtgatttttttttattctaggacttcccagatctggactccgaagaagacgcccaggtgcaagcccaaaggttacctatttaaattttccaagcacagtgtgtagaaaatcattcctcgcccttcattttgtgttgcttaacggcgctgtcgtgcctaaacgtagatactggccaagagctagatttccaaaatggctttgctcctttcgagctgacatcggtctataacatgcaatttatttcccctgcagccaatctttctctctactccaaatactacccgatacgcagaaagctgaacctaacccagtgtaaacaccgactctcatctgctaaattcagcaaggccggcaaagctgttgcactgatgtaaaaagagcgttaaatcaaaaaaccaaaaaaacaaaaaaaaaaacaaaaaaacgccaaaacacccacacgaagccaactggaggggcgggcgtcggccggatcgcgccctcccgccgcagccacgcctccccgccgcggccacgccccctccgcccctctccgcgccgccgccggcggcctccgcgcgggcctcccagcccttattccactcactttgttctccgcctttgtcctaatccacaccagcaggtggagccgcagttaaagtttccgagtccattccgggagcgggagcccatcttgctggctgccgaggccctcgctggaggaggagggtcagaactcgggtgcagccaatcgagggcaacgctgctacttatcagagcagaatgggctgtagtttagtgaaataggaaagctgcaaaacactgtggagtgctcccgtgtaaataaaaagaggaaaaaagtttctcaagtcgccgctgcacgacgtctggccggcgctggagcgggggtctgcgctctcccgagcggccgcgcgctggactttattgtgccgcaaccagccccagttcccattgtttgtgtttttttcaaaatatggcaaaggttcaggtgaacaatgtagtggtgctggataacccttctcctttctacaacccgttccagttcgagatcaccttcgagtgcatcgaggacctgtctgaaggtgagtgcggcgcccgtgcgcccgggctgtcagttgcgggctgcagacgttgaaagtttcccgggccgggcctcgcgctgggcggctgtgttcggcgcctggcggccgcgggctgctctgcggagggaaacttgaagttgatggacgacggccgccgaggcgcgcgcggctttccgccgcagcccaggcgcctgccgggctcaacttgcgaggaacttgtttgagcggaggagcggaggtagccatgttgtcagctttgtctgcgggcgggcagctcggagacccgcactcgctcccgctgcgccgcctgaggtcgcgccgggctggctccgcgccgccaacagcctccgcgaccctccgggcccgagcagggaggctgggaagggagaggctgtgcgtgtggtcgcgccggcgagttcggagcggagccatcttaccccgagtcgagaattgggccagcgaccccggcgcacggcgcctcctcttgccccgccgcccgcctgcccccggcgaaaggcaggcaggcactctcgagagctcacggtggagtcgccgcactctccgggctggccatgcctggccgcttcggggaggagagcgaggctgtcctcgcgctgatttctggcttcctcgaccaaccagcgggggaggcgggcgcaggctcggcccctccgcgccgcgggctgggcgccggcgctccccgggggccgtgggtcctgttcggccggtcctcctcggccggcgcccgggatgcgccgggatgctggcgcgcaggctccccaaccaacgtggactcctttcccctaatgacgaaaagctaatttcaggaagagaaatagagctgaggtaggaagttacatttaacctaaaagcagaaataagatacttaaataatttccaggacttaatctctgccttataaatagtctgaaggaagactttcttcaagaccgtgttgaaatctaaaataactccacatccaaatacagaacacaccctaaacataaaacacaaacgtaggctaggaaattaaggtcaactcctcatgtcagtccaagaattcttggtattttttctacatatattttaaggtcttaaaaatacgtatttttaatatctttagtaataaatatttagaaagctaaaacgacaattatctttgctttaattatcttttactaaagtaattcagtgcttcatttgccagttttgaaggggaaatagtttaacttcatcgatgagggacatactttgaactagaagtatatgtaaaaaatgcattgaagatgatttaggtaatcgtggcatgtaaaacttttcattttaaaaactagtttttaatctctaaaatgtatatatcatatgtaaggttaattttaattataaaacaatatatattcattgtaataaacttttagaaagttgtacaggcatatataaagttaacagttctctgtactcagtgccttgccctatctcctttcggtaatcacaattattactttaacatgtgcccccgtttttttttttttttttaaacctatatagagcataaatgcacatacatatatagggcaaattttgaaagatgattcatttattaaaataatttcaaataggccattgataacactaaggggtatttttcttattactctgaagtcatttgattactctcctatgatactactattaatataagcattgcagctaccaggcccatttttcacacccaacagtaattttttttttattgccaactgcatataaaaatagacaaaagaaaaaccattgatcggtccattccaacttataccacactgtttttcagatataccaccagaagttcttcaaattacaggtatttctcaagtgttgccttccattttaggagtcagctctgaacaaagaagatagatgactcaggatgtcgttacagggcttttacattgcatagatgaaaccagccattcataaagccaaaacgttccatttttaactgggatccattcagaacccagctgaatcacatcagggatttacagtactggtgtcaaaaacatacttatttccaatggtatatttcacttcctaggcaccattactgagcatttatttagtattttaaaaaatattttaagctgagtcatactgaagctgcaaaggaatctttcaaaaaggtgccatgcctgtatactccacctagaggctatgtggattaaggaaatttttacttagcaaaggcttctaataggttccatacttttatattacagttcttttaaaaattctgttcttaaaattaaactatagaatttttttttttttaaatgagacagtgttgctctggcactcaggctggatggagtacagtggtgcaaacacagctgctccctgcagcctcaacctgggctta

SEQ ID NO: 47259 - DNA, 1944 bp, Homo sapiens
gtacttaaatttgacttacttcatttgtccaacatttattgtactggactctacaaatacgaatattaaaggagactgctataaagttcacagtttatcatcctaagtacgtgttatacacgctatttgctatattttgctttctctgagaacctactattccgcaaggtgtgaaacgtttaagaagtacatatagcagttaggtcaagaatcctgaccactataggaggccagagtgagagtaagaatgagtaaatgtatatccaaaacaatgagtggaaataaattacggcctccacggtaatttgtttttggttaagcaatataaattcagccaagtgtaaagcagaaaaagcacttgggaaggaatatctccacaatgtggactttgcccaaaaaaaaaaaaaaaaaaatctggactcccaacagtggctacaagagaatcactatgattctattaaagcatattaagtttagagccacaaatttagcaatttgaaaaacagctccacacaaggcaggaaaagggcagcagcagaattcaacgttcaaattaaggtcagattaaattttgcctagttaggctagcatttctatggttatatggaccatcgttattcattccctttcaacatctatgcaaaactgactaatcaactgtgttatcagcagtttgctaaatcaataaacgtacctactacccacccagatagacactggagggactttttgttttgagaagggtcatttcacaactttcaagttctctttccttttcttattgaatatttggggtcaaaataaaatcatttgctttactttgtcctcttgaccacagcgaagcgtcgaaaagaagacaggagagtgcctaactgcactggcatcccccagctgtctccgggaatcgcggcagccccgccccgcccgcctgcacctgccgggagccccgccccctccgcgcgggctggcgggacgcgcgccctcggccccgccccactccctccgcccctctcactgcgggggcgcgccatttcgcgcctccgggccgctcggctgccccaggggcgcctggcaaacgtggagtcgctcggttttggaggcatgctttccaaactttctaattcacagggtctttgcacgcagcccctgccccacaacaccttggcagtctctgagacttctggggctcttctcccgggcagctcccgtgcctgtccggtcccggagttgaatagtttttgaagtaatgagacgggaacgagacttgggacgaactggagaaaaacataaccgcgaaaggaggaggcggctatcacttactggctgtgtcagaagtcgccgggaacgcgttgctcccgaggccgaagggcccagagagctccagccaggcagcgggttcgtctccggcgcaagaaggctggtgaggcggagtgcgcgcgtgcacgtggccgctcgaggcgccaccggccgcggggacgcgcgggctgtgtcgggcggcctagcgcctgcggctctgccgggcctgcgctctcgaccgacgccgggccgcgcaccgcctcaacttccctgccccggcggctcttccggatggagacgaggcagcggggcggggtggagcggagcgggcggattggggcggagccaggagggtcccgggcggggagaggggcgggacccgagcagtgacctcaggctaagtggccagagcagggttgtgcggcggctcagatcggatcttagggtttgttttttgtctgtccaaggaatttgcctaacccaaggccacagaggatctcttctgtgttttctgacacaagttttagaattttaggttttatattgaggtctgtgatccaattagagctaatttttgtctgtggtgcaaagtatggatcttaggtcatttttttgtatgtgaatagtgtcatttgtttagagagcttt

SEQ ID NO: 47260 - DNA, 613 bp, Homo sapiens
ctaaactagtgttcttcttctgtaatgtccgactcagtattaagagataagaaaaaatattagaaaatgaattttgtttacaaaaggtttagtccctaagacaaaccaacgtactcctgtgtggcaagccctttaggagggctcgcctgagtaataacagctgtctctgtggaccacatgtcctttcttttcctgagtggagtttgtgagccaaaggtcagaattagactgttcacaactacggaaggattttttttaaaaggctgtgagagtggaagaaaaagcaactggccggttagacatttaaagaggattttaacaaaaccttttaacccactgtaaaccaaaaataaaattccaagttccccaaagaactgaatggactcctcctcttggccaagagcattccaaagttaacctgataaactagttcaggctatgataggaagagggggtcacacatacctcattataccctcctcccactggaattcagggacagctgacaagaattaacattaaaacaatgattttaagactgatgaaccagactttttgtagcaataagacaccaaattccagccaggtttacaggacgcacagcaagccctga

SEQ ID NO: 47261 - DNA, 790 bp, Homo sapiens
acatgaaaatattatgacatttagctgacagcacacacaataaacctctgttacaaagtgaccaagtcatagtatacaaaatatacaacctataaacccagaaagttccacagtaagtatacagaggagacacaggttggtttcacccttatcaaaaatttgattcagatggtaagtaaaacatggttccaacatggaaaaacaataactctgtggtctcttattgaataagtaatattagaaagaaggtagacacagggaaaagaggcctgttagtgtggccacccccacctagaccaatctagagagctgaatgtgagtccaggttgagtaatcttcaaatggcaccgagccctcacaccttctatacttataaaatgagagggtcagcctggtcacagtctaaagtctaaacctttaatctttttttttttttttttttttttgagatagagtcttgctctgtcactcaggctggagtgcagtggcatgatctcaactgcaacctccgcctcctgggttcaagcaattcttgtgcctcagcctcccaagtagctgggattacaagcacccaccaccacaccagctaattttttgtattttttgtaaagacgggatttcaccatgttggccaggctggtctcgaactcatggcctcaagtgatctgcctgccttggcctcccaaagtgctgggactgtaggcatgagccagggcacccaacctaaacctttaacctttaactctaaatctttaactctaaaggaagtccctttataagtttgtgacca

SEQ ID NO: 47262 - DNA, 2145 bp, Homo sapiens
tttaggtacagtcctaaactacacgtggccgaatgtgaaagctaactgctctttgaaaattatccttcgacagacaaacattgaactagatgcaggcacagtgtgagattcatctaataagccttgtttgacattttgtcaggataaggaatgactcattaaatgccccaaattggcactcaaggtatgttttaccctcctacattcctctgaaagttgattcttcccttaactgagtaaccagtaagatactgtttaattccgagtcatattaggtaaatacggtactgtacttcaaatggtactgtagtgtgatgcctcgtggagccctggcagatgcatggaagcaacagtaaagtgatttagtattgtgaaataaaggaactaaatcctaatttgttctgtgctggtttagccccaaagggcaaggaggtgcaagtcccttacgcgcaccgtgccgctgtgctgtctagcttaaattcatgttgccagcgttccaccaaagtttgcagggttttggaggtgtctccggctgttgcttcggcggaggagtagagttcccctcgctgcgggcgcagggcgcactgcctcccggggagacaggtgagtccggcgcggcccgcacggggtcgccacctgccccgtcgctgccccccttaccttggtgagctgggcgattttcttgctcattttcaggtgcatctcctggctgtagtccatgctgtgcccagccagctgtgcggtggccggcgagggcgcgaatttggccgccgagccgccgtaatagtgctgctgccagctcatgcccggggtcgccatcttcccaacagaccccagccggggcacctgtccccgcgggtggaggcaggcccgtggagcaacgacgcccgggaggcaagagtcgcggcggccgcttcccgacccgacacccggcgccccccagactcggccgcaggcgccgtcccacccgcgacccccgggtcacccctggaagggacggggcggtcccgccggcccgaagccgcggggacaacggcgcggggcagatgcccggggttgggcggcggcggccgggggccgggccagctcttggaggctcctcggcccgcgcctggcggaggcgtcgaggacagcgcagctccgcgggtcccgctcgcagcccgcaccgaggactcggcgaggctgcggagggaggaggagacggggcgggctgcggcggggataggcggggacatggaggaggacgcgggagccgccgttaccagggcgcgcgcggggacggcgacgtcatttccccgcagccaagccccgcccagccccgcgcagccgccgccgccgccgccagtcccgcagccccgcggccagtgcgggcgcctcgcgaggtcgatccgggatcgtgccgccagtgcttcccccgtgtggcggggatccagcagcccagccctggcggcgatccccgtgcagcgagcgtgaggcctgacgtaaaaaaaaaaagtatccccaagaagacggtgctgtaatcaccttcggttagcagaacgggtgtcgatttacagaccctttccacatgcgtcctcgtgtgtgcagggccccaagaagtggctcttccccaagaagagaggcaagcccaatccagagacatgagtagtgaagtagcgaggattccctgccctgaccttccttccaatggcacacaagtgaccgtgacactgtcttagccgccccctcccaccccgagtgcccggccactgcccccagttcagtgctgagtgtatgtgtggagggaacgctccttttcagtcagctggtggagcaccgcatagctactttcccgcggtggagcccaagacaaatagatatgaaactacttggctggaaataagtaagaataggatcggagtgaaagtaatggtaaaaaaaacagaagatggaacaagacatcagtgctttaaggatttggagctgggccaaaatgtgtcataacttgtgcattttcgccttcataaatgtgttattccctactgattttctcttaacatctctacccctgcaagtcaaatgattttttaaaaaagtttttgtatcctgcattgaagcatgtgagtcattttagggcatggataatactttaaaaacgtagaattg

SEQ ID NO: 47263 - DNA, 1842 bp, Homo sapiens
ccttaactcaagcatttctttgtgctgactttaaactcttcaggcaaaactcaactctttcaaccaattgccaatcaggaagtctttgaatctacctataacctggaagcccctctctcccagatgtcgcacctttccaggtcgaaccaatgtgtaccttacatgtattgatttatgtctttgcctgcaacttctgtccccctaaaatgtaagaaaaccaagctgtaacccaaccactttgagcacatgttctcaggacctcctgaggatctgtggctgggcagagacacctaaatgtgatctgcagaggattgcatagagaaagctctgcctgtggctgacatactgagaactaacctgggcgccttacagcaaaaccatccatgaagcagatgtggtggggctttcctgatcttttagggcccagatgcatttcactgagatgcatgttgcctttttctgaaagcgtctcataattagtctttacatgtgtttcaatctggtttcacactcgttaactgcttaaattgtagaaagcgcattttatttcagtccactagggggaaccagagggattaggcattggagctaacaagcctttaacattcttaatactgtaattagagaaatttctaggggttctcaaagtgagctgactttgagagagctgaataggggggtgttttttggtttcatttttgtgttttgtgtgtgtgtgtggggggttgttattgttgttttctttttaacttatttgcataaaagactattttttagagcaattttaggttcacagcaacattgaacagaaggggagtttagaaatatgtagatttccagcccttgcccccaatccacaaaatcagaagctttggggatgtggcccagaaatctctattgtaaaggttggtggaatatctgcctttggcaaaaatctacttaattatataaactttaagcccaccaggggcagggacacactgcaagttcctagcatccacagcaagatgtacaaacagaggctcgcaaggttttaaacatttttttttaaagatagaggtgaaatacttggagattgtcaatatttggagtatgagtcatatatttttccatgtcaatatttggaatatgagtcatatatttttccagttgaacaacttcaactgttaagcagaatccacataatttacttagagcccaaggaaaatctgaaaaccaccatttgaggaagacttccggctccagaaatgaaattttagggagcccccaaatcagaaaacagtatattgtttctgaaataagcatttaatgaaagactgacagattcctgtagatcttatccagactcagggaatagaaataaatgccctagattcaattgccattagacacagatgtttccatagtatcaaatacattctggcacactggccaacagacacaagttggagttacagggagaagagaggccatagagattgtcacaggggaggatttaatacattctatcttcataaaaagcagtttagtataaaatgaagatactcattgatttataggggtgtatgttagatagcccaagtgatataaaaaaattagcaatctagtttaagaaacacagaactgcctaccctgatggaccctgctgcactttggaaatttacaaagtaatttgtttaaacaaacgtcaaattgccagaaatcatatgataagacccggtcttcgtaacaggtctctgaaactctagtttgaatatcaaataaaaattcagaacaatgatttgcctttcccaaggtccacctgaagtgggtatttgacatagtgtcctgctcagaattgta

SEQ ID NO: 47264 - DNA, 2814 bp, Homo sapiens
tgcctagcttaaatcacccatattttcccatttccagatactattcataatacagtcagttttgctataactagggtttcggtgtcaccaattggctcatatgaatttgacaaataaggaataatgtcagcatagtatgggggttgttggtcgacatgtatcttttcccagatgagagatgctgtaaaaatgggagtagagttaaaatcactagcaggaaaggaatagtcaccctctcccctggtgcacagattggagctcttccaactctccttgaattaaaaaggagtgcctgtacccagggtttcctcccagagatgtgcacccccaggcttgcatttatagctcttgccctttccacatgatagtcactacattccagaaaaaaacaaatgtagtttattatcaggatagagccagggccccaaaccctagttagaggcactaagacatccagcgggggcagtggcaggctctgttttttttttttttgtttttttgtctcccagatgcctacaaaatgtgccaccctaacatcaataccacgaacacaagcaccacttcctcctctttctcctgaatctgaagtctcttccaagttcctcatccagtcatgactaaggcagcaaataatcaagttgcttcagctacatagtagtggctggaagagggtttagcgtgggtgcatcctagctgtgggtctgatcgatgatacaacctggtattaaccgctgggcttccaactggtcctgtccccttgaagacttgattctgactggggatagggtggggtgggtggggccttttgccaattccaactcctcattgtttgctgacataagatgagggctcccaacccccaccacctcttgccaggctgatccttgcttgagtcatagcagggatgactcagagatgatagactgaatctagaaacagaccagaccacatgtaaaaatagatctttgacccactctctgtaccagagaaggaaaccaacccccttatgtacaataaataacccaggaagtcagcctgctcgaactcagacttgtaggaagccaggctgctgtctctggtgacaatccaggaagctgaacaataacttctgtaacaatcagccagaaatggccaggacctgattaataacggacagcttccctaacttttgtcaccattttaaatttaggaacaaccagagaaagccaaatctgtacctacccctaaccaatcacacagtgtgccctgcttccagttagcccacctgcagcttccccaggccaacagcctcccatcagggcacacctcaagacttccctttttttccactctaaagctttcccagtgctttgcctgtgatggggtctctgacaaaatgcaagtgatggtggccaacttcattgctatagcaagctcagaataaatagcctttgctttttctcatttggttggtctttgtctatttccatggaacctataacctgcttactgtcaacccacccaccctagttccctgcctagcaatgaaactccatacctcaacttctcctatatggacaagatttcttcctctgctgggaagaagatcgtggccaggagagtgtcagcagaagcactttcctgggaaggagcccaggcagggcttggctggacttctggtgatctcctgagtgaggtgcatggaatgcctgtcttcttctaagagccagtgaccagggaagactgtaactgggttttagctccagttgctattttatttcccagtcccacctaccccacgagagttggagcctagccacattcttctcagtgatgaaagtgttgcgtatgaacccaagcccactagtatggccctaacccccactgggtaaatgtcctctctgccagctgcctgtccccacggccaagtccaactgtctggattctctttgtcccgcccctgctctgcctgcagggagcctctcagctctttctttcttaaccccttccccagcacactattgctgccagcatcagatgtgtgactagccagcactgttctataagcctcccaacaccatgaaactggaatcattcagtcatcctgccaggcttagatccagcagaatttttgaacagattgagaagtggccacatgatggcactataaatctagcaatgccctcagaaagttggcaaactgcaaagctccagggaatcaggatctgtatttttttttttttaatgaatgtcagaaaagtgaaaactggtaatggtcaatagcccccagaaaatcttgatcttattttgctcaggattcttcctgatcaatggccatttgtttttgacacttgccaaacattagctatccctcttcagcacgcatcccaccgcccaatgctgtcttcgctttgtactcaacgcatgcacatttctgttctaaatagtctgccggttgctatgaacacaaaaatagacacacaaagatttaagaaagatggaaatgtcttacctaagcatgagtgaaatgatttcttcttttgttttggtccatcattatgctaaataaacggaagccttttccctcttcacacgcagagctgagccaatcacaggcacaaatgaaaattgcctatctctagaaacaaatcccttggccgtcctggttgattagtcattacacatttacatagcacagaaaaggttgcccaggtaatcatacaaacatttgatattttcccatgccttctcttggctgatccaaattctttggaattgagatttttttgtgtacccttttaaaaatgagcactgtgagatttactcagacctctg

SEQ ID NO: 47265 - DNA, 1479 bp, Homo sapiens
cattgccaagtggattattttcctacttccaactttttatagaaatattgcaggcaaaaatgtaacatatatttgtaggatgggagaggagtagcaatgtctcatttttccctttacaccttttaccctaatgtagaataaaacatttattttagagagtatttaagattcgttttaagcagaatatcctctacagttaatcaatagataaagaatctttagaagtctttgcctggacgtgctgaaacttctatttaaagaatgagctgtgtacgtgagccaagaatgcttttttggtttggcagtctttatctaatctttgggagaggttaaaagcgcagatacacaatgtggaaattttgaaacttccccttaatgcaatcatcattgtttgaagaggaccaaaaagaagaaagcaatctatcgtatattttttaaagcagcaaaataaattcaagagcttgttaaaattctttttaattgtggctttgacatactatatggtttttttaaaatctagtgtttaaagaaatcctgtatattggtttataatggtgacaaaagtcactttcagattttcagggactgattaatctctctgagatcctttgtttttctccctctctgttctttgatcattatgtcagcacctcctctggaggtagagataagaagataaggtggatgatggcgaaatcgtaatcaatcatttcgtttctgttagaatggttgaagaaaagtcagcttggaacaacaaagtgaacttatttgaaaaaaatgtagcaatacaattattaatggatttgctttagccctagaatccttggtcctattactagagaggattacagaaaggttgcagtcactacagagaagttctttattatttacatcactcacagtgctcttcaagtgttccattgaacagaagaagccagccctggatgtgtgggcatgccaatttaggcatcgataatggctcaaacaaacaaacaaacaaacaaacaaaaacatcccctgactcccctaccctcaaaccaaaaacaaacaagacaaactctagcggaattgagaatatctgatatgtctgttgatctcaaggatagtgaatagttcacaagcaatgacaaggaaagaatatagcttggactcttgtgggttttccctaagacagttggtatattttgaacatactaaaatatgagaaaaccatcctacttttggtaagtttgttttgaaattgtagtgatgcaatttttctaatggcagcttatacttaggtgtctcacagttaaggtaaacaccagatttttcactaaaaatagaatctgtattcaactttgtagatagaagtatcactttgagttagtagggcttagcagggctgtgttctgttgcaggcaaacttaagatgaaaatcgtggatgtttttgaacaggagtttgagactcactttttcttcatttcttaacaatttgt

SEQ ID NO: 47266 - DNA, 665 bp, Homo sapiens
agttatttcagtaagccttcctagttcataaaattgattttgttggtttccaaagctactgtgggttgaaaataaaactgactttcaatctagaaggagttcttagctgttgtagacactgtcttattttcattggattgtttgaatacacaaataacacaattgataatagtgcaacaaccatgcagcttgatccccatttcttctacaaatgctaaaaaaaccccacaaaccaaaaaataaaactctattggctcgctaacaaaaaaataagtggaaaaatgtccaattagttcatgatgcaggtgtgaagaaaaagagctggctatttctgtcttctcatgtcagaaaagagctgaactttgaccttagaagatgagtaataacatgtgtttgaagcagtctgattgaaggaaggcatccaaaaaagcctagggttattggaaacggcaagtaaaataataacaaatgtgttgtcataacaaaacaagctggaggcttcccaaggtagaggaaagatgattattttatagaatgcaaaagctgaaagaaggggctggaactcatggattgaaggcatgagctaagaccttttacatatattagttttttaattctctggaaagtagatatgatccctcccattttatggatgagaacactaa

SEQ ID NO: 47267 - DNA, 765 bp, Homo sapiens
aagtcttgattagctatgactttcgatttattcttcctcactgcttgctattttatgcaaaatgggaaatgaaccaaaaataattttcttgagaattctggtttgaataatttctgagctgtaaacaaacttcattcaagttcatagtccagaatatagctgactccttggggttatacagttatcaatttttggaagaaaaatactccctcacatcccatacaattattgcaaaggttcagtcatgtatgcaaacagaatggcaaacagggatatttaattcaaaagagcagataatccaacattattccttttggattttagcacagattgggaaagaataatcagaaatttcatcaacgattgcgtcatttagctgtattctcaaagtgaattgatttttagataaagcaatttgagcttcacttacaaacgcgtccttcctgaaaaggtttgcacagtgctgatctttcaaatttacactcttaggacctcactaagacctggaataacaattccaggggactggcattctaagactagccacgattctattgcagcttgcagaaactgactgtggaggactatttcccaatgactatctctctggggaaaggtggctaatagagggcagctatttactgaattaacccataaaccccagcttcctgctttcaaacagcagcagggtaaatctccacacaactttttaactaagggccaaaataatgtttaaaattagtcatatcttgctccatctcatca

SEQ ID NO: 47268 - DNA, 458 bp, Homo sapiens
gactccaaattggaaagaagttttaccgtgtggaaaatgccataaaagagtatcacatgttacagagaaatctttcatgaagggaagaattaaagcagtaaacttcattattggctaggtgtggtggtggctcacacctgtaatccctggaccacacggaactccctctcctacatttttttcagccccactgcgagtttgcgtccgtggtacttttaagagggagtcactgctgccgtcagtcagtaatacttcctccttttttgctttttggttttgtcttgcgtttcttttcttctcctctccctctccctctccctctctggctaaggtctaaatcaaacatagtgtggatggccccttgatgatttcaggaaatctggatgggcactatgctggcagcaacctgtatgaagtcctgaaattccataatgatccattctcttgggtgtaaaata

SEQ ID NO: 47269 - DNA, 448 bp, Homo sapiens
tcttggctataagatagtggtttcctcaggaataatagaaggatactaggccttttgtccacacactaaatggtccaaaagctgctgagctttcatgtctgctttctatagtcctactgcttctttgagttactagctatcagttcattacaatgagacttctcactgttgtattcattctccttctgagttgctgactcattttgtaaacagttacctgcacaaggatctgataagtcaaatgtccttcctctatcttacggtgaagggcacaagcttcaggacatggtccctttttgtgtcacatgcctgaatttgaacaattaaactctataggtatgaaagagcaattaattaccatattatgtagtagtaatagtttgcaaatttacaaagtcaactgaatacctatgtatacaggttttgtttcttttaaaaaatgtaaaat

SEQ ID NO: 47270 - DNA, 652 bp, Homo sapiens
gacggggtttcaccgtgttggccaggatggtctcgatctcctgacctcgtgatccacccgcctccacctcctaaagtgctgggattacaggcgtgagccactgcgccccgcctattgctttttaaagctattgcacacacgcacatatttcaacatagttgaaactttctaaattacaaactttcaaaaaggaattgcttgcataattgaccttttaaaaatgttaatccatttattcaacaaatatttatttagtgcctatgtacttaggcaccaagttgcacaaacacttgggatacgtaagtaaacatgacagctgtggtcaatgactcataataacacttgtttttgaagtgtaacactggaaaaatgtgatacataggaaaaggatcaagtaataacttccactcctcttcaaaaagaaaatgaagacaaatactatgaatactccacaaggtaatcagataaatcctcaccatcaaccttaccacatacaattggcaaatttagaaagagaatagcacaaaactgtaaagaaagttcatggaagtgtttttgaagatcttaaactcagttttagataaaactgactttacccaatatgatttatgtacattacatgtatatgttttcttctgagactggccaacat

SEQ ID NO: 47271 - DNA, 1483 bp, Homo sapiens
tacacactacccttttatgtttacaaatgggaagttttcgtttttgagtccatttaatcctatttaatgcaaataccattttcaaaagtcagttcccaacaacaggaatttagcttatcttaaaagcatgaaccatgtctacatttatctagttcattttcataacagattaaatctgcaaagactatctttaaaatttatatttctgcacaaagttcttcttactttgttggcctcacagcatacagacaaatattcaggttatccctttaaaccactttgatgtttcctgacgaagactatatggagaagtattttaaaatatttacaggaaataaaaaataacactgtgattatgcctagattttggaaaaacttgtttattttaatgtaatcaatctttaattggatacatgtgtgtatatgtatgtaactgaagattgatccagtatattcctaattcagagtctacacaccaataatggttttaaaagccaaatccctctgccataaattagttgtataaacttttttcaatgactcaaagaacacatataattatttttgtatgcatattttttaaaaggattgggactcttcaactgtctagaactcagtaatcaaaatatggacataattgaaaaaggttccaatcaggctccatattttagagtatcttaaagcatcacacaaagttatagatattatttacgggccatttaccactcaaaatcttcattgagatcagtatcattttattaataacaaagttttcatatgttcctgaacacaacaatcagcatctttaaccaacttgtaaattaccttcctaactcaccactattactaccaacagttaccaagaatcagtactatctgctaagtactctgctaaatgctataactttagtattgtaaccaattcttgctacaaccctatgaaatatgttttattaccattgttagggagatgaagaaactgaggtttggaagttaaaaaacaactttactcagtcaccacatttttccacagacaaggtgccagggttcatctccaagctagcctgactccaaagcccatggcattaaccaacacattgcatcaccttcctttaatgagtcagcaaaaaaaatcttcctttactgaatcagattgttgatctttcaacaatcaaaagaatgtgtatatggtagtgttttcaggatttttttcttatacattaattttgttgagaagtaaaacagatttgagggtcacatgacttgatttataatccctacaacgccactgatgagtcacatacttaaggatgagtcacagtttttgtgactcttatctgaaaatttgggataattccttacaggatgcatgtaaggaatacatgatcgtggtatatgtttttgcaccttgcatactgcttgacagatggcaggtaatcacgtttattaaattttaaatctatattaaaactaattaaattca

SEQ ID NO: 47272 - DNA, 5429 bp, Homo sapiens
gctgaggcaggagaattgcttgaacccaggaggcagaggttggagtgagctgagatcaccccactgcactccagcctgggcaacagagccagactctgtctccaaaaagaaagaaaagaaaacacaatggtaaagaaaaaaactaaggcaaagatctactggttgataacaaaatgtccacagtggtgcctgaaactgaatccaaatacgtaaagttaaagtccagtgccctatttacaatgggcaaccactcttgcctctctaaagccaaatatttacagcacagtttttagaacagcatcataatttcttttttttttcttttggtttacaaaggaatatatctgcctgaactaatctgatggaaaatcataatccatttcttcccattagcctttgactaaacactaaagctaattatgctggctcttttgggttctcacagcaacaaggaattttaaagaacacatttagttccactgctttatgcaagactgagcggtttcaaaacatctaggtgctaagatgttagacagagactacgtaaatctcgtttacacggttaattaagaccttgtgatttaggcatacagacaacatggatctactggatggatatgcacactgttaatatgttgtcctgagtctgagactgctactgccccactggttctgctctgaatgcacttgtaatcactcttggtcagtaccaacagcttaacatctatgtatctttcgtattaaaatcttttcctcggacaactgtgatttttgtactagctaactggcagctcgtatgactttggaggcatgaaatgtatgaattacaccgttcaaatttaacagaaacacaggcagatacagatcatttgggttaatttcctatggttttggttggatattattaaggagtctgggaggatttggtaagaggtagagctttgttccaccttcctgatttggtagcacaggcaggatttcatggagaaaggaaactgctagacagttgttctggaaagtagaatccattcccccaagtatgggagggttctgtccctgaggaggggtctcagaaaagcagatatgctgatggactgtggaaggaagctatctgcataggaaggatgaagacattcttcctaaaccgaaagggatccaagtccactttaacttgctcaattacagcttaaccaaattcagctgatcttataatacaaagtcacaaatcccatgacaatcctgctgccttcattctgcagccacttaagctaaacacctctcaaccacctcaaaaatctgtttactctctgaaaatgggatcagggacttcctctcctgattacctacccaatatgaaaatacaatatttattttcacagatcgtattattttttaaatggcaaaaatattacttccattcatattttagaaaattgaaccaagatttggaatgacatgcttttaatgtggttcctacagcttttctatgtaaaacgcaggctggcaccgtttcacacagggaagtagctcagagaggaggcatgtccacagaccgcgtggtgacaggtgactgggggaagttcggacctcgggcttcaagtcctgactcatcactaacgggttctagagctctgggcccttcgatcttcatcttgaaaatgacagcctgaaaggactttttacggcccccttcagctttaagctggtcctgacctaatcacatgtttcaagttctaactgaaaattacgagaaggaaattaggaaagatgtatcaaagtccatgtttatcctggattaactttgtcaccattgtgctgctgtggaggcaaacctgttgcatcacatggaataccctatttctggctgtgcattagaaatacaagaggcagccgactggctttttatattttcattttttaaaaaagtaaacaatagtatccctcgatgatgggaagttctcaggtttcacctttatagtctgaaagtacacacagaatgccacctggcagacaagggccacacagctgaacccggggtatgctggctagctttaccacgcgtgaagactcactttaaagccacgtccccaatccttaccagggggctgatcagtgccgtcgctgttactggtggggcgattaaccgtgtagcggccagagaatgaggtttgcgtattacctgcccatgtatttatacccacctcgtgtggcttgtggtcaccagagcaagagcatgcaaattaaaagcaacgagatttgaccttagatcttactggacacatctactactatattggaaacaggaaaagaaagagcttttgacacagcacctggtggaaggggcaaacctccatctccccatacattgcattgttgcagtcttcagagtttcaaaggcttgccgtttctccctgaaaaacacggccggtcgggagggatttctggcgcggcccactcacctctttgatctttgcccttttctcgcggatggcggcgtcggcgggctcccggctctccaccccgattgggggcacgaagtccaccgggggcaggcctctgaacggcgccttgtcacgcagctggtcctgggccaccttcttcttctccagtaggatgtctctttggatctcctcgggcagcttctgcagggtctccttggcttccctgagagcccgctcgtggttttcgcggatcctggccaagttgtcctccagggcggcctccgggtccccgggtgccccctcctcgcggcgccgggctcgcccctcggccgcgtcctcggcgcgcgccccgggcccgggcttgtggtcggcggccggctgcaaggcggggctggagtggaacaggaccccgctgagcagcttggaggagtctggcaggaagaagatcgccccgaagcagagcgtgatgaaggcgctgaataccagcagcagcacgaacttctccgtcaggcggagggcggcggggcccgaccccttcctgccaccgccgccgccgagccccccgcccaggacgccgcccgcggggctgctgaagagcggcaacaggccccccacgggcatcgctcccgctgtccagtggtccggcgccgcgccgctcagcagccaaacttcgccgccgctgggagtccgcggctgcggggctgggtcctgcgtagccaggccgcccgaccccctcggctgggctgcggatcctccctgggggaacaactccgcgccgggtcttctccccggggcggctcctcgggcacacaggcacgcgcgacagaccgctggctgcagcccctgcggggagagaaacagtaaaacgtagtaattacggcgatgataaagtttccagcgggtctccgccctccgactcctggcgagcctccaggaccgctccccttaagcagagtcctgtccagtccgggcaccgccctcgcagcccactctctggacttggggtgaagttatcaggtcccgtgggtaggggaggggtgtcccgcgcaggaaggggtcagggcagcgcgcgagcacctcggggaggggcagcgcacctctgggcaggaggggcgcagcgtgggcgggagactcgtcaacttcgcccgctccccatctccgcgctgagactgctgcctctttcctaggctgggctgagcgcgctgtcccacggtcccgcagccccggcgcggctcaggtgggcgagcgcgccgacctgcgggcgaatggcagcgagtagagcagcacggtacactccgccgcggccccgcgagcactaatctcactgccggtcttggggcggtggaaagcgagggaggcgacgcggccggagagtgacggcgcggccgggccaatcacgcgccgcccagggtcccgcgggggcggggccgaggcgaggagggggatgcgcggggcggggagtttacgggaagcgcagcctcggcggggcccggccggcggcggggaggtcgcggggccgggaggcgcgaggtaggcgggagccgcggtgaggaggacggtcgaacccgtggctgaggcccagcgccgagaagcggcaggcagagttcggggtcggggagtttatcctgcgctggcctcggcaggggtccccggggtggttgatcctcgactggcccgggaggcgcctgggtccgcgcgggacctctctgcctcctcctccgacccgtgcggggcggtcgggggcgctcccgagggggtcccgggaaaggcggggtctggcagggggtcctgggcgctgggtcgttcagaagcacggctttactccagttaccctctttttatccaaggccggggttccccgggtgcctggtagcagtgaaaccccaagtccctcggttaggggagccgtgaccctgggagcttttgagctctctggtataacatccttttacatcctaagagacacagttctgtgcttgcttaggacttttttcgtatgcgccctttcttcccccaaaaaacaaaaaaccgaaaaaacttgtatgtctctcccgcccacccgtactttcactattcatttacctcatagaagttggtcaaattttccattcgaagacgagttttatgctgcggtagcttcaagcaataagtcgaacactgtgttgaaattaagtcttggatccgactacttccagcgaagtgaggagttggtccaatagaaattattttccaaaatgtgttgtaattctcctgttgctccacaaataaggggttatcagagaggaaaacgttgactgacttcgcatttctgaaagctggtttgtagtcgccttatttcatccttacccttctctggaaatgtgacattagttctgtttgtgcttaagacaaaggaaacagctggcacctttcgggaaggtggctccagtacagttgtttccaggtgttaagctgtatgagaaagtagaaaagtaatcagaaatccttactagttttcatttaatcatttaattattaattttaaccatcattatttgtcgtctacttgttttgtgtaaaatgagtaatacactcaaagttcttgttaataggaaattattgtttgataaagctggctttatggcttggttattttgatacctgctatgaaattctatgtccagaagagtgcagcatatccaagcagggtaataagttcagaaggactgaaaaagaaaacaaagatgatttttctttaatgatggaaaggcaatttttatttcaaacgattatgcatttgtaggttgtgcataggctgaaaggtttgaatcactgtgaaataatgtttctaacaacatccttaaaactgagttacctcttgaatggatagataaataggaactgggttaactaccccaaacgctaatctctttatgatcatccttttttggaatgatttattattttaaaaattatgttgtaagaatggaattatagccccggaaatat

SEQ ID NO: 47273 - DNA, 508 bp, Homo sapiens
caatgagtccttttttctaatcagaaattatctatgtattatttaagtatgtctcatttaattttgacaatagtcttacaaggtggaggttgttatcctcattttatagttgaggaatggagacttaggaaatttaaattagctgagaccagaaggttttagctaattggtacaagaagtgagatttgaaacaggtctgcctgagtcagaggtcaggctgaccagcatcatgggaatttcccagcaattcccagaacagggtttctcatggaactgttactgagtcacctggagccccattgtggcatccaggttaaccttctctagcactgtagcattcgctgagtcaagaccggctgctgtttccttcctcctcgaaaaaatcactatccatattcaaggtgtgcctacagcttccagtgttctgtgcaaggttagcacccagcaactcctgggttctatgtacagaggtgcagaagggcattcttaaaaatgtcagacttttttt

SEQ ID NO: 47274 - DNA, 669 bp, Homo sapiens
gcacttattttcccagatgttgcattggaacacagggacattaaggcattttccccagatcatatgattgaaggatgatggacttgggattcaaaagcaggagatctgaaacaattttactttcactgtaaaaaatgcatttgggatatgtgtcctgcgttataccgtctctattttgatatgaaattcctccatgatcatactctcatttgtgccccttactgccagcaaaaaaaaaacttcattagctatttgtgtttgatacgtctcttcatcttgaagagattgtgggtattttctgccttctacctttcctgtgctgtgggatgatggccctctggtgatgatctcaccttatgactcaaattcctgcaactcctttctaagagtaattagcctgggaccttgttcctaagctcaaaccccaggctttccctatctctctgtctcattgctgcatcagcctacttctgacaagtagaatatattaccaaaggtagcagagggagcaataatttgaataccttaaagagaaggaaataaccttatatgcaggcagaggggactaaattaatattggggaccagcactatttccctgagagatgatttttatttgtttaacagtgtttatgcataggagtgttatttataatagtttcccttagaa

SEQ ID NO: 47275 - DNA, 1188 bp, Homo sapiens
taactcctactggtcctaaaacttttttatctttctcttctccatatttcctgattctcctccctttcttccttctatggcattgtagcatgttcttatacatttaatttagtatttttcaggttgtgacaccttaagtatcttcacaatcaaacatggttatcatagtttaggatcctccaagagcaacttttgagacaaaagttctagtgcaaataagttgttaggaaagattccagataaatctggtaggcaaatggtgaaggatagcagacactatctgtatcctactaagcatcctcaaatcttctcatttcaatttgtgtgttcgatttacagagagcagtatctgcatctccatgcataaggattttccccaatatgtagcccactctgtgcagttggcaggctagaagtaccagggaattaaatgtaccaccccaaaagccctcaattaataatttatggttgttggtatataatctcagattatctcttctcttggttgacacaactctgaggcatgcttttgccctttgccctttcccctagagtgaagcaatcctgtggtttctagattagtaacgcacacttcgagcttggtttcttctctgtagcacctacccatttcccttctaatgtttcctgcatctcccaaatactatgcctctgcttctggagggtcataaaataagacaggaagagggaaagtaaagagaaaactgtcattcaaaggaaagctgtaaagcaagttaccagtataagcaagttcctgcatctcccaaatactatgcctctgcttctggagggtcataaaataagacaggaagagagaaagtaaagagaaaactgtcattcaaaggaatgctgtaaagcaagttaccaatataaagcaagttgccactagggaattatgggagacaatggggaataggagcctcagaattattctacacaaaagaaaagggagcctctatactgatatactgacacccaccagtcactggttaagtgatgatgaccttagaatgtttgtattctctggcgtttctggcctgctgtggacaaagtagagaatgagattgctactagagaaaactctcagaaaagtaaatgtaggtgctgacttttgtaagccaggccagtctgcctacggaatggggaagaaaggttagtttcttccacact

SEQ ID NO: 47276 - DNA, 658 bp, Homo sapiens
tttaaaagttcttgcctctttaatgtataatagatattctaataaataataacattctaataaaatgatttctagataaaaatacttcagcaaatcatgtgatttcatcctccttgatttaagcaaattgttaatatgaccatttattgaaacaattgcagattcatttgatactaatctttggagtttcctgattagtaaatgtggggtttacacaattctgtaatgcagctgttattggaaaagtcagtacaaagttcagctgcagtcttggaaatagatttcattgtgttttatttttagatggttctttaatttctgttccctttctaaagaaagactcaatttcactgtccctggtatgtattatttccattctcttggctcaatattttctattatttatttttccaagtataaaatttcatttgtggtagccccttgggtcatggttatcagaaacaaacaactgaaatagatacgtggacgagattggactcacataccatattggttggcaaactacagtaagccaataaggggttttaggacatatattttaaaagtcccagaatcattgtagatatcaaagatctctgaatcccctttcaatttgccttgggtcctttgctaacatgccacacaaatcagtcaacat

SEQ ID NO: 47277 - DNA, 1172 bp, Homo sapiens
gctaaacgtgtacacacatgaaatctcttcatttttttttagctgctgttgggaaactcttaagcagataccaggtaagcatgtggtactttgtatttcaatcattttgattaaaaggatggaggcacactcatcaacatatgccaagatagatgagcctacaataatagagcaccctggtccttgaggtttctgcagtcagcttcctttatactccagattcccatggtacaaatgtaagtgacctggcagcattctgttaaaagtgttttatgccctttgccctcggaagacaaacacattcactttagcctttgcaccagaatatagcaagctggacaccaatgtctccccaggcataaggaactattactccgtctccattctctagaggaataatacagtgcccacagaatccatgggagttaaataaatatttgctacaaataacactggtgtttggaattcattattagggaattgttgtaatggatttttcagactgttcctcagataaatcttctgactaccccctgatgagcagcagaagtgcagcaactcttaaattgacatgattaacctaaattgtaagttgtcaccatgttctatgctatatatcctttcagctttgaggctaacaagcctttcctagaaaaatacaaaaatgccatgcattttaccacttcaacacatgattatttattgcatcacttcacttgaatcccaggagttagatctgcatacataactctggaatcaccgacataaactgtaaaccactatacaaatataagcatcctcattgccatcatcaccatcatcatcctcatcatcattattcataaaatctgttctttttccctccagtatttccctatgaatcaccatttcctctccggtacacaatcactgtccttctggaccctcattgcctcatgcctgaatatcacaatgcatttgtaaacaacttttctaactccgtgatctcccagcccccaattcatctcatacaggactatcagatgcagctcactaaaaatctgcatttactatgtttgaaacgctctaattcattcaatattcacttattgagaacataccatgtagaaacattcactatgagggaagcaaagatgaacaagacaagagagcaaaatatgtatacacaaatt

SEQ ID NO: 47278 - DNA, 1565 bp, Homo sapiens
taggaaataagaataaatgttaaataaattcgacgttttggcaaataagagaaaaagtaaacctccaagttgggcactattttaaaaacaataaataaattaacactgttgacccttctctggaccctctctggatcgatggtttataggcttaaaacatcaaaagcaattttacttgtgaaaattttcatcagtttcctccagatgtaaaagaatctcttcggcacactccagggaaggggcacccgtgattttctccttcacgctctggaacaaccgcctcagcatcgcctgcagcatcgcctggtcctcgctggagaaatgggccatcctgttggaatcaaacgtccactctcattactccaggtccgagcaaaagccgcgcactgcgcacgcgcacgcgcacccccacccagccccggctacgtgcggcgtcgttcccagggataccgcggcgagcgcctgtgcctgcgccctcagctgccagtgcgtcatttcggaaaacgagtcaccttactttggggaagcaggggtccgcgaggtctcgcctctggtactcttagttgctagccttcagtaccagcagacctcaggctctcccgactaacaacaaaagagacatcaggaatgatctgatgggaggacccgacgacggaacgccacgatgcgcgtgacgtcagctcgctgatgtggcttccttggtgggagggagtgcaactggtgtcctgggggcgcccagagaatgttcgggtgagccactctccttcgccgccgcgttgtaggtgggagggaagagagtacgaagagaaagtgatcaataaaagaaagatagtaaaagtgaaactgaaagtagcctgacgagcctcagttgaagagtgaatggtattgaaaagttgcagtgttgttttcctctaacggctaacacctattgagctcctacgccctaccaaacactttccttaccaagcaccctgctaggagctatgaagaactccctcactaagtaacagagagaaaaataaattaacgattacaatacagtgcaattaaatgtcatgctagaaaaaaaagatatgccaagtcggtgctgtggagacccagaattagtttcaacccaatagaggagttgaggaaagaagcaaagagagtaaactggacatgcaaagaataggggcctcagagtgtaggatatactggcacttgaggtaatcgggttagaaagaggagatgaggaagctaaagaagtaaattggtcacatctggaagggtctaatcttttggcacgttaagggattcgagatttttctgcaagtaataggacgcaatgggattccagagagacaccatgtgatggtatcatatataaagatcgttctgcgggaagctgcagtggatattcatggtccctcatccagtttccagtctagatcaattccccagaccatggttatgtccaggctataaggaaccgtcccactgatgagtggttcaatgtcaatgaattctcctttatccagccttatattttactcccctagtatcaggtacacatcacatgttagaca

SEQ ID NO: 47279 - DNA, 533 bp, Homo sapiens
gaactagtatttctctgttttcctaccattgtttgcttgctttttcaaaattcccttaaagaaaactcaaaggctaaagttgaatgaagttcaactctgatattggctttgttattaactgcataactaaaaaataataatgtctaccatagtccctgaggcataataaatatttactgaatgaatgaattcacaagtgatcataaaaaattaaccaagcttcattgaaaaggtaaaattaaacaaataaacatgaaatagtaaatgatttaccagtttctctttgcaatgttcattttcactctgcacagaaggtggagccaaagacatatttatccactggctggaattctttcccactcaacaaagcaaaacaaattcttccctttacaaatacctttttgtgtagtttggtttacataagattcgcttggaggtaaatgtgggctacaaaaatgagttgaaattttacacagctcaaatcaatctttgatccttaaacatttttcaaggatgatagaatgctaagtaaa

SEQ ID NO: 47280 - DNA, 1429 bp, Homo sapiens
gaaaatgtaagaacaagtttcattatttttaagacaatttcaatttggggcctagcacatcatgcttgagagctggttttttccttatgcaaatggatcctttctctaaactggtgcaaaccacactttgcctgccaaacttatgactcaaaggccctgaagggtttctgtagcctcccagccacagcccagaaaccataagctgtttccacgtgaaacatccaaacacggtctcccaagcctaagtctgctaccatcaaggcttctgtataaaaggcaaatgaggaggcagcgcccccttctgctcccacccccttctgctcccacccccttcatgtcagcagcagccaatcgcttttctctgtcgtgcagtcggctcctgggattggccagggacgggacaggcgcggaaccactgcgcgcacaggcggagcgcggagacttgtccgtcacgtgcggccgcccggcctctcggccttgccgcgcgcctggcggggttgggggggcggggaccaagatctgctgcgcctgcgttgtgggcgttctcggggagctgctgccgtagctgccgccgccgctaccaccgcgttcgggtgtagaatttggaatccctgcgccgcgttaacaatgaagcagagttcgaacgtgccggctttcctcagcaagctgtggacgcttgtggaggaaacccacactaacgagttcatcacctggagccaggtacggtcaggccacggcggcctctgaaccccctgaataaccgcctcctcactcgctctcctgcggggtggtctctcgcggccttgcggctcgacgctgtctgcgaggcccgcggtgcggggccttggcgttcagcctcgcgggggaccccctgtattgttcgctcggggagccgcgggggcccggccggcagcgccgctctcctcaggccgcggtgggggaggggcggcccgcgcggggcgtagcggcccaggcagccccttaacggtccggtccgcgttcggaaccggcccggcgtcgcgaggggaatcggcgagccgagggcgcgggagcctctttactgcacactcatcctccgtcctcccgcccggctcaggggttacaaatcgcggaggggacagggagcccagggccaggatcatcaacgtggggctttataggaggcgatctttacctcagcgaccgatcacccccagttcccccaacattgctttgcatctggcatctttatgtggagagcagtcagggcaatagacatacgttcaaacgcaggttactgcttatcagttggttttaaaaatatatagaaattaacaaattattcttttgagattctgtgctatttgtataatgggattattaggattgttttaataaagtactaataggtggtaacttagtagttactaaatttcgctgaacagttacc

SEQ ID NO: 47281 - DNA, 1475 bp, Homo sapiens
acagactggctggagtaacaatccccacattattatttgattaaaattcaacatttttagttcaagacatatcaaaacctttaagagtatatataacggaatcatttgggaagtcagaaaagcaattgttagaaacagaattaacaaattccagactaaagaaaagtgatttgagtccaaatacctcgcctaaaattacaaatatctttattaactgcactgccaatgttttgcctactattttggagggggcagagattatcttaaataaactgaaatttgtgccacacggaccaaagtcttgccactatactgaaaatagttttactctaacaactctttaatgaaaatgcaatgtacagctaattaagcatgaaatttcagatgacacacgcatgttttgtgcctaaagacaaaattgtcattaggcacaaggcatgcgtgtgtcatctgaaatttcaattttaagttgaaatctgaaattgacacttcaaacagttacggcagagctatgactatttgtttcaaaaacaatattactacattagcattactgccaggcggttccaaatgacgacaggcactttttaatcataatctgcgccactgaacaaagagggcgacatgaatccaggaacgacagtgcggcagtctgaggtcgccaggaaagagatgacaacagagtgggtaccccaccgaaggaaaggggcaaagacctttgtagagatggcctgcgcagatacaaacaaaaccacgaaaagggacctcaaagaatgggagacagcgttcacgaagcaggggtgggggaggggccctattctagttctcttcctcaatttgagtcatcttcccatcgccactaaaccttacggccagtgatcagttcttcgcaagacccaaagctctgaagctgagtctgagtgacgagaggagacgggaagaaaacggggacagagagggcactccctgttgggtggggcaccacattcccgccgggctcacccagccccggctcggatcgccttctctttggtctctcacactagcaccccagaggccgcaaaaagcaccttacccagctcgccatggagcacagccccaggacgctccccatctccacaacgtcacaagagcagcggatacagacaagatggagacagcttctttctcgcctttccgagattatttactatctgcgagacacttccggacgcacagcgcaacccgcccctcagcctcgcgtcacttccttccaggcctgggtaggataaaacacggagcgcgcagcgctgagactgcgcatgcgcgtcactagacgacacggctgtcttctttcctggagaatttctcaaggactgctggctggaaacttaacggctaatgtggatctgaccgtagtttgccaaattaagaaaacggtgtgagcaaaacccacctttacctaccatgcacttgcatttgggcattagtagaga

SEQ ID NO: 47282 - DNA, 1475 bp, Homo sapiens
gagaacctgaaagtgaaacttgatatacattattttctgcttttattgcacaaaaagttgtttccattgcatattgcttcctaatctgttaaaataatctgttaacaaactcgaagacccagattcggggcgtagataagcctgtgtaccttcctaccttctccaaacagccaacattagatcaaagggcaaccttaatgacacctggagcacaaaccctgctcagggcgcgtacaaccggagggacagaaaacacgatgcgacgtcggaaagcaggaagggaattgaaattcccgcagtcacgtcacagaaatcttagcagaacctcatcatcgcccaagggaactgggagtggcgggcggggaggacgcgggttgtgtgacgatcaccgataattagttggtggttaacgcacaagtaggataaaagagctcgccccaggctgccagcagaaaaaagctaccgtggcacgtgccccggggagtgatgcggtggcccggtttgcacggagagcgggacaccgcctggggagccgcgctcgtagcctgggggcgggacgcggcggccgctccctccgcccccgagtagctgccaccgcctggctgcgccccagcccagtagctcagacgcggccgcatcccggtggactgtagaggcggcagcgagctagagcccgagtcgcagctccgggccgcagagcgctgggcgagcgcgagcgccagggcaccggcagggcaggcagctgcgcgcggctggtacgtacctggtggagcgggcgcgtgagtgggtgtccctatgcgaggagggaggagtgggacttgggaagtcgggggagactgacccagggaagatgtggtaagtgcaactttcctattttctgccctgctggcacaaatatggggggagttcgaagcagatgcctctttcgcttgggcgacccgatccatcgtttaactcacaagtcagggtacttagagagtgaaaaggacgctcacgccaacaggcgtgacgtgggaggtctgtcacctgccttttgcccactctgccctgcaggtggccattgatgacctcctgtcacaagtcgctgagtccttcggctctcgcgccagcaatgccaagtctttcccctgggcggtgcttaccaagccccgggtagtcacgagcggccgcggggttagcagagacccgagtactaacccgctcggccagcgtccggctgtgtggctttagccaagtcacctcacctcactggcctccgtccattctttggataaaatatggaggtgggtagaccgagtaaactcaagggtcgcccgtagctattggattttccctgctcctaggaccccggcaggccgcagggagggacacgagtgccaggtggtcgcgggctgagggagcggagggcctgtgttccggttggtgctgatgctagccccttggggaaattcctgaaggtgcatttcggagccaaa

SEQ ID NO: 47283 - DNA, 737 bp, Homo sapiens
gaagcagcagagggtaaaacagtatttccaaacttccctatacctacacttgatttaggttttgcctattgcataacttgtgcaatatacttgtgtaagactagatttcaaaatgtaagtaagtggtgagacagaatgcacacaagtcatacatttgctgttgagattcagcccatatggtgtggttttggaatcagtacttctgagcaaagctctcatttctaggcaacaactagcaggatatttgggagccagcaggtggcaaagcaggttcctgattcccagcttcccaattatgtagagataactgttgccttagcaggtcagtttatgcggtggtgttctgggagtattcctgaaagcttagctcaacctaaaacctgctatttcaactattccaagtgttttgtaagcatctaattccctatatgttgtcctgtttctgttaaaaatagctagggtggtttctgtaatcttcaactgatcccagattagtaacttccttttatagctacctacctgttaatcattgctcaatgtacacagtaatcagcagagatcagtaaacaaaaaagatcttcaaggaatataagaacaaaaagttcttgattgatttacaagtgataataacccatagtaaacagatcagaggatctatagaaaggacaattaccatgcatactcattggcatcaggcttccacatatggcatggcacaaaactctcctactcttgca

SEQ ID NO: 47284 - DNA, 4213 bp, Homo sapiens
tgatacttcagggctctctgcatcacctctactgaggagccctacccattaaagctggggtaggttggcccaagaatggaaccgggatcgttgagatttcagcaccccagcattttttagtgactgaaataatgaaaattctgatcaggctcctgcttgcttgcacattttaaccactcgctttttgcccaatattctccttgtttccacaatataattataaactgctgaggtactgcttcctcgtcaagaacaaagaggttaacttcagggtcacaaaaatgtttgcagaagggatgaatacctccaagggctttgcaaccagctgcggatgcctggacgtctaattgctcaaaggtgttatctgagactgaagaaacagacttttcccctggattctttgaaaatccccctctcttattctctagcagaataaaaactccctgctttttcctttttacacacggatttgagagatcttgttctccctccttctggcttttactaaattgaatgtctttctctatccccaagcaccagtatgtcagtgtttgacatcaactgcaccactgatacacgagtcggaatttgagcttctacaagtacattccttcctaggccaaacactgacgctaagaaatacgagaacagatcatcgctaaacagcagctgaaggtcaggcgaactgactcgctgcggaatctgcctttgcacgtgatcagtcggacgtctacacccgcagccgtcttctgtctccgcctcaccctcaggcctgacggtccgagtggagctgcgggacagcccgaacctccaggtcagccccgcggccctccatggcgctggtgcgcgcactcgtctgctgcctgctgactgcctggcactgccgctccggcctcgggctgcccgtggcgcccgcaggcggcaggaatcctcctccggcgataggtgagttgtccgcgacccttctcttcccagccggcaaagagcgcggagcggcggcgcctgcgcacagcaggagaaagtgcgtgggggcagctgcccccggcagaggctcgggctagcggggcccctgacgcgtccggcgttgaccacggctggtgggcgcggggagggcgaccaagggactacagcgttagggcgtccagccgggaggccggggctgggcgggggaaatgccctcgccggtgggggcgctccaagggcgcgtcggccggatttcgccagcctggcttttgtttacatcctgcatctcagttgttttgttccttggggaaggaaggaaaagctgcgggactcaagggaagaggaagctgggagtccgatgtccagcacagcaagaggcccctaatcggtcctgaatggagggggactgcagtttccccaccagctcagggaagtaaatttcagcgtgactcacactatcttctgtcttgctcgaccgagatcagtggctttttctgccactcacccagccagagcgcgaaagcaccctcgggtagactcaccccttagtctaccgtggaactcacggggacttcatttcacctggatgtccactaggtttcctgcgggcgggacccattttattcactcccagcacttaacacagtgcccgttacagtagtgattctcttaagtgtgccctggaccggtggcagcagccgccgcacttaaaattgttagcattgcaaatttccagcccatcccagacctactgaatctgaaacgccggcgttgggcttccacagtatgctgtttaacccaccctccgcatgattcctttcggctaagtttgagactcactggtccagaatagatacattttggtgggagattgtacaatgccatccgagcctccagttccaaaaatcaaggtgccctcacctcctcaactccctttaaaaataattgcactgttaagaggaaaaacaaaattagagaagtggggttctgttttcttttaggggagagttgtccctgagactcggtagcagcacctagtgctgaaacctctttcgctccctctgtgctttctcaggacttgggagcgctctagggcaaatatcttctctttgaaggccaagtcctcacgactcagctgtcaggtctgaagcaaaaactgtaaatctggtttccgaactgtggcaaatgtcagtcattacaagaaatttccccaaaatgtttatgtatactggtttctgcttttattacggcttagcttgtgttcctttaattatgtgaccggttagggttttgaaataaaatgtctcacgttgcttgaggccacacaatggcaaattcacctgtgttttaaagaggcctgaatgagcgctttctggggactctgtgagtcttcacacctcctgtttgggaaactgcaaggttgaatcccctcctactaaaggggaaggaagaggggttactggagttcagtggtctgaagtgttactggagtcactggagttcgaaagtctgaagtgttactggagttcaaaggtctgaagtgttcactcagcagtttcacaattctccttgtttgtaatattttgcgtattttccacttgatgtgacaactctcctgcctcctctcagccccacatgcttggacttcctttcagcatccaccctgcctggctactgctttcttgttttgtgtttttgcgtttaaattcccagtcttagttttctgccctgtcaagtcctggtggtcggacgacagaagttctaggaagcttcacctgtgtgtttttggctacagttctttagattgagtaggctgggactggcttgtgtattggtactgttaaagcaaactaaatacggcctgagaaggactccttacttctatatttgaatccttgtgaatgaactgtaacctagcttaatagtcagatgagactgaaaacctaacttaagagtatgcactggtaacaatagctaagtttggccaatcccagcagccatacttcaaccattcatatactgctgagtgttcaaactatgttcaaataaggcataaggcgagctgaattatgtctgaactatggttcattggattcttgagaagttataaaatattttggattaaaagattttctggtataattttgagagtttttctagatttgctgaacacacacacatatttttggaagtctttttaaaaatttattttattattttattttattttttattttgagacagtctcgccctgtcacccaggctggactgcagtggcgcaatctcggctcactgcaaactccgcctcccgggttcacgccattctcctgcctcagcctcccgagtagctgggactacaggcgcccgccaccatgcctggctaattttttgtacttttagtagagacggggtttcaccgtgttagccaggatggtctcaatttcctgacctcgtgatctgcccatctcagcctcccaaagtgctgggattacaggcatgagccaccgcgcccgacttggaaatctttttaaagatagtctgcagaacaggaaaacgtgctgtagtaaacagaactttggactttgaactaggaaacatggattggagtgtgggctctgccacaggccaggccttggaaacacacataggcacacagtttcgttaggagagggacatgaggcttccagatgttcattattcatgagtcccaggttaagaacctgtcagagctctgttcttggcttctgtttaaagacatctttcagtgaatttaaatgattatcccctaatttatctgtctggaatgccatgcagtagaaagatcactagactagaagtctggagagactggttccagttaagctttcattactgagtcatctgtgatcttgaggatatcatgaaatttgcctttgcctaaatgtcatcatatataaattaaagaatgtttgttgaagggctactataagtcatgcatattctagatgctggcgatataaatctaggtactaaattatatcagaggggtgtactcttaatgcatttcaggtttgggtttactgaaacagatgctgaatatgtttatagtctcttttcccctaatcttcacagtatctcgagtgtagatattgtcgttatctgttttctttcttcttcttccccttttttttttttttttagagacagggtctctgtcacccagggtggagtgccttggcccaatcttggctcactgcagcctcaagctccc

SEQ ID NO: 47285 - DNA, 2231 bp, Homo sapiens
gcataccctgatgtaagctagactgtaaataaaaacaaaaacttacaaattgccataagaagcaaagaggaaggaggtccatgttcaagtcatagtttatctaattaagacatgattcaaggcagaaaccatgttcagagcatttaatgcctgagatacccccggctcaacaggtttttatttgagaaccaacctgtgcataacagcaagatggccgtccggtttacagcatcctattgtagtagtgtaaaatcttagatttgtacccagagatttttgtttaagtccagggctgggcaattgtctcctgtggtacaaattcagcctgttgcttgtttttgtaaataaagttttattggaacacagctatgtttccattcattctacattgcttttgattgtttcatgtttcagaatagagcagttgaaatggatagaaaaagtttgctgacccctggtctagacctacccttcattttgtaggtgagaaaatgaaggctcagaaatgtgaattacttgtccaagtgctccacatcccttgggagcagagcccatacgctagatctttttacctcagatctgtgttcgcttaaaccaacatccttttgcacatcccttgccttgcctgattaacatactcaatatttcccaaacatatctactttcacgcctctctgtgtccacatttttctctttgcttagaatatcttccatctcatgtcaaatgaatgctgaacgggggttttgattatttttagttaatcgaacctgaatacagtaattttgatgagttgtattctagaataagcttaagtttccagtgacttcttgtccctggcctactatcttgagatgagtaatatgtgagtccttttgagtcagcctgtcaacgagcatttgttcctgttgatatgttagaccacacagtgaagaggcttgggaacaaatgagctccagcagcccaaggtcacacacattgtgtttatatgccttaggtggcaggaagactggaatattggaaaacacaggtgttcatagtcactagaatgtaaatctttaaccagccctgctttccactccctccctctccgccaccacacctccctcccagccctgcttttaatagcttggccaactcgggtgattcacttaacctcgctgatgcagagatcactcatttgtacatagaagctagaaatacctaccttgcaaagcttttgtgagcattggtgatatgaaaaaggcatagcttactatctggcacagcatcagccctcagtaagtgggctggtggtgattgtcacattaagtggtgacaggggatacatgtttgtaactcctttgaggatttgtttgattttatttttatctctgtcctctttttgtcaagtcagatcttacaattcaaagacagaaatgctacctaacttctataacatatcctattatattaatatatacagctagggtaaattgggcagcctacatacctttaacagttaattttttttctctttctagcttatgatcttatatctaaaaatgttctttctgttattctactaccatctttccacctcacagtttcggaaatgtcaaatgtaacatgaaagctccacaacaaaatttcttagaggctgatgtctgagatctaactctggagaatgttagaaacaaataaatttcataagtgctatttttccactgaaattctatgttcatgcagcatagctacataaatatacatatacagatgcatgtccccacccatgacatcagaagtaggtatcagtgtggacatcctggagaattcttcctgttgccacccaaggaagggtccccatttactcctacactggcaagactggtgccaccgaatttgtgggtaggtcactttccattaggcttcatttctcagcagtggttatgtcacagccaaaaaggactgggaaggaaacatggtgcaatagacaattgactgtgagagtaatcatgggatttagaccagccctgagactgacacctatccctggataagccatctaacttctctggtgcttgtgtttctcatgtttaaaatagagaagaaagtctaagtgatttttacataattctaagcttctccatcaccacaccatacttggcatccatcccaaagtaaataaatggccaagactttatggctttttattatatgatgataacgatgcgtaccaattttcaatcagaat

SEQ ID NO: 47286 - DNA, 2672 bp, Homo sapiens
tatattaggataacagtaccagctctgcctgttttacagagtagatgactggctaaagtactttaacagacatgcgaaactcatatttgctattgctatcctcacatcccccctgtaggatttagatggtatttagtttcctctgtgtctttcccttcctcccgtcttcttgcatttatagatatttttgcatggtaacaacctgaacagtctacaccaactaattcatcctgagatcctgccctctgagtttggaggaatgctgcctccttatgacatggggacatgggcaagaacactgctagaccatgaatatgacgatgacagcgagtacaatgtagactcctacagcatgcctgtgaaggaagtagagaaggaactctccccaaagtccatgaagaggtatgctggaggtagactggggagtgggctgggccagggcagggagaggcatcctgagtcaaactcaaagctttctgtttttctgtatacatttttctggtgggattttaaaactctttatgccctatgattgtatgtctaagagttttgagtcaaagataaagtcattttcttatagtgagaacatttaaaatttattctcttagcggttttcaaatatacaatacattattatcatatatttgaaaactgtagtaaccctgatgtatgatagatctcccaaacttattcttcctgtctaattgaaactttgtactttttgatgaatatctccctatccacccccccaaaccatcctgcctcatcccagtgcttggtaaccaccattctactatctatttctatgagttcgactttttttagattccacatataagtgaaatcatgcagtatttttccatcacattgtattccataactatatgcaattatctgtcaattaaggaaaagataaagtaatttgaggtaacctcaacttagtgttgttccaaattcacagacagtctagcagggcccttggaagtcaccaaatctggtggttttcaaattgtatcctgagaaaccaaaggttttgagggggtgccttaggccaagtaggtggagtagagagagtgcccatttccactgttgtgggagcaactctcctataagcaatttattggatttctgtgtaagatttcttttgaagaaagcaaccacacacaccagttcaaacactgtgttcaaagtttctggtcctttttcaatatctctgccaagtctttgtctaaaggtctaaacattactggtacaaaacattgtatttcacttcagttttaatctttatagagttcattgttgagtcagagtccaaatacctgctttgactctcacagcacttttatgccttttatctttcaatcaatagtctggggagttgtcagacattgcacaaatgcatacctggctctgagtttgcattctgtcacaaacaagtagatgtgtaattctcagacttcccaggcaaccacagctcagggtccatttggataacagtaacaaatattacttctccagttcatttcacattcacagaagtatgggcaccgtagcccctgcaagtctcccctcacctagctcagggaggatacaaggacaatgaacgggtcatgccaatgtctggcatccttctctgatgaaagccttaaggccctttgcccatagctctgactcatggagtaatgtgcctgttctttaaggatggtcttctttttttttttttttttttttttttttttttgagatgagtctagctctgtctcccaggctagagtgcaatggcgcgatcatgattcactgcaacctccacctccctagttcaagggattctcctgcctcagcctctggagtagctgggattacaggctcccaacactgcacccagctaatttttgtacttttagtgggacagggtttcaccatcttgtccaggctagtgtcaaactcctgacctcatgatccacctgcctcggcctccaaaatactgggattacaggagtgagccattgcgcctggccaggatggtctcttttatgctgctgcctctgttgtgattgttgttagtatgtgtgtgcattgatttcctctctccaggctgctgcacaactccttggagagaacggaaaggccagaaattttccctgctctaattttccactagttagcaagcttatatttaaaccaactttaggcttcttaactcccttcttttagaacagaacttctcaagatctctgctctcctaaggggttcatggatgggctctcaaaggattctgttaagtgctaaaagttgtatgcaaaattttgtgtgcgtaagtatgaatgtactatatgtatatgtcatgcatatattttctggggagaagtcatatatttcatcaaattatttgaaagtttttaaaaacaaaagtggttaaaagcaactccccctaaaatagttttcttctaataaaataatcctaatgataacagttgttataatctatcatttactaggtacttttcatgaagtaggtgtcttttttttacattaatttataaatcctcacaacaaccgtgttaaacagatactgcatcctcaacgttaggtagtctatatatagtggagcagagggctccactgcatgagatgtggagtctttcacaccactgacataaagcctgcctacc

SEQ ID NO: 47287 - DNA, 3311 bp, Homo sapiens
gtgcagtggcgcaatctcagctcactgcaagttccgcctcccgggttcagttcacaccattctcctacctcagcctcccgagtagctgggactacaggcacccgccaccacgcctggcttattttttttgtgtttttaatagagacagggtttcactgtgttagccaggatggtctcgatctcctgacttgtgatccatccacctcggcctcccaaagtgctgggattacaggcgtgagccaccgtgcccggcctagtttttgagttttaaaaaataatgttactgttacccattactgcttcttctcagacatgagaaaattttttctttattccttttggataaatggattgtttcaaacagaaagagaagatttgagataaaggggcctgctgaagacagttaaacttaagggaatgactaaacaagaagaatgaatgaagatagtgacagctaaaagaacattggattactatggaaataagacatttaatataacactcataatgatatctaccagtttttgagcccttatattacacttgggtctatgctctgccttttatatattttattcaatttaatctttaaaaccaccctatagagtggatactaagattagccaaaattctcagatgagaaaactgccatttagtgacatcaattaatctgctcaaggacagtgccaggatctgaatccaattctttctgattgataaacctaggactttgtcttagtccatttggaatgccataacaaaatacaacagatggggtgtcttataaacaacagcaatttatttctcacagttctggaggttgagaattccaaaatcaaggcaccagcatattcagtcactgatgatggcaagctttctcatagacagctcctctcactctaactttacatggcaatccatagaggagtctctctaaggcctcttctataaaggccctaatcccattcatgagttctctgcccacatgacttaataacctcccaaagaccccagtttctaataccatcatcttaggggtgaggatttgaacatacaaattttgaggacacataaacattcagatcacagcagcatctttaaccactgcaacatactgctccacaaaagacagatatttcttttaagaaattacagaagtcaacgtgaagcattataattgaaatctcttgtatattatcaggagtcagaagacagcaaagctgaagtctgactctgctttgccctgcgtagtttcaggacaccttgtacttcaactcatgtttgctcatgactcagtgtggctgacatctccatgacacacaaattagaccagagaagcaagactctccctgagctggagctggccctcaaggtagtgtataccaatcagatatatccttggaggactccataatcagatttgggaggtctggaaggagcccagactttctattcagcaggagtgggctgagattcagctgtaaatagaagagaaaggctgccatagcagtggaaaataactatgtagccctggcttgtccatttcacataaatgccacaatgattcatctttgagttgataaacatgttttcctaagtgaaagtcagacagacaggatgtgattcccagctagaagggcttcattactaaagtattatagagagaagctgctgagcctatgcctttgccatgctggaaatggatttttgctaggggcacagtttttcatttcagtgaaatgcagataaggggaaattctggcagtttattgtagtgagtctttagtcttactttccttttagttctcatagtgacacaggtctggtgtcatattcagggctcacattaagaatatgagcaatgctcactgacttcattgacatagtcgccaatgtattcccaaacctgagggggaaaaaaacaccacagactcaggatttgaaatatagatggcactgttagactcaggatctatgtttagaaagaaattaggcacatagccaccagatagatgcaaggaaaataccacacctcagttattaaggcatcaggttttcttacaggctcttgtttacaagtacaacccaagttcaccaccatcaccccacactaccccatactttcaaaaatcactttataattcccaggggagaattataaatcaatgttgattgattgctctgtagtatatgtaaacaaataaaaccaatgggcatggggagcccaattcactgcttctcttgtgacaagattaatttcaagtcaatccagcactgaacaaacatatattgggcatgtaatatttggtggtctccatctggttgctgggataggagtatgaataagaaggagcttttacttgtgagggccttacaacccaataagggagacagaagcacaaacacctgtcagtgtaatgtggcatgagaaatagtagaattagaaagtatgatgaaaagaataatgaaagaataattttttcctgactgaaagtagagttaggaatgaaaatagaattacagaaagctgaagctaggagcttgataaggtctaaatgtgtgtcccctccaaatctcaagttgatgtgtgatcctaaatgttggtggagggggctgctgggaggtatttggatcactggggcagatggctcttaaatgtcttggtgccctctccgtggcaatgagttcacttgaaagctggttgtttaaagacccagtacctccccactctctcttgctccctctctgaccatctaacacacttccttcccttcccttctgatttgaccaaaagcttcctaaagcttcaccagaagctgagcagattgcagtgtacagcctgtgcagcctgcagaaccgtgagccgaataaacctgttttccttataaattactcagtctcaggtattcctttacagcaacacaaaatggaccagaacagagatgatactgtgatagattttaaagcctgagaaaatcatttttcaggtagactagtgaagtaatgcattctaagcctggggaagaatatgggcaaaatcatagcagagggcctgtttgtggtatagtttaggaatggtgacacatcaggcatggctgtagagtgaggttttgtgaggacagtgtggaggcaaaactagaaaggcacattgcaagtaggttgcggggtaagtggggcaggttgtaagtgggagtggggaggtggggagtaacattgttgccttttttgctctagaaggtggaataccagcagaggcctttaaaaaagaatctgacaggatctgagttcagatatagataaaccacctctat

SEQ ID NO: 47288 - DNA, 895 bp, Homo sapiens
ctaacccaataggactggagtccttatgagagaaggaagaaacaccagcgcacactctctctacgtgtgcacacatagaggaatggctgtgtaaggagtagcaagtagtcccctctgcaagctgaggagggaggtctcaccagcaaccaaccctgctggcaccttgaccttggacttccaacctccacaactttggaaaaataaatttctgcatttaagccaccccatctgtggtattttgttatggcagcctgagctgatgaataaaacaggtgagtatgtggggatatcccctccattgttgtgtcttcattccagttctgagtcaggagattctcggaatttcctgggagtaacagttccatccaagttacaagttgcgttaggagaaagaaaaggctacacctcagaaatgatatagcatttgttgcaagagctcaagctagcctctctgtgaatcagtgcaaagagaataaaagtaaattcaattaaagacttctgtgatcctattgccaagtttctgtacaaaatcaattattattatttattaacttttaagttcaggagtacacgggcagatttgttataaaggtaagctcatgtcatgggggtttatggtacagactatttcatgcctcagacgttaagcctagtacccattagttatttctcccgatcttctccatcatcatcctccaccatctggtaggccccagtgtctgttgttcacctgtatgtgtccatgtgttctcatcataaaatcaatcattttttatgcgtataaattggggtcagattaggctatgaaagcacagcatagtatacaaaaatattttcagcctatagaaaaatattgttagttaaaacacctcactgatacttaacttaaaaataa

SEQ ID NO: 47289 - DNA, 619 bp, Homo sapiens
ggagtcccaccagtcatcagcaatctagaatcagtgtctgaagaagattctcaaatggaggcattagtgaagtttggaagggcacattggactatcatcatttcaaagatggacacgattctatttccttatctgcttgcagagctatttaagaatcaatgtcttatttttcctgagtcctttataaccctattcatattttcaattgctgatgcctctttgagctacgagttctactttgtgcataacgttgaggaatttctacgtttactgtttctccttacttcactcatctccttcattaatggctggcaagtcaccgaatttcacttttctttacacaggtgtaaggaaaattgcactttagtcatgagtaggctgaggcagccttccagtgcagcatgactcagcggatttgcagcacaggtgcacaaccccacacattatgtaaccacgccacgtgaggcacattaggtgatcatccacgtgagcttgtgcttggctcagagccattattgcctgttaaaagttatgattaccctgctaacgctgtacgtacagcttgcgcctaggcttactcctgcccagagcgagagtaaagccatgtcaaaactgtctg

SEQ ID NO: 47290 - DNA, 582 bp, Homo sapiens
ctcaggaggctgaggcaggagaatcgcttgaacttgggaggcaaaggttgcagtgaaccaagattgcgccactgcactccagcctgggggagagagcaagactctgtctcaaaaaaaaaaaaaaaaaaagaaagaaaggaaaaaaaagagtgtaagttaagttttagcagtgttgtgttagagttttcttttataaaggtaaaaaaaacacactgtaaatgtgatttatgagggttacaacattttccaagtttatatcacttccctggttgtgttttattttctcagtgattccattctgtcgagtattgcataagatcaaagtctctctaccagggcacacatgacgtgatcctgtttggaaaacattatcaaacagtcaagctaaaatgcaaatgaacacaaaccctagtattttctcttgacaactgtggaattactaaacataaagacatgaagattgagaaaggaagggagtaaaacaattacatatttaaaaataaggagaaactggattggttttgatgataaatttattggtactacaaaaagctctcatgacaaaataccatacatgtttat

SEQ ID NO: 47291 - DNA, 4106 bp, Homo sapiens
tgctttcttagtttgcatcgctagtcacctttgtatcatttgcatctgatttggaaaatattttagaacaacccaataacaacttcgagattaaaaaataaaattctacacactttacagttccttgctattacatgaatgtgtaaattgaattccctctcaggagaaaaaaaacaaaacaagggctggcttcccaaaaatgttttcactggctttagggaactaaaacaccagtgtctgggtgagtaatacttcctgtaaaataaagatagatcaacacataattaagtcctggctcacatataattgttgttttggaaacagttttgaggataaatatggttatgctaatgaaactgcccatgatttccactaatgatccagtttattaattaggtcaggacatttttccaccttgtgctatccattttggaatgctgaaaagggttaaaaaaaaaaacttctaagagaacactgtaggcgaagaaaaagagagaaattttaaattagttatcaactcttctaaggattccagttggaggagtagatcgaaagtgctttttcgattatttatgggtttcgaagattcttcctactccactaggcagaaaaacagagttgtaatatacagcatttagaattcataatccttagcattatttctctgaactcgacatcctaaatagccagcgtttactaattccagagctgagtgtagttttgtaggaagttctactgaatgcggagaccaaaggggagcctgcctgctctgagggttttgttgaggctgagtgtgaactccgggcgagaaagcgcatctcagctcttagatcacacccactcagggtgtgcgtgtgtgtgtgcgcgggtgcctgcgcgcgtgtgtacgtgtggggaggtgtgcgccaaaggggtggggtgaggggcggcgaggagggctgtaggtgaagcgcggggagagggaggtcgcccgctccggcctctcccccaggggccctgcggctggccagcgctccggctgcacctcctggtgcgcgccgcggcggcgccacaggcccctcgaccctttgaccaccgccctcgggccgcgcgtccggcagccgggaccggtgatggcgcgggactgacggccgtctcctcccagacccctctgtcccgcctggggctcgctggggctgcggcgccgccccgagctgcatgtggggcgggcgcgcccgagcccagagcgagcggccctcggcgcccccgaggcggtgccccgccgcgccagagtacgaggaggagcggcgggccgggccaggctccccacgcgccgcagcctcggagcacgggctccccggaggggacttggggcgtcccagcccaggaggaaggacccggaagcagaagcggagccgcgagtcgagccgagccactgcccccgctgcccgcgggcgccgggtgggggtcccggcggctggatgggcagcggcggcgcgggccgcgggcggcgatgggcgaggagcagagcacggtgagcggcggcggcgggccccaggagtcgcagaccctggccagtggcactgcgggccaccctgagcccccgaggcctcagggggacagcgcccgggcgcccccgctgcgcgccgcctccgcggagccgagcggcggtggctgcggaagcgactggggctgcgcggacaccagcgccccagagcccgcgaggagcctggggcccccgggctggagtaagagccgagcaccggcgcagcctgcgggactggcactcaccgggcctctcaatccccagaccttgccactgcagttggagctggaggaggaagaggaggaagctggggatcgaaaagagggaggggatgaacagcaggaggcgccccccggcgaagagctggagcccaggacccgcgtgggggccgccgacggactggtcctggacgtgctgggtcagcggcgcccgtccctcgccaagagacaagtcttctgctccgtgtactgcgtggagagcgacctgcccgaggcccccgcctcggagcagctctcgccgcccgcgtcgccacctggggctccgccagtgttgaaccctcccagcacccgctcttccttccccagcccccgactgtccctcccaacggattccctctcccccgacggcggcagcatcgagctggagttctacctggcgcccgagccgttctccatgcccagcctgttgggagctccaccctactctggcctgggcggtgtaggggatccctatgtgcccctcatggtgctgatgtgccgggtgtgcctggaagacaagcccatcaagcccctgccttgctgcaagaaggccgtgtgcgaggagtgcctcaaagtctacctgagcgcccaggtaacttcacccccttctcttccccatttatcattccaaatcactggcgaggaggtcctgctctcgatctgatctccctgctcgcgcgaagaggtgaccgacacacttactgaggatctctgttagtttctcacgtctcagttgttatttaagtgtattatgacctcactggtttacttaactggaatttaactttgctgtgaacttcaggctatggttggcatgtgtagaaggcacaagatacaagttgttgccctcctcttatttcttatacaggattgcaagcacaagcttgctcaaaggaggagaggaagagactgcctcatcggcctggtatcccagaaactaacaagcagtgggcatagaataaatatttatggagctggtggagaaaagaattggaataaatatttcagacccataatacatgaatttgtaattttgcttcatttgtatattccaggaaagagtgaatgtttaaaaaaatgtatcccttggcctttgcctacttttcagtttcctttttccacagtaaagttgaagtacttttctttcactgaggttttaagccagcactctttaagagggaagcaaaacagaaagagcaaaacaaagcaaagagaggctaagaggtttctcagaacaagcactggtgaaactttcctcctctgcttttatttgaaaacttggttttttttcttggaaagcttgagagtgcaccagaccagctttccttcactgacggtgaatgcgttcttccagcagttttcaatctgtgatgtttctgccagtgttttgcacaatcctggatgccctttgatcctgtgtccaattgtcctaggcctattcatctttcaaaaccctgtgtgttcaggtgccaactcttctgtgaagcgttgcctcaccctccaagtcactgcttatatactttcacagtatcttatattatcttacatgcactgaagttgtttctttcgtgtctgcttgtcttgttagactgtctggacaatgtcttagagtcccatatgtggtagcttcatgttgagtcccttgcccatcatagtgtttttaataacattggctgggacaaactgaacagggctccgtaccatgtgattcctctatgttttttggctaactcatgcttgggtctagactgaaagtgtgtacagtccctaactaaaaatgcaaacaaagacttaaaacggtatgttacataaacagtaagttggctaaaatagttgggattatttaaaagcctctgagagactgttgtttctttcatgctttatctacagagattcttaaaacaggaggaatgtctgctgctggttgtggtagtttctgtatcatcatcctcaaaacagatttcgctgccctgcgatgggattcagacatttccaaaatataagcccgcctccagggaagtcactgtgagagcagatgtgtacaaaagaacaatacaaggtagcatgggatgagatgtcaatagagtaacaattccagatagcacttcctgttaaatgctggatacacattccagaaattcaagggaggtagtcattgtggcttggggtactttacctagcagtttgatttccttatggtgggccctttccccaaagcagttttctttttctttattaaacctcataagttagttttaggaagttttagtaatggtagtagggagacagagggacatagtcaagtggtcattgcagtgtacagt

SEQ ID NO: 47292 - DNA, 803 bp, Homo sapiens
tatctttgttaatgaaaggagttcatgtaacagattatttttgtagtctagatatattctgtatagaaatagtgttgtatctaatgacactgcagaattaaccatcctggtcaatctttgtgaaattggcctacagtttgtttgtggtattctagtttgtgtgggtgatgttatcgtgtgattcgtatcttcttgaatagatagctgtttatgtttccagaagcatagatgttgtcctcgagtttcttcctgttagagatctgtattccctggaacagaagaggcatattgcttttattatgtttgccccactccacctttgccccctggctcaggtaactaaattctgggctttttcattcatgtgaatgactaatccctttttaaatctttctaagctatttgcctcaataatattctctactgtaagattcaaaagctaattataggctacctggcaaattgcttccctttttgtggtattgattcttgctttatttactcacatgattattggccacactcagtattcatgaaactcatgagctctgagttgtatgtggcaagtttaatcaccacagcttttcccccggttgcttaacaatttaaaacagcaggaaaaatgaaacaattgcttgtaagccatttttcctaatgtttagagtttagcgtattattaatttatgttcgtctaagtagagctattgggtgaaatcacaggtgactctgatatggccagattgtagcccatctttttgaaagtaattaattaatgaattattcattcattcattgagacagtg

SEQ ID NO: 47293 - DNA, 718 bp, Homo sapiens
agatgaagggaaagcttagaaggaatgctaagcaggaaaaccctgaaaggatagtaattttttcctgatactttgctcgtttttttgtttgttctcaagatttgttaaaacaaactgttcatacatgcttttctctttaaaatcactagtatatctacaaactaaaaacttggaatcagaattttccatcctacttaaaaatcatccaaatgaagagcttcagagggagttattaactctttttaaaaataatataaaacattaacactttctgactagttgccagattaacatcagggaaagtacaaatgtactagctgaatttcagccacaacctttgcatacttgacagatgagacaccaaagtaagtataatgatttagaaagcacaagcaacagtgcatacttgtgcatctctttgcctgtatgaggtgtcttttcagttacaataattgttaaaacaaagtattaaaataaattgaacatggacctttgaagcttaggatcactaaatgctgaacaaagattataaaataatgaagccagttctaaaacaatgctttcacaattactggtgtcagcaaaatgttttatatcattaattcatgtattaaaattaagatgctgaaaaaatcatgggagcatttagattgctctgttctaatatgcttttggcttattacaatctaaatggatttgacagagctctgttggtttg

SEQ ID NO: 47294 - DNA, 561 bp, Homo sapiens
aacatggcaaaaccccatctctactaaaattacaaaaattagctgggcgtggtgatggacttctgtaatcccagctactcgggaagctgagctaggagaatcatgtgaacccaggaggtggaggttgcagtgagccgagatcgtgtcattgcactccagcctgggtgatgagcaagactcttgtctcaaaaaagaaaaagaatcaagaaaagaaaaacatttggaatatttctgggttttttttttctatttctcttacagactatgtacatgtataggaatttttccagattttttaaatctgggaaaggttttgttgcttcacaaggccatgaatctttaacctggcttggtattgccaaattgttttccaaagtggttgtgccagttgatactcgctccacagctgatgaaagttcccattgctccataacctcaacagtacttcatcgtatatttaagtgttttgccagtctgcagggtatgaataaacatctcatgattttgtgtgttcattaccctcatttataattagcttgagctttttttatttttgaagat

SEQ ID NO: 47295 - DNA, 628 bp, Homo sapiens
cctgtagtaacagagtattcatatcttcctgtagtttgagtcttatagagggggaggtattttaaattataaacttttagctaatttccccaagcatcaccttcttatccttttagacactttcagtatatccactagtaattaatatgatttttttcttacacagatccagtgccctacctgccaattcgtctggtgttttaagtgccactctccttggcatgaaggtgttaactgcaaggagtacaaaaaaggagacaaattgttgcgtcactgggccagcgaaattgagcatgggcagaggaatgcccagaagtgtccaaagtgcaaggtgagataacttttaggaggaaaagaaaaaacatgtacatctggatgtgactgaacaatatttacattattgaagggaattataactgtcttaatgcaggtatgtggaaaaagagtattgctcttttattttggaaaagtaattatataattaaactgaaaatttttataaaccatgtatattcttatttttgcattactcttcaaaatttaaggaggccacatataaatattgacttaagacattgaggtccttatattacatttaaaaatgaggatgtactttataggaaaaata

SEQ ID NO: 47296 - DNA, 949 bp, Homo sapiens
cagttcaatggtttgtttgaggtcacatagcaaaggctcaactcaaactcaggtctcctgcttgccagtctgcggttcctgccatggggaaattctgttatctttgaagaaaataataagtaagggaagagagagatgccctttcacaactgcaaaattctctcctccccagtttccagctcccatcatcaacaaagaaaaccacgaaaacaaaaacaaatccggattgcctttgtccacagtatagagggcgggggcgggggcgggggcgagggcgaaggcgagggcgtcggcggggctgcagcctccacgcagagaccactgatggctccgcgccgctcagttgatcccttcccactgcacggagcgggagactaaaggcccactgcccatggctgcgaaaaccttccttcgggaacgcggagctagtgcacgggggcatgttcttcccccgcagccctggcaagcagaggccggcggcctgtggcgcggggcagttgtgctggctgccgggcggggctgctctgggtctgggtgcacggagaggagcgcggagtgaagcgcacggtgcacactgcggggcgctgcttgtcacctccctgcccctccctctgccctcccccgctgtccggagcacagtcccgggagggcggatgtcccctgggaagatgcgcgaggagagcgactgggaggcagctagcagcacctgcgtgtgggcaacacgacccgaggctgtctccattgcctgcgtgctgaaagcataaaagcttttttttttctttttttgaggaagtaaatgtgtaaattaaattactttggtgggggttagaaaacagttttcctcagtgtcatggtgacatcttccatctgccagttcacttttcataaacctgctgatacattttctacatctcattaaaaaggtaacccaaaagaaaagtaacggggg

SEQ ID NO: 47297 - DNA, 2298 bp, Homo sapiens
tatgaaagtgtccccactcctcactgagataagactcccatgggagatgggttaatcacagaatgggctgattggctgattgacttcgggttgctttgcaataaaatgtatagtaaaagcattgcactgtcttttactgattggctgattgacttcgggttgctttgcaataaaatgtatagtaaaagcatagcatttccttctttttggggatccaggatgtgatataaaaatgagactcttaattttggagatctatttttgccttccaactgtgcctgcttattaggccctagaaactgtattgttttcctaccctgttcctccaaggactccaccctaaagtcagtaatccaattaagaaacttacaaactggcaaatgaaaaatcctacaaccactagatcttctgtctgtatagttatatatgtgttgtgtgtgtaatgtttatataaaagagctctaattaattggcttaaagaaaaataagtgcttaaatattttgaaagaaaactaaaagctataattccttttagtttacgtgactttaatcatctttaggaaataagaacagctttaaagatcattggtaaaacatagacatttggtccaaattaggcaggtcagatattaggtttactaaatgctttaaggttgtaaactgctttcacttttgaaaattgttcaacttgcctgctttacagctaggtaaggcctggggatgtgtggggttagccatgccccctagctatgctggaaggagtcagaccttatctgcacttccgtctgatgtcctaggctcaatcctaatacataattaaaattgcttactgaccaggtttttcaccaaaagttgctaagagttaacagtataacttgtactcgagacttctaaaaaaatagttttacatgccaggtgtgtgaagaaagtgaaatgtgcctttagtaaaagattataagaagacatgggaatgtacatttttgcctagtttagagggttaaaggattgttttaaattaaataggataggagagagatcatcatggcagatgggaggcaggactagattgcagctccagaccgagcagcttgcgaaagctcgcattgtaaatgttggctccggattgactgcaagaacaaaccagcaatcccgagaggacccgcagaccctctgaaggaagtggactgctcctacaggacccaagagacatcccaaataccgtgagggacccaactacagaagtggaaaagtgagaccctcctctcctgaacacacacccccactggagaagctgaaggtctgtttgcagaagtttctgaccttacctggagctgagccaatttagaaagccaagtgaaataaaggggtagaggaagcagcagaaaggccctgggagctcgctgggtcccctggcaggccattcctgcctggcaccacagggacccatcaggtgggtgaccagaggatcagggggtaaaactacacaggaagaaggaactctctggctgaactttgtaacaatttgaatgcggagagaagcttccttgccagaacttgggggagggtgcaaatctggtgtgcagactccacaagttgcggggagaaccaagcccttttctctcacagctgggaggtgggtagcccggggcaagtattcaaccccattgtgccctctgcctggaaacagactcttggctgtctgcggagggagcacagtgggagtgagactgcccttcattttgcatgggagctgggtgaggcctgtggctgccagctttcccccacttcccgacaacctgcatgactcagcagagccagccataatcctgctaggtacacagctccagtgaccagggagagtcatcctcatcccccacagcagccacaacaagacccgcccaaggagagtctgagctcagacatgtatagctctgcccccacctgatggtccttccctatacaccctggtagcagaagacaaagggcatatactcatgggagttctagggccctgcccactgctggtccctctctatacttctacagctgatgctttctggatagcaccacctcctgggaggagaccaaccaacacaaaaatagagtattaaaacaccaaagctaagaaccctcacggagtccattgcacactgcctcccaccccctcaccattgtctccaccagaacaggcagtggtatccatggctaagagacggttcacatcacaggactctgtgcagacatcctccagtactagcccagagccggatagactcactgggtggttagacgcagaag

SEQ ID NO: 47298 - DNA, 1850 bp, Homo sapiens
atgatctttagcattttttagaaataaaatatctttttaagttaaggtaggtacattgctctttctagacatcgtgctattgcatacttaacagactacagcatagtgcaaacgtaacttttatatgcattaggaaactgaaaaattcgtgtgactcgttttgttgcaatactcgctttattgcgggggtctggaacctaacctgcaatatctctgcgttatgcccttatagcgccgggagtgggtgccttccgccggctgtacagagcgccggcaggtggcgcccagcggcgagcttgttccagcttggtttgggccaggtggactggaaggggcggaggtaaccagaagcggctagtggcggctgcctgcgtccccaaccccctccgcgcagcgctcgcgacacgcgtgccaggagtgggagcgagcggcggggccagctgcgttctgagcctgggcgcagctgccatctgctctgggaagcaccagggtgtccccgccgccctcagctcgaagtcagccaccatggaggcgcaggcacaaggtgagtggtcgccgatcgccccgagagtcaggtcctggggcgcgcataaaggctcttttcctgcaccacctaacttcgctctcggacagaacagattggtgccgtgttgcacatccagaactccactcccacccgcgcctttggtataatgcctgctgcccaaactcaggatttgctgtgggtctggggatcaataaagtgacaggggatccgtaagtggagaggcccctcctcaggaaatgcgcccgtggaatgctctaccctcttccgcagccagtcgcccctggccttcccaacctcgcggctgcccgaaggacctgttgtgccgggtccggaaagcgtgtttcgctccctttcccttgagggagtggggagggaatgtgactcttttcgcccagcgccgtggactcgcggcttgtggctcccaagttagggagtgagaggatcgcccgccgagggggtggctccgcagcccggctgcgcgagacgcttcccgctcggggacccgccttccgaggccaggtgaacgttaccggccccctgacctccagcagatccacacgtgagtcccggtttccgcgatcggggagcgacctctgcctcccgtggcgcgcggggcccccggccgcccagctccctgctcccggggctgcctgctggaggagcctgcggtggcttcaggaagggcggcctcatatcttggggtcacacttggaacagggttggggaattccgatggaatcgttcaagaatgggggtaaacggaccgtggaaaggggcagaggtgggcggatgtggagcgagagacaagtgggaaggaaacggactcagtgatctaccttggggagcaacgcccagaagggatggcttgcggagttcagcctttaaggcaatcaaagccaccattcttttacacagtaggaaactctgtgttggctcttagtatagataaaatctcattaaaaagaaaaaaaaaaaggttcatgacctgatgcgctcgccctctaggggcagaacgccctgaatgagagtgggttggcgattgcgtgggcctggagtcgcccaacaggtttgctgccaggattacaattgtctgaacagcacgaaccttactcgtttgttccatcctcctaagtcctgcccgtaaagctgccgcttcccatattttttcctctattatgtagataggaaatgataattcaaccaagggtgagggcagttggtcaaattcaaaagcagaggtcaggttggaggccttcacgccagaactgaagctggtgggagcagcaccggagctttccaacct

SEQ ID NO: 47299 - DNA, 480 bp, Homo sapiens
tgccctccccttcctctctctacccctgctttccacctccctttctctctctctctcaaagtaccaagtccagtgctgtattctcagtgctcatcttcactgacctattagcatatcttggcggggttgcccactatctgctccttaaagcactttgttcacttggttttcaggatactgaacagttctcctccttcttctcagtctcctttgctagctgctggcctgccccaaggatccgtccttggcctgcttcttctttctatctacactagcactgtttgccatctcatgactcatgattttgaattggatccatgtgctaacaactccaaaatttatttttcctgcctggacctcacttctcaacttcagactgcctacatgatacgtctgcatgggtgtctgatcaacatcttgaactcaacatgtctaacactgatctcctgagctccctcctccaaaatatccctagtcctc

SEQ ID NO: 47300 - DNA, 507 bp, Homo sapiens
tctttatttactaggatgaaagcttaaagatttgcatagcagatatacaaagcaatgttcattgtttggttacattttgaggaagaacaggttaaatgttttgcttacatttgcattgctgctttcaaaataacttagtagagcattggggaaaatgccagcagtgcttacctcttcagttagcagatcctatttccggtctcttgtggcttggatgttgatgataacaagacaggcttgctgaaaggagtgcaaagtgcatggggaagggtgcatgtcctccatggcaggactttgacaatcctggtgtctgttgcttaacaccatgcttcagacctctaactgatctgatttcagctcttgccattttaggtatttcaaaaaataaggcacaaaatgaaagcttttaatatgtttgtgtttatttacatatatatgtgtgtgtgtgtgtatcctatcattatctatcacctttactctgccttatttttcttcacaaactatgac

SEQ ID NO: 47301 - DNA, 1093 bp, Homo sapiens
gcttgctaggcccaaaagaacagactcttttgaaaagtgcagagtttagaactctaagaggaagaacagtcagaaggatttttttttaagcaaagtctatttttcacccaaggtggaatataatataaagtactaatcagttatacaaacatgttatttataaaataacagcccactaagcgtcagaggtgaggggttgccccatccaattttcagagtctaaaagaggcatctgggtgtccattacctgaaacagcacaggcgctagtgtctccagagaaaaggaaatggaagagggaggcaggggatgttacaacagggtgtgattaatagcagctcactgctggagttcactcaggaaaggctgggtaaatgctgcagctcaaggtcagtgtgaggcaggccaagggatcggttagccctggaacttctgagtgagtccttggctccagttaaataagaagcagccaagatctgggaaggtcaacacagtcaaagccctaccaggaactaggattataccctgggcttcaagccaagaccagggcactctggctgatctgagtgtgatcttgaactctgctttgccctctgagagaaggagccgaagctctgtctaccttcagggacagaggtctggagttagtttcctgattacagcaggaacaacccaagaggccatcagatactgggaggttcttacagtgctctaaaccctttcaggcaatttgagtcttctgtgtctattgtcttcacaggcatcttgtatagtgttggaaacctatagtgataagtgattttcagctacttactagagatgggagaatttcaaagtcctttccttcattgtccatctttactcatttgggtagagttatacccagttctatccctgcatacatacttgcatgcatggggtaagagagatctatttacaaacacgtgaccacaaacacatgaccagcttccaaagctgagaatgccaaggacacatggaagttattggtcacctgagtatagaaaaagcagggaaacccagctcaaccactttctgtctatgaacgtcaattttcctctttataaattagggatg

SEQ ID NO: 47302 - DNA, 2817 bp, Homo sapiens
aagggtcattaagaaggcaggagatttttgtcctggacatttaattatctctagccattgtagagaacgagaaaaataagaaagtgagttaatgtataatctgagaaacagaaattataaccatatgtgactcagatcacagtcacatctttctcaagacttaaagtgctttgggggtcgcaacaacttttgcattatatttattttcacaaattttaataactgaaaaatagtatacagtgtgggtatattatacttgaatactggtgccctactgatggacgtttaggtttttgtagttttctaccactaccaacaatgatttatactctctccttaggtttgcacctttttttctgtaagattgattctcaaaagtgggatggcagtgtcaaaggctctcccaatcaggtgtcacagtgcaaaagccaacaatgtgtggttaaaggatccattttttcacaatcttgccaacacaggctcttatcccattttggcttctttgcaaatatcttagatgaaaaacagtatctctgtgattctaatttgtgctttccctattgctagtgaggataagtgtcttttcatatttcatctcaccattgcattttcttgtctgtgacttgagtgaaacttttctaattcttgcatattttattcttgctcaacatgtcacgactcagaaacacatatttccatctcctttagcatttattttgctactcagatttcagaaggaaaaaggatttttttcctgggcattgtcagtagtagctatttggaatgctaaagatttgataagagacattgaagaaatgtgaatgttactgaaccgatttgcttaaagtaaagggaagactgtctatacgtctgaccaatgctttttgaatgttcaggcccctgaatctggctgcagtcccagtaggcatgggtccaggcgtgatgtgtttgtggttgcatcatggcatcgctgtctaaccctcgcctttgcattgaagttgtgcaaagattagagaactgtaaaaatctcaggcctgtctgaggaagtctttcttactatctatccctttctttaaacatgccttgaaaaaaaaagctacattttgtcctgctttgtgttcatagtgaatatctttcattgtcaagaaaattttttcctgaactagctctgaaagatgactcagcactttataagatcagtgagcctttaaggaatgacctaagatggaatgtatcctgtccagtgaagctcaaggcatgcacaggtcgtgttcacctcactccctcaggagttgaaggagataagaaactggtcccacagccctcaactctagcttgggtgcctcgcagctactcagctaaccaaagaaatgagtggaaaatcagttctctggtctatttttgatggtgtgagaagaaggaggatgaggaggagaaggagaagaagaagagattacttctcattttaattgaaatgagtgactttttattaatgagcttgaattcagaataatttattaccctggagttttcttataatataataagtgagactgttttcctttttgcttagggcaaaaaatgtaaggaggctgagtgttacatttggaggtttatcttttttttttttttttgagacggagccttgctcttgtcacccaggctggagtgcagtggcccaatctcagctcactgcaaactctgcctccccggttcaagcaattctcctgcctcagcttcctgagtagctgggattacaggcacccaccaccacacctggctaatttttgtacttttagtagagatggggtttcaccatgttggccaggctggtttcaaactcctgacctcaggtgatccacccaccttggcttctcagtggaggtttatcttgtcaggtttggcttccttttcccagttccatgaaatgtgaatttgaatatgtgtttgtgtggtcagggagagtgttgggaaatgagggtgggatacagagagaaggatgatttaaaggtttagatggtctggttatttttagtttttctattcccatttctgcaatagtttttatttttcctcatacactatgggagtttgttcacagaaggaagttcctggagcctatccatcaggaacattaactatatttttgtttgtttttttgcataactatttgtttagtttttccttcccaaatttgtggctgctgtgttcttgtgactttttgtcgggggtgtttttttcttgcttgcagtgttacccacaatgcatctattttgtgtgtattaaacagtccctttcaagagtacaaataatggtttgaaataggaagagtatcccaaatgctttaatcttatatttgaaatgtaggaaattggaggagctgaggatatttgtgacacatattttacatcttctcattgaaagtagagctgttgtttgtctgcatggttttgagtttggtcactgaaatgctaatgacacagcagaaacccttggtgtgtgcataaggccacatgacctcaggtcaggaataaaagcttagggctgagcagctcactctttggttgagaatccagttggctcccctggagtgaagttctacacagaccctggaggaaccaccccatctgtaaggaacctaagtttctgtatttctggctttcattgtagaaaacctgatgtcttctatacttgttcccttgacctacttctaaaacagtttataaacaatttcaataatattcacagtcaagtagagctgtcttttactgatatattctaaacaacataaattaaggtggagcttagaacatataa

SEQ ID NO: 47303 - DNA, 1727 bp, Homo sapiens
aagagatgtccaggatataacacacagaagccgggtcataatttcagaacctattacaaaatgttttgctaaactagctaaaatgatagacatctggaatcaaatgaactagagagctcagagaatgaaaggggtagaagacagagagagataagtcacaaagtccattcgtcaaattattctgttactgatgtataattatggaacatatgcaagtcctttaaacaaaaacaaaactgcatttttccgaacaagagttgcggctttttgccttcaaataatcctacacaagcagaaaacactgtattgaagggtctgaacgtgaacgagtgataggcttccaaattctgaggcacaagggataagggcacttctaattgcttgatgctaccagccgtgactcttccttttattcacatcataacttcatcttgtgaaactgcatttcttcctcagaattctacatctctaaggaatgttataaatagtagtcagagtggcatgaaacggataatttactttgaacttgggagagagacggggaagacgcacatgatgaaactcgtgtgtattacattaaatcccgtttggggggtggccgggagaaaagtcttgtttctggaagtaactgtgagacagacataaaaagctccacttaaaatctgaggagccgacagattctgttcttcccacccgtgctcagaagcagccgcgctttacacacacacacacacacacacgagttctggggtcgtgagcacacacacacacacacacacacacgagttctggggtcgtgagccccggaaaagctcagtgcaggcagggccaggccggctgctctccgggaactggcgcggctgcagtgcggacctcgcggcgccaggctctaggctcagactccgggccgccccagctggccagcctgtcccgccggctgcttcctccgtccaccgtcggcaacgcgcggccgcatccgcaggactggggcctttccggaattcggcgtggcggacgcggcgcaggaagggcaaagaccgccggccgagcggggaggccggaagctccgccgccccacagtcccgcccgctcggccgcggcctcccggcctggtgcccgctcaccttgagctgccctaccagccgcaggaactgcagtagggaccgagccccgtggcccgagaaggtcgcagaggagaccgaagccatgcggccaccgaccccggctgggcggagcaggccgcggcgaagctcctccccgtcctcctcctcctccccttccccttgtctttcttccccctcctcttactcttctatctctttctcctccccctcttcttcttccttctgcccctcttcctgctccccctcttcctcctccccttccaactcctcctcctcctcccccacttccgctttctcctcttcctcttcctcctgcccctcttcctctctccccctcctcttcctcctcctcctgttcttattcctcctccccctcctcctcctgttcttattcctcctccccctcctccatattctcacggttttctcaggaccttctgtccagccttcgccttcttggccttggtgtccgctgcttgggcattgctccgtcagtggcagacaccttgcttggcacatacttgacactcagtactctttatgaaaaataaagctctcctttctaaatttatgaacctcgttattcttcagttgacagtgtaa

SEQ ID NO: 47304 - DNA, 679 bp, Homo sapiens
ggagccacctctggacacctctcacttatggagtggagaagttctgcatatataaaaacaacgttactgttttgttttgttttaattctctgagtccataatctcttacaccagtgttttagtaagccttcggaacttctccatggatcaccatcttaagtgactacagtttttcttagtcatacagcaggctttagctaccctacaaccccatttttatcatatgggatagactcaaacttttatcttttcagagtgaccacagctacggtttgactctgcttatctacatgcatcataaggaataaggcagggtttcaggtgaatttcacagaggactttgagacctgccactgcctctggcagctgctatgtgatgaatcatcacatgtcttagacctggtggtgtaatccttctccaagcagagaaaaagaaatgaaacaatggcatacactcagtagtagcattttcctgttatataaaggaatatggttactcctaaaaaacagcagcaaagttaagtaatacgcagaatgagttacatgaaacgagaactaagaaaaatttctgaaaatattcagtttccaatcatttggaatatttcttctttacttctaaccaaaggaaatactgttattgttgttgttctagtgcatttctaactagtgaagagtagat

SEQ ID NO: 47305 - DNA, 1324 bp, Homo sapiens
tgagcaaagaagctgagattcagagaattaaagcaaacttttcaaagatgcccaatgagaaggtaagtgagacacaacaggagtctaagcttacataatgtcagagcattaatgatctttgaatcattcatgtgacttaaatattaggtatagtgagaaaagacagaaaaagtctaacccttcgtgaagttcaaaattggaaagggaaaatagagtaagtgaaccaaattatttgtaatacaaaacaatgagttatatatgaaatccatcaagtttataaagggtctgaaattattggggacacttactaggtacatgcctccagtccaggagacatcctgaaaccaaatcttctcttgaagtagaatttttctgaaagggacatagctctgaagatgagagtgaggaagttagaataaaaaatatatattctcgggtttagccctcaaactcttgaatctttgctgaagatgattttgtttcatgacacattaatttgtcctatgttatttgaggtgacgtcttagctctgtaaataagtaaaggagatctaagtaaacgtttcaaaggctaacaggccaaactctcctagactgattatcccccagaaccccaggaaaagcaagagccaggaatctcataatgtgaagacaaactaacattgacgtgttatgggcttgacctcccacttcatgtcttgcatgcatcactgtacttataacaacccaacaagatatgtgtaatactacattcgtattccatcaggatgttgaacttaggcaggttcagcactcaccagaggtcacacagccagtgagtggtgaagctgggattccatccaaactggcagatcaaagaacttggcttttaacctttaaatacactgcctccacttggcatgctacatggtggtgagcaaatgctctggccattgtaatactaacttaaacttgatttatgtttcaaagaagtttcaagtacattattgaatttgatgctaagaacaatccaatgagaaaggcagtttagattttcttattaccacacccgccctctaacatgcacacacacagacacagacacacacaccccaggagagtttaagtgacttgggttaaaccacagagctactaagtggctgaccctgaacttgaacctaagtgttctcatccttagcctactgcctttttcctgtgacagcaataccacttcacagtaaaaaaaaaaaaaaaaaaaaaaaaaaaatgaggtaaaatttcctccatgtcactcagaacatgacattatctccaaaagtctctgttaaaagttaggcaagtggcca

SEQ ID NO: 47306 - DNA, 808 bp, Homo sapiens
ccagtctcagggcaggcagttctttacagtagtgtgaaaacaaacaaaaacagtaggaaaatccaaatgaatatctctgaaacttccaagacaatacatcaaaagcaatatcacatcctaggtaaaaaggcagaaatggatacacccccagaaaactttaagggatgaatggatcacagtgcccataagtcccatttaattcactcatcatgaaatgtccgtagacagaatgactcagccagttgatgtcagcctctaaactccaccttcctggctaaccagatgctggaaaacctttttctggatagagtagatttcatgtgagaaacaactgggtacaagtggtacaagggataaactctcataaatctgttggtgccctgccaaactctcctgttttccaggccagtgatctcatcctgcagctactgtaagttcatctgctaatggattacagctgctcccatttctggagaattgtccttaaccaaatgggaactacatcacctgagagataacacaactcacccctaacagggtcagcctgcagtcaatgactcactgacatggtcaacaaagggctatgccaaatctgtggttcaattcatattccagagctcccatgggatcaggctgaagagcgctccaactgatactgtattcctgtttactccttcttttgttctgtcttgcttccctcactccctttctcttgagaggactttctcaataaattatgtgcactaaaattcttgcctcaggctctgcttctagagaacatgacccaagatagaatcctagtgctgat

SEQ ID NO: 47307 - DNA, 1197 bp, Homo sapiens
ccatctggttctcattcacttactcttaactcatcaaagtggtactttgcaactgatgtttgatgtccaaaatggcttatgggtttttaagtctttatagagatcttccctgcctgcccatttgtcctctccacaacaccagtgataatgaagaagttatattttgtttacctgacatagtttcaaatgaccagaaaggtacgcttgaccaaatgtcaaagctctcagccctatgaggtcacgattttggagtgtgataaagtgcaatgacctgggtggcacgttgctggaggctgcacatgttgctcatgggcagaggccatgtactctgtgctgtaccttggcttgaggtccatgcccacaatggatgtccctaggcaccgggacctgtgatctgaaacttctttcatgtagcactccacacatatgatgccacaacctcttccacccctgtagcacacacacacacaaagcattctcatcacatgtgttgtctatgatcacttcaaaacaagtttttaactcaagaaagccctgttgtatcaggagaaaaacacattcagctgctcctgctgttcaaattctaccaataagaaactttctgccgtcttctcaggccttggtacttccccaggtctctcgaagaatgaccacaaaatgcttaaatatctctcagaagaagaaaacgcagtctaccatttcaaaaacagttgcaggatttgggcaccagaagtagtctttcagatcatgtagtctttaaaatgttaactctccaggtatctgaataggaaattgttcatcacatttctgtattttgttctttcttttaaatgtttagtgatgtgtagtcatgaccttagccagcttctccactcattagtcactcaataaacatttagtgagcacctacattgagtcagacactgctaggccctgaggttttcagaacgcaatcctgtcctgataagagccactcatggatcgcctgcccattgaaagctggcagcccagagacccctgtcctgatgatgctgtgcccttctgaaccagtctcaggtatacacacgtgggtcctgagcagatagagctaaagggctgcctgctcaccagtcacaagaaaaacagtctcctgagcttcaaattattctttgttttggcagaacagaaaggtggaatatattttctcatccatcacag

SEQ ID NO: 47308 - DNA, 4174 bp, Homo sapiens
aaggatttagagaagcaacaaataacaaagtgtgacagtcgatcttggaaaaccagagggctctaatgaagcaaaaagtagatgaagaggcataaaaaaaatccaggttcgttccaaaaaagttttacaattatagcaaagcaatcatttcatcggtttgtgcaacaaaattcaaaatctgcggggcgagataatacttggccaacatcgccaaatttatcaatacgggtgtaaaaactgtaactttttattaaatgggtgtgaaaagagtcggggaggaggaacaggaccactaaatctggtatttccagatctctgcattcaacatctcactcccacgccattaagttaaataacatttagcacaaaacacaggctagaccaccaatttcgggagggcgtctgagtcttcccttctccattccctttagatcggccgtcctggcctttctttcctaacggcatctcctttctaataaagtccctcgtatcttttggtgtaattaactcatggtacaaatccttcaaaaagaaaggaaagaactgcggtttgctctacgcgcggacatcttttcttcctaagccttccctttcgctgaaaaggttgtcgcagaagggcggggaggcttgaaatcccgccgttccctcattctttctcttttctttctctccacataacgcctcccctacacctccccacctccaatccactaccgtatttaagtcggcgggggcgctttaaagggtttcctgtgtctgtttctgtctctctgacccgaaacgcactttcggttatagacagacaaggcgctcaaccaagggacaggcaaatggaataaacagctgaggagaataaacgacctaatggggaaatctcgtgctgcctaattgctattgtgttttgcagataaataagcatattattttgatagcgttcaaaaccctgagctctcttgccctatgcattcttaacagacttctatggcgcttactatataccaggcgctgttttaaatgcttttaaaataccaccttctttgcttaaaaaatatttttaacagatttaaaattccgtgtgtgctttcgaacttccctgctatactcttctttatacatagtacagcagttgtcttcaaagacaaattgaaaaaaaactttaaccagttgctacttaattgccagcaaatcgtttccctctgcaatttttcgcaatcataattaaatacactagtatagtggcaaagaactgttagatttttttttttcagtgatgatctcaggttttgcctcaggcgtttggacgcgcccgctaattgcccgtgtggcaaacatgagttgcacctgcaggcatttgaattcagaaaaacgtgcagccctcacggaaagttgtgacggtcgagcttgagcctggcgggccgcggagcgttcacctgcggccgggaggtactggcccagggcgctcggggcgggaggtggcaggcgaccggcgcgcgtcaggctcgtcacccgctggattgcggggccggagcggggacggggtctgggtcctggcccgccctcgtgcagccgatcggaggccccgaaccccgcgccgacccagccatccgccctgaggccgacaggggagctggggttcaccgacccccgcggccccgccgtcgggcgcggaccccatccagccccacctggccccgccgagtgtgtgctttgcctggggttaagtttcagaagccaagatggaacgattcgggtttctattcacaaggttattgaaggcatggcggtggggaccgcgcaaaagagatgagagtgtggggggaaaggggtttctgttctaataagggcttagcacgctggccgcaggtcctccgcgccgaccgggctccttcccgctctcccccgggccaaaccccgccagggtcccgtctttcccagtcgcgtcctttcctcttctccccgccccgcgccgggcttgtgtggacagagaacggagtgtcaaagggacgccctgggccgatccccaggaagctatgaatccctccgtgacggaggggtctggggatcgatagacggccctttctcagaggctctctccactactgaccaagcggccctgccaacgtgtggtttccggctggaccccaacccagccgccgccagtctcccggcgcccctggctgggtctcgctcagtccctgccctcgcagacgcacagcggggtggccagttcaaaagtcctacataacttggagagaaccagcagctagaaaacctgttttaaacacacagcttgagttttatacaacccacgttgtccaaggcacgaactgttggacacgaattcatactttagaaaccaaatctaatttccaagcgccaatcttcacctcccggactctaactctgcggctgcgagtgcatacaccagggggactggaggagactggaggcaattatctggataatccaagcccgaaaaactcgaacttgaaaatatacgattatgtcctgaaatgcccgcgtcattgatctagtctttcctaccatcagagctgacacagctccagtccacgggcttctccgcggggtctaggatccacagtccctgggggctgaagacccaatggaagtaactgatggatcgcaaattggaaatcgtaacgtggccgacagacctgatcaggaaaactcgcgtccttatatgaaacagccccgaggccgcgaaagtagcctcaggagttgtcagattcaaaagcaattttgatttaaggttttcaaaagccccagagggcaaatgtgaccactcgggtcagccagtcagcagtttggatccagacaggggaccaccgagtggggcggccgaggagccgcggcgcctcccgacgtcacacgcgcctgctcgcacttagccacgcgcttggggttattctttacactcaggactgaaacttcgcccgcgagaccgcggggcgcggaggagggccgaaacccaaggtccaggtccagggcccgcccccgcgcgcccgcgttggcgcccgcgcgctccctccgcaggggttagcaagattgcgctcattctcgccccggctgctccccacccgctcgctgctctggggtaccaggtccgcggccgcgttcccacgcctcggctggagccttgcggcgggcattggcgagcgcggccccgccccctggcccagccaatcgcgagccacgccgaccagcgagggggaggtgccgggcggaaggcctgggccggtgcgcgggggcgggtgaggtggccccacccgctcgaggggggggcgtggccggcgccggctcttgcggccgagcagagttgcggcgtgggaaagagccgctaggagcagaccgcgccgccgccggagccgcgcctgcccaggcccggggagggaggaggcgggcgtcagggtgctgcgccccgctcggcgtccgagcttccggccgggctgtgccccgcgcggtcttcgccgggatgaagcgcccctgcgaggagacgacctccgagagcgacatggacgagaccatcgacgtggggagcgagaacaattactcggggtgagcgcgggctccgcgggagcggcccgcagctcgggagcttggggtagctttgtgaatgcgtggctccctggaaatcccgaggctggtctccgcagcatctaggtagagagggaaagtttggcctgagaaagtttgagtggtgggcgctcgcagagcgtgagttgggatggggcaagggatgtggattttcaccgtaggggtggagtagccaggatgggagacgccactgaaaggcagagcgcaggagttggcgagggagggtcctggctgtcacagttggacgcgcgaacggcagcgtctgggcgacaggcgatgtcccagccactgaaaccgtatttgggggcactttcaaaatagatcaggagaaaataaaaacaatttgatttttgatttttagagataccaaaatcacaacttgatttttggaggaattaaagcaacctgcgatgtcaaggctacgtaggttgaactttgcaggttgaccgtgtgtgacttggctaacgcaagagtgagtgacagatgtaagcatcggaaagggcatcatttctttgactgcttgttctcaagtctggaagagatcggcgtcgtaatcaca

SEQ ID NO: 47309 - DNA, 2113 bp, Homo sapiens
acagaactttatgttatttgattgattataaattacattacctgtaaatagagatggcgtattttaagccttagattaaataaacttttaaaacggtcaatttttaatgattaaaaaaccccaacaagcgaatgaaaagtacataaaacttatgatttaaaaagaaaaaaaaaactataaagaaaaaaaaaaactatgaaaaaaaaacccaaccagcaagtgaaaactacacaaaactcttgacttctaaattgcatgaaggatacgaatgtcaagaaaaacaagacttccctgaccgggaatcgaacccgggccgcggcggtgagagcgccgaatcctaaccactagaccaccagggaacttgcacaacgcttcttcctaaatatatttgttgtgttaaaaatctgcacttaattcctctaaccagtaggggatagagtattgcgtctaagccacacccactttgttcttgttctgagtcctggtccctgaatctatttcctgaaattgaagcaaattctcggaagcgccgggatggccccttaaggaaaaaacctataccctccaaatctaatcctcttcctattgccatgctggaaaatatatcctggaaattctcattctttacgtaacatgtaaatctctttaccaagacaagtgttgtctggacgcgtactgtccagagccttgtaatttgctttattattttattaaccattttagctgctctttccaaatctaagttctgtccctctccgtctttcttcgttctctgtcacgcggatgttaagtccctctaaacattttactaaatctaacgatagattgccaccagctgagagcgtttctcggcgaagagccggagcgacgcgctgtcctgggtgcagagcgcgtgctcaacaaatatgggtgatgaagggtcacgtagcctcatagcacgcggttctattttatttatttggcacacgcaggctaacgaggctgagagagctgtgggtggtatgcctagtgaaggatcaggacatctgcccaaggctccaagcaagtccttcaaacccactgtgtttgttatcctcctactttccaaactgtgttattatctgggcaattgcttcacttctccgcgttatatactagacacggccaggaaatgatgcaattaccaaaggagtcaagacaccttacagcccagccttaattcagaaaccctcataaagtagatgcagagggcagtaagatataactcaactttgaaaatgtcagccgttatagttgaagaaatctgacccaagagacttcgctccgctgcaagatggaaggaagcttaagtaagacataaatttgtaatgaacttgctcacaacatccgccgccactgtgacttgcagtcatcatccattaccacaaaattaggtgagcctgtgcttgaatctcgtttcttttttttcagcagctcagagatggagtttaaatcattgatatactttatctgaaaatatgtaataatatgagaacaggaagatttaaaggggttattaagataataagatagaaaaatcatcagaagaaatttctacactttattgtattttaagtgggacccttttttcctatcccaaggaatcttagatcaagttcagtaggtggagctcttaactcttacttaaggggttgctagacctcagcattagaccatctggttttgaataaaaagattaagcagatattagtttaaatttgtataggtttagtcacaatattttacacaaagtacaaaagggtatggtgaaaaccatcctcctactcactcctttcttcttcccagaagtaaccagtgttaccagcttcttctgtatctcccagaaataatctatgcacatacaacacatatctggttcattttcctccaactttttggtttcgaaacatgtcaaagcaacagaaagttgcaactatagaacattgaacacacatatacccttcatccatacctttgccttccaatttagagctccagcaatttgtggctattaggcactaaaatgtagccagtatgaatagatgttctgtaaatgcaggatccacactgtatgtttaagccttagtatttaaaa

SEQ ID NO: 47310 - DNA, 2228 bp, Homo sapiens
tgtgtggaaggcctgtaacacactgttaacagagtagttgcaggcccttccttgggatatttttctgcgtataagagtgaatgaactccacggccagatcctcctagtcatgttgcagtgctggtcatgggaccgcagagggaacagcacccaactggggatggggagctcacaggcacaggccccgcagctgatgcaaaccttccccctccaaggttctctcgagtctctgccaagagtcggctggagggcccaactgctatgttcttattgctgtaatgactgcaatttggcagcatccaggatggtgtaccgggaacgggagggggaaggagatggtgggcccctctgttaaacgcaacgccagaagggacacaggatgaatttattgtggccatcggtcctgagctggaaggaaagtcaaagggctttaaagctggggaaaagctctaactcctgctctgctgtcaaagccttacttcccacgaagagtaggggccaggcgggccaactgtaagggggaagcggcccggggtgaggtaagaggaccctcctaggtgccgctgccaggcggcggttcgctggggcagcaaggcgcccgcactcgggaggcgccacaaagggccgaggcctgcggaggccgcacgcgcagctctccggggcggagccgccgggatcgcggcagcggaggctgcagcagccgcgggtagccggggtgcccagcctcccagctcggaggtcgcggggggcggggaggatgccgcaactgcagtccgagcggcagagcccggcgcgagctcccaggcccccgcaaccgctgtgaggcgcagcgcgcgccactggccgggaggagctagaggcgggcgtctgcacagcgtcgcgccacccgtgactgcccgccttcagccgggcccgggaccccgtagcggcccatgccctgacggggggcgcagctgcggggctggcgaggcgtcgcgcgtgggaagaggcctaagacaccccgactgcggcggctgcgcacacccgatccggacgcggggccccgcgggcgcgcgcctcggagctcccgcctcctcctcttgctcctcctcggcgtacggtcctcccctgacccctccttccacccgccgagaggatgcgctccccggcgcccagcagcagaggccaccgctcccagaaatgcatgcgaccgatccccttctcccggaccccaggagccggcgcccccgccctgtaggtaggtggtgaggcggggcccagccctcgccgccgcccgccgctgatgctgccgccgagaggccgcgagcagggtccaggaccggccaaacttgcctcccgccgggggctcggtggagcgctcggaggtgtgctaatggcgctgggcgtagccccctgtgaacctgaaaacctctgcttgagctcgggaggccgagcgggggcgaaggagagattgacccttccccgcccaccccttggggggctcgtgggggtgcgcgccagtacgagagtggggaggacaggttggcatggggcttatttggggagaagaccgttggattttcagcagctcaggtggaaatatgtcactgtgtttttccggctggattagcagatgcgttcttcccatctttctagccaaaacatgtagacaggcaaagggttattagtggcatgtagaagtcgctgtggatttttgtgtatttcagagctagctagttggtatataaaatcgatggggcaaacccttaccgtcaacacgttagggccaatttagagaaggtccttctagaagtcagattattctggagatcgatgaggctgggatattgttgtgctgagtatttaggagcctctgcttacgtgaagggatgtgttttaagagtggcaactttgatacaggtgtcgggagttgagattctgctggaaagatgtaccgggtcagccagcagaggcagccttgtgcccagcctaacttccaactcgatgttatgctctgtatttctcagaaactggttatgtattaatgctttttttctcctctaggtgtaaagtttatacatcagagcttttggcaagattccctcttcccagactatcattttttattttatattcagcaataaggcttaaagttttgaaaaatgcatcactgtaagctccaattttatagtcacttaggtatagagatttggagaagtgactcagtataagctcaaataggacagaat

SEQ ID NO: 47311 - DNA, 2187 bp, Homo sapiens
tgagcatgaattattttataatgagaatcataaaaaataaaattgattccctattaaacttgttttacaatggaaagatgttcaaatcctaaggaccttcatgaagacagcaaaatgctcttaacagcaccttttcttagaaataagggatgaattaaaggaattacaaactgacctagttttctagcatgaaatctttaaccatagttaatgtggaattttctgatcaaaagtcaccttgcttctactgggatcacagctaacctggaatctttaatgcctcctggtgccaagaagaccataatcttgaacattttttagtactgtacttgctggaacaactgaggtcctactcagccataccaggtatatatcagaatacaaaccctgtgattcgtaagtaccacttaccaatgtgttatactgtaattttatgatgattctttaagttgaaagtcactagtaaagaaaaaacccaaacaagatctccaaaacatccctgaaagaattgtcttcttgtcttcctatttagtatgaattttggaaaacccctaaacaaatatgtaattattgattattttatgttttaaagtgacactgcttgctctcccttcctgattattttacctttttttcatcaactgaaaattccagaaattcattaccctccaaaaacaccctcttaggcaaccaccccccagtaacttcagtaaccagctttggcaaataccttgagttaatcattcactctacagtcagacgtaagctcatgaaaaaataatcttctttgtaagtgagctcttcacagtgctttctggtggcggagcaagcttggagacaagtagctttggagaatagctgagggtccatttccactgcagactaatccctgccaatgggtgctgcacacagtgtttgggagtaagtatgcagaaacagtaatgattgcaaacctaaatgcctgcaggggctgtggaatgggggtaaaggaagcatgaggccagggttaattatagagctccttctctaccagtaggggctgtggacctctgtagctaggtgggaatgggaacacaggcctggggtgttgctacatcttctcatctttttcaaaaaggaagccgaaatatcgattaaatatattaaatctccccagttgttaagtattgtccactgtttaattttaaagatagtgagcagagcaaagaaaacatatttacttctgaatccacgctatgggctgccagcctgaggcctctggcattgatattaatataaacttttacgtttttattcattttcaagtaatcctttttataaccacaactgctgttttgagctttctcaacagagcgttcctattatttttggtgaaccaaagagtatttttctttccagctttattgagatagagttgacaacttaaaattatgtatttttgagatgttcaacctgatgatttcatgtatgtgtacattgtgaaatatacatcacaatggagctaattaaacatcctcattaccacacagttagttgccattttcttcttttttggtatgtgtggtaagaacactcgttagcaaaaaaggacctgtctacaatgcattgttaattatagtcacattgttgtacattagattcaaagaagagtagttggtttgtaaataaataaagttgttttttttttatagacacactaagaccctttaaaaatggacattatacctgggtattactaaccattgatttaatttggagttttagaatactgaaactggaagaggccctacagtgcaaggaaaattacctttttcacatgagaatttccagccaggccattaggactggatttttaaaggcagtcgttttctagcagcaacctctgtggtgaaaactgctttgccctactgggcttctgtagctgttttcagaatggaacccccagaagttttagacagacatgcatttgaataatttatgatggacaatacaagtgaccaacgaaactgcatgcatatgcgtttcagtactttctagggcacattcttctttcctttctttacatgtcctctttcagtatttcccattctctgtgccataatatactctgaagtatgtttttaatgtaatagctattaaattgtttaatggttcctgcttatcagttttaagtcaagtgagtttcgg

SEQ ID NO: 47312 - DNA, 563 bp, Homo sapiens
cccaagagaagagctggaaagattattgtgtttgtttctgtgggaagtttggaagggcaggtgcagaaggatcgctgctgtaggcctacctctagggggcactggtgagggtgagcctgaaagagagatcctaaagtatatgaacccagaagaggctgaagactggggagagaggaggaagaggggtcagggcgggagcatagctggtatagccaggagaaagatgtggtttagatggaaggcagagggatcagaaggggaatttcagagcttgaggtctgtttccagagggcagagttgagttctgggaaatgacccactaggaaaacccagtgaatgaaaagaacattccaataattaggttaaataaacaaggcaaccctaacctagaaggaaaaactatgaagtcatatcctctcccccaggtaaattgtaaaaataacctaaacaaaagatagagaattgagcggaaggattgctgggaagagggacattgactccttccacctcgtctccagaggacttagaacttaagtaagcaaattgattctacatgaatctta

SEQ ID NO: 47313 - DNA, 2284 bp, Homo sapiens
tctgcactttacataagatgaagtaaacagagtcgtggaagaagtccagtatgcattggtctggaggtgagcagtaaggtcaatttctagtctgctcttgtttccgacttgtgaaaataagctgttaatttacattgtccaggtgagggagaccacctggggagacagctgtttagaaacaaaaggaaagatggtttttgtttgtgtggctcagtttcaaagcttaattttccctttttttgtagtgagtttgtgatcccaagattttattttccttttacaatcacatggaatggcacccatttatttagaattgtttctctactgtctcctcacctgctggagactgtgagcagctttatgtctctgtgcctggcaaagcacctggcacccaccatcatataggaaataataaatgtccgctgtcctggagtcccaggggcccagaggagagtgttgtcttgctggcattctgtcccaggttgtgctcaggctgttgcattgagagtcagttctgctggccgtggactggtctctaagtatctgctagagtcttctttataacccccagtgtgagcaatacaatacactctgatccccgcagctgtgcccaagactgaaaggccacttcggatctggaagaatcacagaaatatcactgaaaattgatccagtgctgatctgtatttctttctaacctcctgacatgtgatctgaagtgtagaggaggactcatcctgcttattagtcattaaaactaattccaaaatgtaaaaagataagtattactctgccaactgttttataaaactacatgtaagatgacatctttcacaacctcatgtaaaccagatgttttcccattcttttaagtccctcccaccaacaaacatgacatagtattgaagtgaaatgccgtttgttctaactgtaatgaagcctacctccaccgaaggctccttttcatccttcctttgagattcaagcttataccagggatcacacgtaccattttaaatggagctttagccttaaagaaggtgctgggggcgggggagaaaaaaaaaagaaaaaaaactctgaaaaggcagggctagaaaagctaggttcactggagggacgattaggaaaaaaagtataagaaggaaaagaaaaaaaatgaacaatggggttttatcatagtgttgggaaaccaccgtttcaaaggtgaaagtgtccttttacagtctcacagcgatgcctggcaggaagtgtgtttgctctaaatcctaatttgggtgtgttcctgtagaaatgttgaaacttctcctgagggaaacagaaactcaatcatgcaggaaactagatactgagaaaacagttgtagctcagcgtggctacaagtaactgtggtgtggaagcagagtagagagaaaacttgttcctcattagagagagagccacacttctcactgctcacaatgagaggccaaagattacccttggacatccagattttctattgtgccagacctgacgaagagccttttgtgaaggtatgttggagtgcgtcccgagggctaataaggtgctggtgaattctcagtgatgtacctccgagtttcttttgaaagtcgttctaattagaaaggattgtgctgacatttctaccagcaggtgttttattcattgcggagagggttatggtgtggttgcctcttctcattggagccagaaatccatatttgattttttttcattccacagcctcattttatacttgtgataaacacagagtttgctgaaaacagagtgttttatttcattcatttaaaatgcttggtttgtgattcttgatagtgttttcactacggaaacactcccccagaaaatggtaaaattagtaagcttaattttcttacttgtaaatctggctcagacgccagcgggtactttgtatctgtcattgtgcattttggaaattgagtagtgcactactgcctgacaacttgcactggatttaacttaaatgtttttctctataatataaaatcattaatactagtacattttggtgaattagttgtctaatataatccttcacttgatcttacacaaaaggccaagaagcctaatatacactcttcaatctgaaagtaatccagtgatttatccataatttaagaagggccaaaaatggattttagagtaaaatgaactttggtaattcataagcatagctagagttaaataataaatgttttgtacaatatgatgtttctaggtttagaaggggagactattt

SEQ ID NO: 47314 - DNA, 670 bp, Homo sapiens
tctgacctagtttagtccatgatactataattgtgagagcatatccagatgctgtgttctctatgtaaaacagtattgtccattcagaaatgtgtgacccttcatttatggatattgactatatgtaatgcagtgctatcccaatattttcaataaaggactttatgcattcagtgattttctttcccaaagattcattcatcaggtatttactgggtaccagagtgtttatttttgtgagaggatggtgaaatatccaagactaaacaaggtccagagctcatgttttcactgctgccctggaaactccctcttcattccctgtagccaccctcctaattgtctcatcagttcacggaaactgctctcattatggttaccagagacaactcttggctgtatctaccagtctcttctaatctttctagctgtgcaatgaatgacaacctcctcctcttaacatctgtcttaacctacttcataatttccgtaagggacactttactctctgataaattttctttggcatcctgacacctagcccctagatgttgggctagatgaagaccccaagcagtcttcattgcttcataattcctcagttcataagtccatatcaaaggacttgggtgggaggaggcaaccaaatgtttcttcagactctactgaa

SEQ ID NO: 47315 - DNA, 862 bp, Homo sapiens
atgaataggtactactattattttccagctaaggaaaatggaagccataaaaaattaaatgatttatttgaagtggaatcactactaagtggtagaaatgggcttcaaatgaagggagtctggatcccccagtctatgccttaaaccaccaggataactacaggaaatagcaagttagtggggagtacagcagaaagcaggaggctgtggtgagacggaattcagggaattggtgggccgctagagtaggctggttagagaaggaagtaaagatgggagggtggctggaagagttaaagagagaaagatcaagaacagaaattgctaccatgtcaggagagtataaaagttgctaggacatgtgctgacagagctgtgaacagtcattgttcaggtttccagataatctcagtgattataaagtttggatttgccacaggggtgagttgtgttaaagaggaatagaggcaaagggcattgaaatccaggagtttgagaagcggtgagtcatggacagtgaagttgtctaagataacggcaggagcttggcagtgtttgttagccaggtgctgaagttctctgtgaatctaggagtgatctagaagcaggtagatgaaggtgattatgttccatgctatagcacgagactccaaagagggcagagggctgggcactgtggctcatgcctgtaatcccagtactttgggaagccgaggtgggtggatcacctgaggtcaggagttcaagacaaccctggcccacctgatgaaactctgtctctaccaaaaatacaaaattagccaggcttgatggcgcacgcttgtaataccggctacttgggaggatgaggcagaagaattgc

SEQ ID NO: 47316 - DNA, 3099 bp, Homo sapiens
gcagtgaaaaaagtttggggaaaagaagcatgggaaagtttgggtatgagtaaagagaaatttttacctcgagggtaactaataagaacaagagttagtggtgtggataagatacattggccttgagatgatgaggaaatataggtgtgagcttgacaagaaaattgacattaacttcaggatgtcagagttatgctgatttacatggtagctgtttcgtactgctttggaggagataagaaatgcctcactgtgctactaaaaggcctgcaagacagacccatctatcatccaccaagtaaattcatcttcctgtgtcctattttctccatttctaaaatagggataataatatccttttctctcagttgacatgaaaatcaatttgtgcatatgaaagtgtcttagaaaattgtaaaatgccagatgaaagtaagttagaaatatgatggtgttagtcacacccaactttgtttatgctgaattctttatcaaaaatacaaagtccaggtgtagccttgttcctgatttaaaaaaaaaagaagagattattttcaatgctttgtttaaggacatggtttttaagaaagattataaaaaacagaaatgtctgcattacatcctgtagacgagtaaacaaagcaatttatcaaggaaatagcagggatggggaagttttgcttttgtcattctttccattagaaataatttacactgtttccacttaacaacagatcaggacttcccttaatgtcctttagcaaagctcaaagagctacagttgggactttgggccaccggccagtatttgttcaaagagagctgtacggtagttcagtaatcagaaactggaaatttctcttttcccacacacaagcactacttcctccccttattttgcccagacatttcacaatccttgcaacggatggaggccaatatacacgcagcatttagtaccaggcaacagccaccttagccttaagtatttcttttattatttttcttaaggagggagaaatgttttcatgcttgttattcttttacctttggaaaaatctaatattcttcagacagtggtgaaagagcaaaaatttattggtatttactaaatataagacaggaatagtctttgtattcatgctcaggaaatttctattttggatgcagaaaacgatatacctattgtcaagatgatattttatcagattaggacaaacccacaaacacactttccatatcctcagtataaaatggaaagaaacatgacactgtatcatgcatatggtcatagcagctcaatagtccacctctgccagaaataccatgaaatctgcatgaaaatgccctatatcttctgacatgtcatgaacaattcaaaaatatatggaagagggttatttataaagcagagaattattagaggaaatgaagttcatctggaatcctgaatcttaaaaaaagttgatcaggatgttttacttatgacaaaagtattgttgaataaataaaatgtagagataaaagggaaggaaaaacatccagccataatatgtccatccacagaccaagagtgaatctattttttcaggcattttcttataaatccttaattatatttaataaacatggaatcatactagccatactcttttgtaacctatttaacatattcaagctcccattagactgcctggctctgggttccagctctgtcactgactaataggatgacattgcacaagttacttaatcaacctgctgataagaatggaattttgagcagaggagtcaaaggctctagagctgcaaagattaagttgtcatcagccaacattggaagtctgtgcataaaagagatttctaggaaaaaaaaaaatcagcagttcaatctatcggacacctgaatggaaatatcaagcatgtagttggattgtgacttgaagaaaagcatgaagagttacaagtgtaggccatgggcctatagatatttagagcagtgagactggataaaatcaagggagcaattgtagatagagaagaagaccaagaactgagccttggaccattccaacactaagagtttagaggggagatacaaagggaagggaaagaacttaagaggaaaaaaggaaaacaagagaatgcagtgacctggaaacatatgaagaaggtgtattaaggagacagggattattaaaatgtgccaaatgctgctaatcagataagaaaaggactgagaattgccattgaatttggcaatgtggaggtcacccaagagcagtgtgtgtggagagaaaagcttgaaagaagagaaggtttacaagagaacgggaggaaagaaattggagagagctagtatggacacttatttcaagatttcctgctaagagcaacaaatacatgggacaggtcctggtgggaaaagtaggctcaaaagaaagtttcatttcatttttctagagtggaagaaattatagcatgtttgtaagtggatagaatgatccagtaaagataataaaatacatgatgtaagacataaggggaatttctgaagtggtgttcttgcgtgagcaagaaggaatgggatctagcatgtaagtggaggaattagttttgatatgagcacagactgtttatctttggtatcagtcaggaaggccaagtatatgagtcatcattttggagggagtcagttgaagttctcttctgagagcttcaattttcccattacgccctttatccttgctcatgtgaattacacgggaagcatcagagtcccagggcaccccttatttccagctctctaaccctcatagagctctgtaattcccataaatggtctcctatcctccctcctgaaactctttctttacgttatcagaaatgtagagtgcatcatgtcagttgtgtaggagagtgtttattttcctgtgccctcgcaatacaaatgctattgcataaaggaatctttgccaatttaattggggaaaggcttatttcactgttatttaacgtagacttcttcaatttctagtaaggatgaatattttcttcacatttttaaatggtactttttcttttaattaattactttca

SEQ ID NO: 47317 - DNA, 1974 bp, Homo sapiens
aaaacaaggctttaggaattttgctcattctttaaaaacctacgaattttaaaaatcaaactttaaaaaactttttgtttttttttttaaaaaaacggcagcgtaatacaatatttggacacgctatactatgggctttgaagaacgcctgtccagaacacccaacaagctccattatgtcaaacgctcccgcgcctctgtgatgtcaccacgacgcgctgggcgctctgcgacttggcagacgtcgtgcgtcattaccaacgaggcgcaggggtcaggacgactctcggcagcgccattgcgcgccctctagtggcagccggttttgaggccggcctccggctttgaagttcctcaccgcgtctccttccctctccccaaagcctggatcaccgcccagcgtcaggcgaggggcgacgtctcgaggtaaaacggaggaggtgcgggacgcggagactgcgcgggcccggtagccctggagaggccgaggctctaggccgcgaggggcgggtgcaatggcggaggaacaggtgaaccgcagcgccggcctggcccccgactgtgaggcctcggcgactgcagaaactacggtttcctcagtggggacctgtgaagccgctggcaagtcaccagagcccaaggactacgacagcacctgcgtgttctgccggatcgcggggcggcaggacccgggcaccgaactcctgcactgcgaggtgggcggcgacgcgcggccgggggtgggtgaggacctggccgcccctcggagctccggcagggaggcctcgccgttgtggagcgggtgcagaggatcccgatcgctactcagctcgcagaggcagggccgctctgtgtggatggggctcggggaagctggggatacgcccactacgggcctttctgcagggtccgggtgctgatgacagactcactcctaggggactgacaggcagtggctccagcggtatctttgctgttcccaggggcaaagagtgaatgacagggccgaatgctttggcctatgtttgcaggtacccaggtagttggtacaaataacattttgtggcctctgcttttattacaaggattcttctccaccttcaagatactgattttaaatcctgcacactctaataccgatactgatgagaaaactagtagaaaataggtaatgataattgtggaaagctgtttgttagattggcagaaaataggctggagggagtgggtctgaggtcaaactattattgaattgcctctgaattccactgtcagttgggatgcgtggacattttcagagcatgaagactttgcccagatatttttaaacggataatctggcacacactttattctgttggttttacttgtccatatagaaacaactttttgagagaattagctccaaagattgtgtcttttgtagtaaacattcctttattttttaaaaaataaatataattccttctaagcaccttgttttggaggtttttgagcaagataagggacagtctgtgtcccgattttacaatctaaagggcggaatgtatacagaggaggtagccagttacaatgcctcgtgctgtggtcaggtgattttacagtattttgtaagcttgtgggaggagcatctaacccagctctgaagaattagggaaggctttccagaggaaatgagacatgaagaaataagtaggagttgatcagatgaggaaatggagagaataatgtcccaggttgagagaccccccgagaggttcagtttgtgtgatagaaaaactaacagaaattgtctaactagtgcatagagtttgagaggatgaaaggcgaggctggagaggtaaacaagggaccagattattaagtgtgttggaagtcatgtgaaggaatttgtctttatctgaagagcaaagtgaaacttcacaatgtttaatggtgggttgggaggaagatgttgcggagttataggaaggg

SEQ ID NO: 47318 - DNA, 2362 bp, Homo sapiens
cagcctatgttcttaatcactaccactgcgcatcaactacgtttctggcacatgccgctggggatatgccagatacatactcttttgcaccttgtacaataccacagagaaatgcaaaataaataatttttaatagggcaaagggctcggtactctcaaaagcagaaatagcccagagggagggcttgagcccgtaattctagcactttgggagactagggtaggagtatcccctgagaccaggagttcaaggttacagtgagctatgattgcgccactgcactcacctgggtgacagagcaagattgtcttaaaaaaaaaaagtcacatatatacatagaatatgcaattaaaatatatttcataaactatctgctatgaaatctgtgccagtgtgagctttctccaagttttaatttatggctggctgtggatttagtcctgagtctaacaaataacacaacctaataattattgcctactttgaggaagatattcttttggtttttgttaagaatagagtgaaccataaaagattatatcagacctcaagagtttattataattgggttataaggcatgtgctctcgaaaagttgttacataaatacgaaaaatatactgttaaatgactggcccaactaaatcagttcccaaagctgtgctggttagacaaacctacaaggaaatggtgaaatttccaaggaaatggtgaaatttcagtccaattttgaagaacaggttttgaagggctgtagagaaagctggaagcacactccaagtggaacgataacttggaaatatactgtcttattatcacaggctgctcctgaaagccacgcgtccccgctcaccagctaccagcgctgggagacccctaaccaccaggcattcacaggtgaggaagcccctcccacagcggccggagtttcggactcggagcgcgagaaacgtcgggatagcgcctgcctcgcagagcttccgcttccggcccttcaggctctgtctctgtggagactgggctttgggagggagaaagagggacctagcgcgggccgcgcaggcgcacggtgggcagctgcaatggcgctgtcgtgtacccttaacaggtatctgctcctcatggcgcaggagcatctggagttccgcctgccggtgagtccgtagcgccctccggaacttccgacggaagaggacgctggagtggagtggagtgggtggaggtgatctgcatagcccgaggaagctgggattcgggggtcttcgctggtctgcgcgggtcacgcgtccccagtcctcgggcggggtgagcttggcggagggtgtgtgtgagagaagtccgagaccaaacccctcggcctgcttaaacttttcattcttttgcccgtgtatcaagtaccggagttaggcaggtgaatatgaccggtcatctcactcccggagctcttcgtctagcggagaatagagacagctaacaaatgctcaggctggtgtttgaagtattggaatctgcggatcaagctcagtggaggggatggtggtggggattagatgatggagaagttgagaagagtgttttatttattcaagaaacgttttcagaatgcatgtagtcgaagatcggtacgctgggcatgtaacgatgatgtaagcaatctctgccctctaggagcttactgtttagagtaagggctgagcagacacataggcgtagaatgacaaaagagcgtcggtaagtgcagtgatagatgcacatggaaatatgagagcacgtggaagggaaatctaatctacctgaggggttggggatgttggcctttaagagggcttccagaggagatgacacttgaaataaaggatgaataggagttagagggccaaggagataaatcagtaaattagaattacaaggtgttcattattactggatcactagttatgtggcagagtggtaagaagagagcaagggaagtagatcgaggccagaaaatgaaaaccttgagtaccctggagcttggaagggggatttattgaaaagccttaagtaaaaaagtgaccacaaaattaaatcagtttgacaacactatggaggatggatttgaaaagaataagacttgagccagagactaggagtctgtgggaatagtcttgttaatagattaagaaggtctgacctagggcaaggagtaagaggatgggatagactgggaaaatatttaggccatacagtcattaaggctggattgattgaatatgtgggaaaggggcaccagtcaggtatgactcctggggtgtatataggtaggagtgtctccatttaaaatagagaacataggcagatgtaagatttaaattttgtttac

SEQ ID NO: 47319 - DNA, 2073 bp, Homo sapiens
ctgtaatcatgctaagattctgtgattttcttcagttgtgtttaactcattggccttaggagtcatgaaggaagattgtggcattgatgcagtattaatgttttgagtttctggaggaaataaatttttaattaagtcttaattgacaaaggacatgttctgttggtgaagaggattggaaagcccccttctgtgagaaacagaaacaggcttaaaggcacagaggtgtgattggttatggtaatttggaaggcttggggagggaggttgaagtggtgggcattgaggccagagaggtggtaagatctagatttgcaaatgttttgacaccattctaaggagtttggattctttttttttttttttttttttttgagacggagtctcgctctgttgccaggctggagtgcagtggcgcggtctcggctcactgcaagctccgcctccctattcaagtgattcacctgcctcagcctcccgagtagctgggagtacaggcttgcaccaccatgcccagctaatttttgtattttcagtagagacgggctttcaccatgttggccaggatagtctcggtctcttgaccttgtgatccgactgcctcatgctgggattacaggcatgagccactgcgcctggccaggagtttggatttttagatataatgggtagccactgactgtttttcattttaagccaggaagtgacaagatcatttgtgttttagaaagatcattctgaagtacgagagaaaagataccacttagagaatactggaccagaactagagaggctcaggagtgtgactgtgtaaagtaaggcaatgcagtgacaatggagtggttagactgtggtctccagaataacaaccttagtacttggtgatttttacttgttttttccgtcgtaaattcttcttagtgtattacacttgtgccagtttattcttccaaaaactctgttctgttttacaccctcatttttcttaagatgaaaatctttagtcgggcattcaaagtccatcactgcatggttctttcctttgtgctttcacttcccacctagtccttagtgctgccaaaactgactcattattccctgaattcctgctttcacctttgctctctgtgctccctttagtctggtttgggtctttcccattctttattgatttttacataggaagtattcatttagagttaatcacatgtttatttcttttagctttatatgttttacatgattatttttcagatccacagttccctttctgtagtttttcctcctctgccaaaattcttatttttttcttgaatccccttcaatgtagaaagcgtagttatgttaaagtatatgataaaagggatcctgtgggtctgtttctattgtttctttttgttctgtttcatatagtgggctatttttaaaatatatgccagatgttgtatttgaaaatttatttgaaaaaataatttgagggctgggatgatgtacatcctcttcaagaagataggaacgcataggagcatgaggaatctaggttgggtttaactcattttcaggtgttaagccctgtttgtgttctgattcccaggtactcacagagtgtagctttttgacatcctagtgtaaattaggtggttcatcaagtatccttttctcctctggggggccctttctctttttttccctttctatcgggcactcagaagggctgttcactcttgcagctgtttttggatttgtaaatgtctcagggaaaaagtggctccaccttggaatttttgtcctctcctggatgttggtttggtaatttttgttatctttctatgccttcaattagatggccagcttttctagttcttttcagcaagaagcttaatctgaattacctcttttgccatacctggaagttgaattcctgtcattgggttagatttttttcagggattgaggcagtttccatgaaactttacttctcaaactgaagtaatcttttactctcttgtactctaatacttttttgcttttacctgtttaagaacatgtactgttttttacactttacatttc

SEQ ID NO: 47320 - DNA, 540 bp, Homo sapiens
tctgagcagcaaaccaccatggcacacgtttacctatgcaacaaacctgcacatcctgcacaggtatccctgaacttaaaagttgaagaaaaaagaaaaaagctaggtgtgacaggaaggatttcttgcaaaagatgaaagagctaaagttgaaagtcctgtagtgttggacttttattcctgaatgactttcacttattgaggggaggaggaaaggaaggagagtgcggatataattggctaagggtgatgaaatgaggtcaggatccttttggattttgctgtgttctggcaagaggttatctggctgcagcttaccagtgcctgtaatcttgggtgttgggatagaggattgggaaaacacccctgatgcacttggagcttttttcccctagataaaatataaaatagtaaaagctaatgagaatttaataatgtacctcatgattttctatcatagttgtttcaaagggcccctccttcaccctcagatggccacacctacctagaaaaaggtctcatgtagcaactaagaaatac

SEQ ID NO: 47321 - DNA, 1858 bp, Homo sapiens
tattcaaggatgatttattttcagtttttctgtttaaaccatcttatttaaaatgtttcgaggttatatgggaggtgagtttgaaactttgtcactgactcaatttggaatatgagattttagcttagccccttttttgggtggtcacaaagattagtccaaatagttctggaaagttggaatattaattttagtcacattatccttaaaaattatccaacacttaaaaaatatttgaaattatttgttattactactaattgaggtcttctaaactatgattcctattatgaggcttatttttgtattaatcaggaagttcagtttcccattcctgaaatgtcactaggctcagagtataatttgtttagttggtacttataaataaaaaagaaacctgattacttccaaactattttggttttagagcataggtctcaagccctcttattttaacgagagagttttattttttggcgttaggatcttattactttcggcgtaagttacagcagatcctttccaggattgctctggttttctatgttaccactgtattcctcatgtgcttacagcaacaatatcacctagcaaattgcctgcatttcagaaagtcctgtagtttggatttacagtataatctgtgaaggaattctaggtggtctgtggactggcctattttaatgtttataatatgacaaaatgtataattttgtttctggcatatattaaatatccataaactccagacggttaccttggtggtgttcatcagaggtgcctccttcccgtctattctggtgagtactttttgctctaatagctgggaggaaatagtggagtaggtggtctttgtgtttagccaaagtggccagcagattttgaaaagtttaaaatctgctacaattttctcagccacttcctgcccagggtgacccagctttgggccagcttgccactgatttccttatgactaactctttaaatacaaggattgagcaataaaacattttcaaactgtttaagctctgggaggtaagtcagtattgccactatttccttgttgagaaaactcactcaaatattgagattccctacatatttaagaaggatggcaattataagtaaaaacaaaacaaaaaacaacaacaacaaccttatttcaagttttgtaggggaaagtagagtatgtgttaacatcacgggaggcattgtagtgggtgtgtttattttattgggttaaaattgtgctttaaaagtttgagacatggaaatagcttttaaggtaatatgttttatactcgtaaattaaagaagcagggatttgactttttttcaacaccaggaaattagacgttgaggttgtgttatatagatgccaatataagcaactctggctcttgaataaaagttcttagtcgtttggtgttagaagaactgctgacatcttatgctggaaatattatcaaatattgcttatccaaagagatatggaataaaacataatgtttctctgttgaaaactgaaggtgacttttttgggaaatgatcttattttccatcccattgtaataaatctcccttgaaaaagcacagtggaactaggctcatgttaatagttctaacaggaaaaaaattctttgtagataaagcaaggcataaataaactcattaatgcattgcagtggtggaaatggaggtgagtgttgccaaggcaattgatgaccttattgttgacctgcttgaccaaaagagaataaattattccaaaataagaaccttggctctttttgctgggctatggttctgttccattttaaagttatttagaaaactaaacacttgcaagaatctttgt

SEQ ID NO: 47322 - DNA, 778 bp, Homo sapiens
ggctgaagtgcttgagttccttgacaaagggtgcctgtaaagagggagtctgtggctttgcctttgctccagggtctgtttctgccttggttctaggtctcagttaatgctgtcttctaagttgggtgaattgcatagctgaggctgcttgaattaaggcattgacaccacaaagcttccatttccccatctatagagcccccctaggtgcccagttacactgtggtaagagattgcccagataagtacagtagaaaccttcctgaccctgactgacagatacttgctccagagccaagaaacagtcacatgttggcctcctgcaccgagggagatgatttttattgatttcgctcttcacacagtgctgacggtgtaggcctgctgaagagcaagctgatgaaaataaagattgtgggttgccagctcatgtttgtccttatctccaaggcaaaatacaaacactgtttcagggagctgcttctccgctccaagacaaatgagctgttgaagtgtcatgattttaaaatctggtgatatacataaaggatattttactgatcaacctcaaggaatctgtcataaataaaaaatagtttgtgattcaagcactgttgcctatttcagaacttcaccttggagcccactctgctgtcttctgagacacagggtgctccctgaaagaaaacagctcagaactcccaacacgtctctttcgcatctttccttgaagattcttaccaagagcaaccaggctttttgagtcaccatatgctga

SEQ ID NO: 47323 - DNA, 3469 bp, Homo sapiens
tataaacacagtaattcctaacatgttagtccttaaatggattactgtaaagaaggtagtaagtttaggtcagagctataacatatagaaacaagaatgattcatatacttttaagacagtattcaaatcaatgagttactatctatttttcttcaacaactgcttacgcatgtggcaatatgagcctaagacaggtgctgatgccttagtcacttggccacacagttttgtggtttacgagtcatgggaattgcttgtcttactctgactgctaaagttctgtcctattgtcttttcatgtaatagcaacatgactctgatgacaaagcccaactaattacacaacttaatttaatagtttaaagcgcaaagggcattccctgagcagtaaaatcttttgtttggaaattttaaaacaaattatattttactttatgttttatatttacgtaataagtatttacaagaacacaattttctcaagatttaaactgctcattgttccataaataggacacacatttagaaagaggatttttttttaaaggaatattttagtgattacttctggctaaaaacatgaaactcttttagtgcttgatgttactggaaacttgctctagattattttttgaatctttgctgtgaggttaagaatagaaatgttttcactcccaattattgctttgaattaagattttgtgtctgggtgaaattttcctctggcttaatgcatgaccaggctggtagaaatgtttcacctaaatcctcttatttttgttaaaacattcataatcccaaaccctaatagttggaagtgcatgtgataattgttagtcccactcctgtcctcattttataaattcccctgacaacagccttgcttaagattatcacctaacttctgtttgatttcttccagtgatagagaagtttctgttcaatttaggcctcttgggtcatgttaccaactgtttttaccctaatacagattcctacatatcaaagggttttgtgggttggaccaaggagcaagaaggctttaccttaaaaggtcaggaatgtaaattgcccaaggtgaactctgatttaaaagaaaagggcaccattgttccagtgggattgtgattatgatagttaatagaaaacattgtcagccatgttggctctggggatgaagaagaagagggtgttttccaagactgggattgatgttagtatcctgtgagtgtaaagtgttctaatatctggcctgttttcaggagagctgaggcaactgaggcagcttactgagccaaagttcttactagccttatttcctttcctttattaattctattattttaatggctttttgttaacacttagaggtaaggaatacagtttgccaaatacatagcaagtcatcctgtcaaaaacagatatttcaagataaaactccttggtctgaaaagacagattcaaaagaaattgtagacagtttctactatcaatgattttacagactgatggagataagacaggagataacaacctcgtagataaagcatataaaacatgaaagcttttataactttatagaatgtaaatattacgtattaacataaactctagagtgcacaggtgcatcaaagcagaatgggattgagaacctttctacaaaaaggatgtaaagaatatgacttttcagggttgagggaaagattttggggaaggaagaggtgctctttaggaggtaccgatgggggatcctgtgataatcagcatatcctcgcaaagcagaagggttgaagggagtttgtctgtgaatagagccttgctgacttgggtagcatttcttctttttttcccacttcttggtggtcgtttcttcaagaggatttggacttaccactcaggaagacctggtatagactgctttactgtgcatctgggctaatggggtttgattgttgaaggccttagtggtctctttttgaggacccctttttgtcatcttcccttatggggtctgtgcttgagatcagtatggtagcctgacccctgactcccccaaccccaccatgcagtgtgacccttttccaggtgtttaagcctcttctctgggacaccttgtacaatactatactacatttcctcctgacttgagcttgcagccttcattcctgtgcaggtaggcagacagctttaaagatttgctcttagagggattatttttggaacttaggactctggggatttcctgagctgagaatgactttgcccaggaaataatgaattgaatcattgtctgtcttttgaccctcagatcaccttttttattttgcaatctctgcccagtcactaggtatcagcctggctgcacccactgataatacctttgtatgttttgtaattgaaaggccaatttcaggcccatttcaactggggctgttggaacttcacctgccccctacagggaggtgaggtttgtgaaactgggaaactggaataacaagtgaattaacacacccatccctccaacaccacccacccactgcaggcttcgtagactgattgatgacatttcctaatatagcaggggtaagatgacttattttgaaaatagaattaaaactttccctttttaggagcaagcatcactttggcaacaccatcaaccccaagcacattagttcttgtggtcaaaacattaacagggtgctttgttaacaaaatgttcaggtcatgataaggccaacaaaggaactgtaagactttttatgagccgagtctttccaaatagcactccaagttaaaagtactgagagcaaaagtttcttctgtaataaggcccagatgatctggggtgagagttttcaggagtgggcagaggtgttggggtgttgcattgaccaaaataagccacctcatggaaagcgggaaacaattggtaggtccccaaagtgtgcagctatctgaacagttggagtaaaggatttcagatagcctcactaattagcctacttgggcagtttagaagagtggagggccttttaaagaggtcccagggagtgctaaatgctgggggagtttattgctgtgcgtgtaagcaatggtactggacagggaattgaaatgagatcctgtgatctgcagagcacctgctctgggaactcatctttatggaaccttccctgactctaaactctgattattttcctactctatcagctcaccgtttttaataagaattatagattaactgttagcacttatagagtgcttcatctttttaaggcactggggacgatacgtggggaaggagggtgggagggaggggaagctgatgcgagcaacctgagagagagttacctcagcccttagtgcgagtcgcagctctagctgtatgttgttagactaatcatgaagcctttatgggattctgtcttgccatctggaaaatgagataattggatgagatgtcat

SEQ ID NO: 47324 - DNA, 617 bp, Homo sapiens
tgcactcatgacataatcatcttccaaagcccttatctcttaatatcagcacattatgattagatttcaacatatgaattttggggggacaaaaacatctggaccattgaagatattaaggagactaacacggtggagagtgagttgctccattgtagaaggtaagtaagttaattatgtatttgtaagtgcatgtgcatttgtaggggggcaggtaaggcctcaggtcattatagggactttgttttttgattttaaaggagagaggaaacaactagtgagtcctgaaatgacataatctgaattaaatttagctcttctgttgagaaagaatagaaacagattgagacactctcaggaggatgttgcaataagccatgtgaatgatcgtgtccaggccaagtgtagtagcagtggaagtggtgagatgtgatcagatactgcaaggagaactgacaggatttgctgaaagattgaatatggggtgagataaagagaggcgctaaggccgattccaagattttggcttaagtaattggaaggttggaagtgctagcacataagataggtaagagactgggagaaacatgtttggggagcaagggcagatcaagccc

SEQ ID NO: 47325 - DNA, 1215 bp, Homo sapiens
tcatataattacctgggcctggagtccgagtatgtgtgattattctggagaaagaaaaatcaaacgaattaaagtataattccatgaaaagtataatctttgacagctataaaagtaggcattttccaaaaatgtgtttcattttattgcaacaacttttatttttctctgtttctttttataaagttcccataaattgtctgaagcttggatgaatttaaatatttcaatcaaggtttggcagctgataaattgaatcaagcttcattaccagttccaaattacccatccagattaagttcatgggttgtgccaccaacccctaaagttcatcactaaagtgacttgccaggggaattgcttgtggcacaactccaatttggaacagagactggaagttgatttaagctcgggagcagaagcagagtgggaaccaaagtccaagctgaagctggaataaggctgccatagtactgaaacatatccttttagattaactgacttgctttcaaattgtgtattgaattgaaagtaatgggaaccaaagtccaagctgaagctggaataaggctgtcatagtactgaaacatatcctctcagattaactggcttgctttcaaattgtgtattgaattgaaagtaatgagaactcagatctggtgttgacttaaccctgaaattcacctatgaccttagtaatgagcaatggctctgctgttgtgtgtaatgttgttcatggcagagggtttccctgtgctttaggttgagctgtcccagttgtggaaaggctgatgagaggttgctaaattctactctagcatgtgaatcttgtctctggtatccccttgaagccatggatagggggcacccactgtcttaactctagcttatcacataatgcatagtagacaaaataaaaatattttatttgcttatttatttaatacatatttttaaagatcctattgggcatcaagtattcacagtaaatggcagtgacctccacagacatgatacctgcatcatgaaagttgcagtttaaagtttgtcaaatttatttttaaaactttgtttattttttcctgaaataataacaatgacataggaacctttaagagtcactgttagtaatgacaaagattctctgttgatcgaactttagccaggatctgaaccttctcctaggcgtgtgtttgtactttcttgttaaatcca

SEQ ID NO: 47326 - DNA, 2346 bp, Homo sapiens
gaatctatgtcttatttaaaatattataaaagtgctcaaataaagatgctaccttttaatccttattaagataattctggtagttaggtggtgggaaactggtctgaattaaaaaaaaataagtctggtccaagtcaaatttcattgttctctatttggaagaagagagaagtaattttgccaactttaaaatacagtacactcaaaaattgtcagctctagatttggagcacatctcagaattactttggctcaactcagctatgtgacttttggtttgcttttactttcaattctcatggtagttttgaaagaaagaatgaatttcacaaaaggaatcttgtttgcacattgtaagctacctttttataacaaaaagtagttgcaaaatttatgttttcccagaaaagaagagacctaagttaaaattgaaaaaaaaattttaaaagttataaaaatatattttctatttaatgtaattgttttcatgaagtctctatttccttttttcaatataagtggtttatatggaattataaagatggttcaaatatgctatttaattgccattattttaagcattcaaattctcagtgtcgtccctgatatttacaatggctatgcagctgctgctgttattattgctgaagctgacattatttttcatttgtgtgagggaaggagattggagaatctcctttccagtttgaacacaaatgaatgaacgtgtcctttggttccttctctgtaatttttgtagtgggtcacaggacttttttacctgattagatctccctcatcttccccaccctcccccaaggcaggtggtttcctatgtttcaacaaaactgaaggaaaatctaatcttgttgtcagctggtagatcattaaaaatagtttttgatgatagatcaccatgtgatttttggcatgaaacgctgacagagttcaaagaattttgtgacatttctataaaaataacctttcccttcccatgtccttattttaggaacaacttttcctactgctacacttataaaagtgaaaataagatagaattatgatgtgccttattttatcccagcaaaaatgatgtttatgtatgtaataatataccaattgaaaaaacctatctcatctatcacactgagagagtaatttcaaaaaaagatttatgtttaatgctttttgttaaaatttgtgatataaatatgatttttgccaaatttcatactactattaatattaataactcaatgtataacatttattttaatattagagactttaaggacaagggaaatagattttattactttctatttatgtactttttgtcaaagaagggttatagtagcagaagacttccaaacatacaaatagatgaggtaaaattatgcagtgaaagtgggatcaaaataagttctatgaaaaatactaacaatgtgaaacttaaatacgagcctgtctacctttatgtaactagatgatagctggcatttgtcaaagtatatataggttctagtagagaacatcatatactaggttctattgtatatgtttaaaagagtgactcaacaactttattttaaaaaccaacatattctattttccagaaatcatattctttgcaaatatttaaatttatcatgactactttagatcttaaaaatatgtgaagggttatctagctttcaacattatttggggtttatgaacaaaagaatgcttgaatactactattctgtactaaatcccaatcaagttgcctgcagttttgctatttgcttcactcttgtccatcctttttattccatcaccatagatcatgactcaggcctgaatcattgtggattagtcacccttctttggacactgaaattggcaatttctcatcttgtctcttcagttcatacctatccctcagctataaggtgctgtcctctgttaaaagtctagccctcctttaagcccaagctaaaagtttgcctcttctttgatactgctcatagttatcccagctggaagaaaaattttttctcctctgcaccttttaaataactagtttgtatcagttgtataactcttatcttacactgccctttagatagagtctaaatatttttctcttccacatgagtataaactcttatgtgaaaagaccatgtccttttgtgagcttattatgcttcacggtgcaaagtatagaacctcatgcctagtaggctcatttgttgaatcgatgcctgaatgaattagatatattaaaaggaaaacattttctattatttcgaagatgctttgatgtggctttcttgtaacttctaccttagaagtcatgggtgg

SEQ ID NO: 47327 - DNA, 1399 bp, Homo sapiens
tttatggcaagacatacatgtattaattttatattgcaaaaaaaagcgcaaaatcagagagttgcttaattcttctaaactcttaaaacttgaatacatttaagagttgttttacatgttttgcattttcaacctcaggcagacttattcaacataacaaaaatgttctcaatgttacactgaagcattctgtaccatatattaattataataaaaaatgttcatgaaatccctcataggaataatactcactcgaggataatcaagttacatcagatcttttttctcctttcccattcttgcagggaacccacattttaaaaaacatacgcacatacacatacacacacacacacacacataatgtttacctatagatctatttgtgagctctgatgatcttccactatcttatgttgatagaccctattacagtgtttagtacctaccacttcaaaatttaaatagttacataaagaaacttggaaataatatgggaaagaaaccataaaatcttaagttgaataacaccttaacacttatctgtatttatgcaggaattcttctactccataggagaaacacatttccttttagacaaaatgaccacttatataattttctctctggaatgttcctcccagtcatgaaagctcttgcttggccttgggtccccagctattagttgattagtaaagtgctttggcttgtctactaatattaataattaacttgattgattaatatacattaaaggggtagaggaaagtcagctggtgggaacctctgaaggactggttatttatttgaacactatggtgcattaagagttcattttgacttctgtgaattctaccaggcagataattgctcaccttctacagaactgagaaaaaaacctccagtcatgcacaagttgcaaaatatcgtgactaatccttataacgttgtattacacagttgcatagtggctcctgatgtcaattgaccatttcccattccacagacaggactcacttgactttctgtttatttaagtgacacttgtttgaaattctgggtgcttcttatccctttgagtcacacactgtgtctcagagcctctggtacttttagcacctaattaattactaactctagcaaagtcctgctgttttgcaactctctgtctttgttgggaaatcacaaccccttgctagaatgagaaggcaagaaaatagttatcaaccaaatatccagtttgggtccatattacaaaagcgaattaccttagggtcttttaattcctctagatattcaaactagaaaggataacttattgtgtctctaaacttcctttaagtttagcatcaaaggaaattcaaaaaaatatgttttttaattgcatttgcattcagct

SEQ ID NO: 47328 - DNA, 1099 bp, Homo sapiens
catcatcccaactgttgccaggtatccacccaatcaaaatttttccccattgtttgccattactttaaacaaaattatccagtacttaccaagtatggtaactttttatataccatttacattaatctaaaaataatccttaaagtaaaaataaatggggccagaataattagatacccaagattaaataatgaatagaagtagcaaaggcagaatttggccaagagactttctgactggcaaaaatatgctcataatggctgttatataactgagccaaagacagcctctgtatctcggtctctaggttgtttatttcatcactgcaggctgaaacccactaaatcaaaagtcccccagcaccaaactcaaatgtctatacatccaattatttttgaatagcccaaacacccagatttttagccacttacagccttcttactttgtacaccattataaacctcatcctacatctgctggccattaataagatagaggcttgtggttataagaccccaaaatgttgtggcaattttaaataaagtggacagagaagactttagggaggtgccacttgagtgagtttgagattttgctctggggtaagtggggagccattagagaatttgagcagaggaattctttgatcagactaatatttaacagaatcactctagcctccaggttgaaaatcaactttaggggacaaagagcaaaggaagcagctgaggaaaggtggtattgcagaatagagtggttgcagtagaactggtaatagaaggtcagattctcgaactattttgaaaataaagctaccagatttgctcataggttatgagtaggatgtgaacaaaagagaagtatgagggatgacttcagtgttttttggtctgaacaactaaaaggatggagtggccattaactgtgatagaaaggcttttggtgaggtcttagagtttattatttctggttaagcttaatcttcctcctcagtgaacagaaattgttagtgtacatcaaaagttcaaaaaaaaaatcttgatccctggagaaaagagtattctgaacccagcaatcaaattgtactatgaaatatagt

SEQ ID NO: 47329 - DNA, 2755 bp, Homo sapiens
ttgggttacatattgatatatatgaatgagaaccctgaaataaactgatttcagaggaataacagaaaacatatacatttctatacctataaggacactgaaaacttccaatcctgaatcaaacagttaatgaaatcccaaaatgcaacactaatgcaaatgagaagacgctgtcatagaatgttgaaatacatactcttctaaagataaaaggtctgctcttccaccctcttcattttcctacaaattaggaaaatttaatcagttctgaaaaaggaaatgtacatgctaaaatggtgaattactgctagagttctgatgtttaaaaccacaggcttgcgatcaaaataacctctttaattttagattatcatgcagattaatttcttcagtttctcaggcactattctgttttttttaaaaaaagggtggggtttcaaaagaaaactaatactcattttttccccgattaaattgctcaaccattaaaaaggagaacaaattggaaagtcctacagtactctctcccctccgtcccccccctccccattttttttcttgaaagggaacaagcagtacttttgctaagggatctttaagccgaaactcagctaggcgccccagagcttcctcaggatagcaaagctggatttttgagcagcaccacctgctggtcctacacacgttttacttcctccaccccaaatctctttctgttggaactgcactctttcagagcctctgggccctaatacaaagcaagcacactctaaagaagccagaagaatgcaagcagcgaagtcgccgctccccacaggcaagagagtaccggcagacagcggcgcgagacaggggcagaacgatgaggcgccggagttagctcgccggtgcgggtgcgggtgcgcggcgcgtcgcggcccctcctccgcgacgcgccgggtggtcacgtgacggccgcgcgcgttcccggcagctgcgggctccgaggccagagagaaaagactgcgaggtggccgcagctgtggccggagaggtgggagtcggagcgaggccctctcgggggagcagggtgaacgccggccactctaggatcctcactcggggagaggaggcatagctcgcggtgtcacctccagccgcaacgtactccgggtcggccttgcgctcggggcctgagaggggcggcggcggggtcaggggccggtacgtagatggacgcccttgggctggcgcggccccggctgtccgcgcagaggcgggatgggacagttcagccctttccgccacccccgccttggctgctggggcaggcaagacgaccgtgacagcccctgcgctgcccgagggcgccgcagcccctgccctgggtgacggccggagctggtctcggtccgggtgcgaggggcggagcagcggccattactgcgcagcctcttccgcctgagcccgcttcgctgcctcgggtggcaggcgggtccctctcctcccctctgggccgtggttttaggcctttacccggggaccttctggcctcgaggtgtaggggcggcgatggtttttcggcggtagcctgctccatgttttcccgtgtggggtcagacagtttgggccttgggtcagatcgaagccagggcgtacagtctgcatttttgccttttcccggagtgtctctggctgctgctttctcttctctcgctcttcctccttttttttctcctgctcagtgtctcggtcttgcctaaaacgaagagagcaatccctgcaccttgtcctagtgaagcccagcgctgcatattcttagttgtttttgacggctgttgaagcatcggaacaattaagagatctcagaatatcccttgagcctccaaaccctctgcatcttaaaagctgaggctgttgctttgttctgattgttgggtggggagttctcttcctaccctccatcccgtctgaaggagtgtgggtcttccattgttgtcgctatttattttgctaaggcttctaaagaatgtaaaattgttttaagagtggagacggaaccgtcctctccacaggtaaaacctacaggactgtaagtttacacacacatcctggcaactagaatcttttctcgttaatcatattggtatatgttttaatttattttctctaagtgccattttagtgagcacttatttctcaagttttgaacattttgtttaatatttttgtaatatcgaaacagtgtagaactgaggagagaagaaagcccaaagatgatagggtacgctttgttctttgtatgattggcatttcaggtagtgggcacatcccccccacctcgtgtgtgtacttttcaaatgggatgtgaacgtataatattggcattcaatccagtatataattatagaatttggaagacttaggacattttagtcagtgaatctatatttagacttttcaaagacatggcacgtaaggacacgtggagaaaatgtcccacacagataacaggatttgtgattttggctttgctgttttatgattagcaaatattgtttgtatagagtgtctgggtgccctaaaaacacatgaaaataggtcaactaaatctcgttttaaagagaaaaccggaagagtgaacaccactctaaaaatagattttggatgtgtttgttttggtgccttgtatatcttaaagtggaggatgttgttcagcccaatctttcatttagaatttatgtctcaaatgagccagtgtatcatgtgggcagac

SEQ ID NO: 47330 - DNA, 2314 bp, Homo sapiens
cttcctcagagtaacttcaaatcatctcctctaacataggactacataaagtccccttattgtctgctctcagaacatctgtatctctcatcaccactctcactcactctttgctgtaattagttttttaaccagttcttcccattagtcttagctgcaagagggcatttgcagtgcctaaagataatattcttaagactaaacaggggcttaagaatctggccacaaatcaactctccaactaccctgtttataatcctcacaactcaccctgtttcaatgccatgcttcttcacaggctggcttcccttcctggaatgttaatcattgcaggaatcccagctgattatacagtcgcctttcaggccagaacccaataaaaaatcaagaaaggatcgcccgttctattactgcgctgctccctcccctcgtagatttcacaaatatacttctcaccacaagcttgtctgttccaagagaatgctagctcttctaaagaaggagccctttgttttccttgcccttgtccagttcctctgcatacctctagcacctagagcaacaactgctatacaggagcccagatgtggaacagagcaaagaactgagtgttgatttaatgttgcctgaagtccttaacagcaccttcaacctaaacttaactgtgtttttaatcccctacacgtgtaatccctgtatgtgtgcgcagcgttaaaaggattattgtagctcaaaaattctccaatgaaagaacctctaccagaaaggagttgctcatctttcgttcttgaaaagttggctgcacgatacaagtaagaaaagttttagttaggcaagacaacttatacataaaagacaattatagggaacattacctaacttagcacagggcctcgaatgtattccgaaattaaatcagcatgtagaaagcaagcctcctcatgctttttaaagtgtaatctcgcgacctcgcggcgcgctctgggaagaccgattcatctcttcccctcgccctctttccccggccggcgcacagccggcccgtggcgctcggcaccgcgtctccacgtccagcgcggggcaggcctgcgcggcgcttgcaagggacaagccgcggagccggggaggctcgccgtctgggacacgtttggagaagcgagcggtacagtccattccacggcgacattttaggattctcccactgacaacactaaactgaagcgctaagaccaacccttacgaccacttaccgtcgcaggccacggtggtgacttccttttccgctcccctacacacgcttttccgttttgcgtgcctttgtttccgctccccccgggaccatcgtgcgcccctgtcctccgttcttgtaggtcctctcctcttctccgcgtcttctcttttactatcccacgctctcctttcctttctccgggaactttatcccgttcccctgccggttcccgtgaccccggaaatcccgctcctgccgcgaggcgccctccgcttcgcgctccctcgtgtcacgagggagccagggtgggcggtctcctattgtacttggcttttgaattttcgcttttgcagcacaaaggtagggctgggaaaggaggctgccgaaccgtgcttgttttcgctcagataaacgtgagaaaaagtggaggtgaggaagccagtgtaggcaaatagcgagaggggagaagacagaaaggtaccgaaggtcgaccttttttaggtatcttatccaagttattgaggggaatgggtatttagccagttttttgtttgtttgtttttatccgaatatccagtgtgtgtcttgaatgtgtgaatgtgacgtgtttataaagctcagtaagcttaaaattccgtgccaatacattttgtatgccgcagacaggaagtgctttggaagacccttgaaaggggaggtgattttacaccaatattgagatcattttgtcagagtcgtgggactaaaggtagaccttaggtagtcgatgtcaaagataagcgcagctggacgttaaagcggtgaaaacattcagttaactactgacaggaaagagctgagctctatttcgattcgtgcagagatcatctgggcatttttaaagggacgttttaaaaggagaaaggggatatgcgggcgctcagtagagaaagtgaacctacagagttgttagtgtaaatgtgattaggccagctgtgtgtttgtgtgtgcgcgcgttttaacagttaccgcaggattctatcctcctacggaggattttatccttctcgattacatttcaaaggaatgactctctggtccttg

SEQ ID NO: 47331 - DNA, 1459 bp, Homo sapiens
accgtgggtaacttttaactgaccacttagccaaaggctttcatttcctagcttacctaatattatggttggggaggagaagagaggagacattcacccgttgcaccaactaatctcccacgcaggacttgggtataggtctctccaggttcccccagcttgagtgggctcagctgccatattgtgagagggacagcacagggacctgtaatccactgacctgcttggttggagcagtgggtcccacacaaggcagcagcaccatggccacttgatcctccactttgctctgctgcctgccggggaaagatgatggctcttaaaagagtctttggttagtgttatagctctgtagtgttagaagctatttattgttacagcctcggtgttacagctcttgcagcctcgagatcagacatttttgctgtctctctccttgtggtattgcagattgccatgtttccctctcaccaactactgtctcttgttatttcagtctctctgactgccatctttcattgtctgtctccagtcgctgcctctctgtctgtactgtctcaccatccaggtctcactgtctccaccaatcgatcactgccatttccaccaatcactgccgtctccactgtcttcctcccttcgctggtcaccagatgatgcaagacaggcaagccccaaaattcagtcttagcccgggagggttcttggcttagcccaggaaataattcaagggtgagtcagtggtattaaacagcaacttttattaaagtggcagcatacagcagcagcagaagtactgctccttgcagagcagggctactccatactcccagaataacagctcagaggcagttttgcagtcatatttatacccactgttaattatattaaaattaaggggtggtttatgcagaaatttataccatgagagaggtaacttctgggttgtcaggtcattgctatggaaaggaatgttaacttgttgccatggcaatggtaaactgacatggcacattagtgggcatgtcttatggggaggtgcttctgccccagacctgttttagctagtactcaatttggtccaatgtctgagccctgtgttgagtcctgcctcctagctcatttttaaggttcatttaagccatagcatgtatcagtacttcattccttctaattggcaaataatatcccatttgtggctaaatcatattttatttatccatttatcaactgataggtatttgcactgttccactttttagctgttacaaataaagtgctcctatcagcatttgtggataagtttttgtgtggacataagctttcatatcttttgggtacaaacctaagagtggaattgctgagtcatatggtaactctatatttaaccttttgagggactaccaaacagttttgcaaagtggctgtaccattttacatttccaccaacagtgtttca

SEQ ID NO: 47332 - DNA, 520 bp, Homo sapiens
ttctcataaacattttgaatagaaaatacaaaaatattattaccatataaaagtgatctcattacttttttggcattctacaatatagtaactttttccactacagtcaaaagatgcctatttgccagtaagtcttctagaattctcaaaattttctttctctttctcttggctgtaacagttcacaagtacaatgaaagactaagtcagatggctggcgttggtgactcacttcctcccccttttggtagtttagctagacacccgtctgagtcagcttaaccaaagaacaaacaagcagatacagtgcctgagttctggggctccccctttgtcacaaggctgttttcagtgtcccatggcattgttaaagaaagctctccttgttacattgtcacaatgaagtagcctacccctcttactctatcaatatgtagagtggtagtaccaggtgaggcattcctagaactccttccaggaagcatccagatcccccttcttcagcatgtctctctgcaag

SEQ ID NO: 47333 - DNA, 1110 bp, Homo sapiens
ttgctgtccttatttccttttgctaaacatatcacttttcacataattaaagatttttcatttataagaggttacatattccaatagaaatgccacacacagtaggtactgctaatctcacaattcctagaagactcatttggcctgaagatgttttgcttctgcttaactttgatggattaggaattccccagcttataacctatcagagtaatgtaccatttacctcctaaattctctatccctttctccaggctattataatcacttgaattatttcaatgaattaataaatctcattcctctctattgttcacttgcaattgaatctttccaaagaccaccatgatttgattttgttagagtaaaagggaaatttttttcattgctgtgtattgctgatttagcacattcctcatgctccaacaaggtcaaagagacactaccacatgcaattccgaatgaatcaactttaccgtttcatttaattatcttcttccttgttttctttacagttatttactcaaattagaaaacatccaagctgtatgcacactgattttacttataaaatgcaaactttaaaagcaaacatttggtttgagtaaacaaatgtctaaaactaaccatcgtgaacaaaagacatagtggtaagtttccctcctaaacgtagattattcaattatgaatggcatagacttcagctcaaattacagaaacactaactctacagtgagtccaccaccaccttagataaaactaaaatttatttttcaccgcaattttcaaataccaagtctccaggattgtgacctttaatttgcaaatgttaaaagtctttatatgaataaaaaaaatcacatttgaataaatatacttagtgaaaatcaatgatgggcaaagtgcttttcaaacaactgagaagcagtgttggaaaaacagtctcaaagagcggatggtactgtcagtccacagttgggaaatccaccctgagcagctgaacagcctttttcctaggagtcagtacaatctgttatgcaccccgcccactgtttttaagcccagacacagacaacagcagagacagatgttgaaattacactccactta

SEQ ID NO: 47334 - DNA, 1796 bp, Homo sapiens
ttttaaggtccctgacctcactgagaaactgattaaagttgtggatgtttttgcagaaagttgcccacatgcatagtgagtggaggtccataaagccaagactaaacagttaagaattcctgcatcagagactatggttgaaaagaataaataaacttttaacacaggaagtgtaagaataggacaaatgtagatacagcgtctactccataaacaaggtaggaaagaagattcatggcaacacgtgaaatgattcacaacaaaatatttagagtgagttggataaagtgacagcaaagacagagtggaaaagctgtagtgacagagtatatttggacttactaagggaacagagagaaaggtacaaaaaatgatatcatggtcttggctgtgagactctctgggattctaaaaatgctgaggtccatacatgttctggtgcaagtaccaggagaaaacagagcaggaacagagcaggtacagagaggaaaaaggaaaataatatatagttaatatgttatgctttaaaaaatgtctgagatcaactttttcaaattttgaatatttaaaatcactttagttaaattatctatctaatgtgaaaaaaaccttgtaatcacaaaagtatactacagtaccatagattccaactgacatagtttaaaggttaatatctagccaagtgcttttggagagttataatgtcagaggcgtgtgacccagaacaactacatcttgaataggagctgggtaaaatgaggctgaaacccactgggctgcattcccagatggttaaggattctgagtcacaggatgagataagaggttggcacaagatacaggtcataaagaccttgctgatgaaacgcattccagtaaaaaagccagctaaaactcaccaaaaccgggaatgacctctggtcgtcttcactgctacaatcccaccagtgccatgacagtttacaaatgccatgacaacatcaggaagttactctatatggtctaaaaaggggaggcatgaataatccaccccttgtttagcatatcaagaaataaccataaaatgggtaaccagcagccctcagggctgctctgcttatggagtagccattcttttattcctttactttcctaataaacttgctttcactttactctatgggctcgccctgaattttttcttgcacgagatccgagaaccctctcttggggtctggattgggatccccttccttaacaatagtgtcatttttatcccaaatgtttcctcttccattttaaaatcttcttcattacaaccattggcacctctttttaccttgaaagcaaagctagtctttactgtggctgtgcttctaaggtttttaacaaacccatgttgagtacatctttcaactttcatttttattcttttgtctcctttcttttgcttctccaatcactggtatggagaattacttcattccagggctctctaaagatataatgagcctttctctcctttctgacttccctctgcaacattcctttctttactttctcctgacactataggaacagcctttctattgaccttattaattataaaaggacaagattagcatcatgagtatagttctcaaatatagcagcgtataaaatacgaatgacatttttctgtgtgcttacaatgtaaagcaattataatagggatgttatggttggctttataagtaaatattctgatttatactacctgtatctacagctacataattgatatgcaaatttgactttgttttgcataagtttatctg

SEQ ID NO: 47335 - DNA, 2646 bp, Homo sapiens
tggataaactataattttaattcaattttatgtttttaagtattctagtctcaaacgacaaaaccaagacaaataaaaagagttagttcaataatcataaaaggaggaaaaaaaatcctaaaccagatagatttagatatatttttactttggactaggatacacatcacagtagaatgtagctggcaattatttaatttgagaaatacaggaaacctactgtgaaaatgcagaaaaacaacagacaaaattgattgttgactcaatatgatatatagttcaaatgtaaacaaatgcttgttagcattccacatcactgaaggaaaaaaagtaagttattatttccaatgttgggagttaggttgctataagcttatgaacacacactttcagtgaatttatgtagaatcggaagcacttcattctcccctcaccacacatcacccccttgctcctcctcgacacgtgcaaaatgatagggcatggtaggggttgtagtgaaatggagaaggcatgccccatctcaagaaacaggtggaccagccacagcttcagctcattgtgtgatacaggaatgtgggcttttacaagagaagctgggaatctggattcttatgtaaaatctcccacattttactggctgatcctaattaaaattcaaactaacactttggaagtcaaagaatacacagctagtgccaaactgtttcaaggacaagcgtaatatgatctctggtgctcagttccatttctcacaccaatataagaagaagggtctctgtatgtaaacaataattatccgtatgtatgactgtctaccatatactacacattgagggggagactcaaagtttgattagatactgcatctaccatcaggaagctgaaacttagcaggggaggagacagagaagcaaacaattacagtgcaaattgataaatgctatgctttaggttctgtgaagcaggggttttgatttagtgtggcatcaccaccataaaaatagtgcttgccacatggcaggtggtgaaaaaaatacttgctgaactaatgatatatgaataccaaatcgaggttctgaggtcaaagagaaggacaggggtatagactgacagtaaaaatagggaagccttttccaaacaggagtcttcataaattcgcaaagaaatgaaaattaaattcttcacatgttaatttctaacccatatccactgttaagtaaaggcatacgttcaagcacagaaggcaggggaatactttggtgcaactgctttcattcagtatgaaactgaaactacacagacaaatgaatagcccacgtggttattcatttctagttctttacaggaagaagttctttctgttgcttgtataatcttcttagaaaggaaagcttggggactgactcaccataaccaaaaagtaatttaggaagtaatcaacaaaacagtcccaagaataccaagaataaagtgagctaaactaagaaacctggaacattctaggtaggggctgcctacaagaagcgttgaatttgtttcactaaatacttattgaatgcttgtatttgaattcactcaattatgtgtttatttagtgactaccaatgcacttcataacatacctgtgacacaataataatgaaaccaatgtgatctttgctcttttgggggttctcagcttacttggcatgatctgttcagtctggaattcaacacagtgttatgaaagcaatgataatacaagaacaatattaactgtcattgagccctaattcatgtcaaccccttcacatacattatctcagctaatttttaaacactccttttagcctcactttgcaggtgctgaaactaaagtttacaggggtaacagaagtagatgaataaattatcaaaagcatcagttatctctgtgctcctcagaacagcatcatcagtgtcacccagaaagctgttggaaaagcaaattcttgagattcatcccagaaccactgattcagaaactctgaggatgaggcccagtgatctatgatttaataagctaaagtttgcaaatgtctaaagttactagttggtaacaataacttcagaccttgacccaagtctttctcatatctaactgttagctattagatcactaaggagaaagactttatctaatctagggctagagatggtgtggggagctagggataatttccaaaatgagtagcatcttatctagaatctggtgcatgagtagttagccaatggaagatgaagaggaggaaaagggaaaaaaaaaggcattccacatagaaaaaccatttctgggacagaaattccatatgggtgttacagagtgagaggagaggagtgacatgagatttgctggtggcataagtcagatcttgaaggacattgaataaagattgaattttatcttattcaggtcaaattattgtcctagggtcaacttggagcactaaatgctcctattgagcaagaaatgtcataattagactgtcatagagatatacaaagacacaagggtggcagtacaaatcgctgtgagataaagatgttacatgcaggggtttcaagggaaagtatgttctagttctggaaatgttttttggtctttgtgtttcattcatttcatag

SEQ ID NO: 47336 - DNA, 520 bp, Homo sapiens
taatttttcatccagagagtaaatattttaagataatatttctgtttttctcattatctccagcagagaattggatacatagaagctaggcaatacaaattgattagtagagtcataactgagaaaagctgatgtgtttgggttcatcttgtttttggagagtaacttagcttggagatgtgccattgtcctgacctttattaacatatgtatgcagtcacacactgtatttgttctctggatgacactttagataatcattaatgaatcgtagagtccttgaggtgtaaacatcatgattcatctttttatctctaggcagggtgaccaaactgtattatacattgggattagcctaatttcagccatctcaataaaggctattctacaatctctctgagtacatgtacacatgttataacttaactttatgagcaataacttacagtttaattcatatattggaagaaggatgttttgtgaatgacagaaattgctattttatcatggctgccttagt

SEQ ID NO: 47337 - DNA, 575 bp, Homo sapiens
ctttctcttctttctagctgcttctcccctcactttcctactctctctcattactcaaaaggtatcgtgtagaattcaaagtgaaatgagttgtaacatcatttattaaaattttaatgaaaaacttacatcttggactaaagttatgttggtccatgaaggtgatggaaagaggatcttctgcatgcagagtgctctgatcagcataacttcgatccattgcattcaccatgtgagtcatctcctgccgggtattccccatggcatctttgcgttttttagcaagtttgctgccaaggcaaatacaaaagggcatccttagtgtttgaggcttgcaggagagttaacaccagcaataaatagtccaggtgagcccgaggataatgttacaaacatggtttagaaaccccaagcactggtcacaatttcaggaattaagtttgacattcaaacaattatatttgctccttgctataaaagtattttgtcagatgcatatttcaatattcaagctgtcaatccaaatctctcatcatttcctgttctcttaaatatcataaaatataattatattt

SEQ ID NO: 47338 - DNA, 2423 bp, Homo sapiens
taacataagttatgtccctcttaagtacaaaattattagcataatgataagatagttaacacatgtactgtttataatatgttaagcactatttaagcacttcatatatattttattttattattttagagacagggtctcactctgtcacccaggagtacagtggcacgatcatagctcaacgtaaactggaacttctgggcttaagcgatgctctcgcttcagcctcccaagtacctgggaccacaggtgagctccatcaagcctggctaacattttttttttttttaaattttcagtagaaacagggtcttgctattttgcccaagctgatatcaaactcttggcctcaagctatcctcccactttggcgttgcaaagtgccaggagccaccgtgtctggcctatatatgttattttaatcctcacaacaataagaaggtgtaggtactctattatttaatttttggaatgagggtttacataagtttctcaatactaaaaaattcctaagggacacagtcaatatttgaactcagatagtgtaaggccagagtcctttctcttactcactacaccacaccacactgcattcctgagatccagaagtgtagcagagctggattattagacaaataatggactattttttaccacttcaaagtttctgtcaattattctatgccacatggtaagactgtttccaggatctcaatcctcctatagtttaaatatcatgtgatatttgtcatttttttaaatttgtatcgagagagcgataaaaggacacaaacatctcaggcaagagcaaataatgaaataactgaataaaaaagttatgttagggtaatatatagctaccatttctcagttacagaaacatagcatgacatatctaaagaacttcagaggtcaatgtgggacacttttacaattttggttctactttaaatctggaaaaacacaggtgatatagacctaaatgctttcttctattatcttttaaaaatttcaactctcgttcctgatcagtaagctaaatttttaaaataaaatccttatacatcgtatgtatctgtgtatattttctctttaagaattgcttttttaaataaaaactaccaaaaggaatcttcataagtgaattgaaaaagtatatttttttctcttccataaagcttctttattattcacaagcgtcaaagagaaagtctttctttattgccttacaaatcaggagtaaagcacaaatgctgattgagcagactgatgattagatggagaaaactgatgaaaggaaagatgccagtacaaacagaatatggccattgatttttaccccaaatgaatcaactactggacacaaatgtgggtctgctactaattccggcagcaaaccaccccaagaaccaaccctttgaggaggcccacgtctgcatgcagacagctttttcatgtttctcttgctagaatacaccaagtagcaatttattctttgttggcacaatcaagtaactcttaaatgaagaattaaaaacacagagaatgtaggagactttcccccacttggaactctaaatattcattcaaagatgcaaatgttttctcttgtcaaagaaactaggcagctaagccataatatgccaggtcagcaggaattgccctggttatgagctagccatcacagatctggtttctcagaataagttttaaaaaaagtaaatgatcttcaagctaactgcactactgatgaagatatggactaatctctatccctataatcttatgtaaacatgaattagcttggttctttttatgtttgattgtctacaatggaaagtaatagaggtttttaaacaagcaacttgctattttcatctgctattgctgacgctttcctaagatattggttgatcagcagcacaagatttttcagacactaaatggcagaaataagcccttctaaggttttctagatctttcctgttatcataacaagattccttcagtcaagtactagaggatgggaagtagcaccccattagttgttaaagacacccacatgagtcacagaactaactataacagaaatgtcatatttagccctgaagcagggaacaaagtccttccattttagaaagggggtgagagtagttaaaacaagcaaaaaaagcaaacctcttaccttttgtagcaatgcgtacgcactgggttttagtttcctgatagagtaaaaatgaaaaaaaaaagagtcaatgtacagataatgtttcctgtttcataaactataattattatgaagatccatctggggtcataaaaagggattataaacaacagaattttaatattaagaaaactttaaaaaatatgcccccctagggatacttaaaaatctaaagtaagaactttgaaaaatattt

SEQ ID NO: 47339 - DNA, 559 bp, Homo sapiens
tgatccctttatcttctgggatggttattattttttttttctgtcaacttaaaagttgtttgtggatgatattaacatttaatatatgcttaatcattttgccctccataatgtgggtaggccttatccaatcagctggagacctgaatagacaaaaagaccagcctccgggaggaaaaaagaaattctccagcagactgccttcagattttatctgcaacatttgcccttaaaaattcatttgcaacactggctcctccatgagtcatgagcctgctgccctttgaactgaaactgcaccatcagctctcctgagtctccaggctgccagccttctaactagaactaccattgactctcctgttctcaaacctgctaaactgcagattttggatttaccagcagacataatttcatgagctgctttctataattaatccctttctacaaatagacacattctattgtttcaaattttctgtacaatcctaactcatacattgtctctatagttttgccttttaaaaaatgtcatgtaattcttcagacttggtgatat

SEQ ID NO: 47340 - DNA, 604 bp, Homo sapiens
taggaaatacaaataatttctatgcactaagcacctattgttcaattcatcctgtattgagtctttacttaatgccctatgattagtttaaggcttacccacattcctaaagattttaaaactggatatgttcctagcaccccaatcgaaagtttacaattaaacttaacatctatgctctcaaatgagttcttctacaaggcttccaaatctctgaccataataccacattttatccaatatcccaaacaaaaatctagaagtctcctttgacttctcctcctactgtcattacacaatgctttaacaacattgctgcctaatctctcatccttgactcattctttctaccataaccaccccccccaggaacacttatcacttatcatctcaagtttttaaaattgtaagagcccccttaacttactccctaaaaacgcgccattttccacatcatctggtatcctggttttctgagacagataatatgtaagtaacctacttcaaaactcctaaaggttcccaaattaaataacacaatgcatttatatttcttagtctggcactcaaattgttccacagtaaggcctcaaagtacaatttc

SEQ ID NO: 47341 - DNA, 1381 bp, Homo sapiens
attcccctttgagtgtgttatatatttatcctgatcagcattcaattcaaaagacaatgtgtttggggtaagaaaaaactgacaagctgctacaacacacatatgtatctggagaggcaaaattgcaactaattgtgattgaaacacaatcataattttcctccccacggtagctttggcaaaaattgcttcctggaacacagaaaaaaaaatatccttctgtacctaagaaaatgaacataagtaaataaatgagagtctaacaagtaagctcatggtgacaaattgctgcagataaactttctgccaggcttccagaaacagcttgaccctaaggacttatttagacttagaaaaggtcccacaagggacatcaataataccacaggacatctgattcttcttttataggtagctgtagtcccacaaccaagtttcttagggtgagtaagagaggtagttttggccactgttctagttgcccagaatcaatatttggactaaaatccaaaggtcagaattgctaccatcaccccacccccatccaaaataaaaccagtaaaagagagtggtggtgaaagagggtcaagctgttaaggagctaagcaaaaagaagacgcagaaatctaaggatctgattcttagacaaactaaaaagatttattgagaacttcaagaagcattggagttctccagtggctaaaacagcctcctaaaataagtcactttgtctaagtgtaaaccatttcttggatctctatcaaatttttaaaaatagctaagagttcactggttcaaactctcagaatataaccatatggcccacagcataaacatggcaaccagacagggcttcaagactttctctgttgatgaacatttctttcagacaccagtctcagtaaactgatttccttatggaatccccccattctagcagacccagcaactgggtaagctttaacaacctctaaatgtacaagaaagcatgctctgttaattcactatgggcatgaaagagtttagagtttaagggtaaactcctaattcaatgtttctcaaacatgagtaaaatcccaagctttgaaaaagaaaactttctcacagacctcagtgttaagttgaactctgcacagataaatatctgagtattaacataccataagtttactcatacaacacatgtataaaatcaatacagtttaaattaacatcctttgttatttaatataaaatgatgctttgtggaaccaaaaatgcaaatagatttaagagtggcaaataggtacttctttgttttatattttacatttcacttttaggtttgattcttttggttttgatcataatgaaacatcatttgagttaatgtcatcataat

SEQ ID NO: 47342 - DNA, 1262 bp, Homo sapiens
tatgataaaccagagacccaattccatttgacttataataaccacaatttactataatggtccttggccctgaaggagagggcatattcaggccagactctacaatcccattcagacaccatcggtggtgaggggtggcagtgctcctgcactcccttctacatacagacccttgctttcagttcaccatgggtcatggggtttgtggcagttgaagagttcaatacctgctacatattcagagtaacccaacagtgtgcagctgaatgaaaacactgctccaaccacagggaaattttaatagatgaggtcatgcatcccaaagtttcagacatggtacaataagaagaaaaacgtgaaaagaagaatcttgagcagagctctgggtattttccaaatactgggaggttttgtctaccagaaattttcactggacagtacagtacaataactcaataatgcagtgccatcttcagtagcagaatacctagaagtgagatgtctttctaagtctgctgtttcaaagcaaataattaacttgataaatcatgcaaatagaacccttgctcggctgaatgacaaaaatatccagtgcattacctcagcacatggattggtagaaagataatatgaaatgaaaggcttgcttcaatttttaagtatctgcaggcagcagctggaaagcagcaatatatttcagttaggaagagcagctcctaaaattataatagactgctcagatttgaaggcagaaggagaaaagtggggagaatgatatacatggagataacagcttttacttatgtgatacttattgctcccggtttctatcatgacagccagttaaataggatgcatactgtagacaataccctaattgcccttgctttcactaagatacagactcctccaggatactggcactcaaatgtagcataggatctcactggagggcaaccatacaacccagtggttgactgttataaaggataatttccaccaggtacggtggctcacgcctgtaatcccagcactttgggatgccgaggtgggtggatcacctgaggtcaggagttcaagacaagcctggccaacatggaaaaaccccatctgggattacaggcgtgagccaccacatctagccaaggcagtattttctatctttgagtataacaaagttattctctgtatagtggtatacttccattttccctaaagaataaagtttgacaacatttaatagtaatccaaaaatgaaagtt

SEQ ID NO: 47343 - DNA, 532 bp, Homo sapiens
gtggtattactttttctagtcaagtgaccattcatactaacatgctataagttcctcaatcgtaaatgcccaccagccatggtgtgcatagcttcagctaatgatagcattttgagctgtatttatgagtttgttacgtaatttgttatcaatatcagccttgtctttgtacttttagaacacagagaacaggtacctctcctggctggagagttgaatggcttccaagccaatgatcttatgcaatgtttaagttaaatcagtaacaaggaaaacctgataagactggtttaaaacctaatcaggtttgatatccaaatgctaaggtattcttgactattcttattaaatgctcccagaagtgctatggatctaatacttgtgacacagtctcaagcaacacagactcatgttttattaatctctgaatctttctgcaaacattaggtgacaactgagccagatttcctctaagttcagatcagtcacagggaatgaactattttagtagaagacagataagcctttccat

SEQ ID NO: 47344 - DNA, 536 bp, Homo sapiens
accatgttggccaggcggtctcgaactcccgacctcaggcgatctgcctgcctcagcatccgaaaatgctaggattacagacatgagccaccacacccggccaaactttacttttaaataaatgattcctccatgaattacatgacaaacttttagataaactaaattatgcctggaatgcaaagcacctactcactattgcataatattttaggcaatgagccaaactataaaaaatacacaaaaaaaaatctcttcatgtagctaaacagttgcttcaacagaagtcaagtaaaaagtcataaattcaactattaagtcaaacaggcgtctagtctctagatggaaagaaaatatgaagacataaactagatgaaagctggcacagaaggcaaagtaaattacttaaggtccctaggacttttgagtaagaaaagagtgcattaacaacccaaaatatccatttgtgtgatctgccttaggagatataaaaggaaggaaaaagttaatttggaaaaaatcaacaaagcagatct

SEQ ID NO: 47345 - DNA, 851 bp, Homo sapiens
ccattctggacccatcactgtgcctaagtattggtggctgcaaagagttgcagctgaccacacctcaagtactgcttggtacttttatttgatgtgctagttccggaactgctctaaccttctttggtcttctctccacactggagagtgcaatacagatattcaggtagccctaaagtgaccttcatgctgacaaatgcaaacaaaataatgttacaaaacaagaccataggcacaggccattttggatttttatgatactctgccactctcggaaagagatgatttcaaatacatgtgagttttgggggttttctgtttgttttttagcaaaagtaaagatgacgatgccttgggtgtttgctattcagcagaacattttcagttactttcattttcacttgcccatatcagagaaaagcagtattatggatacaaaaataaaattggtaagacaatattaaagttttgctaatttacaggcaaataaagaagcatctccagttttaggttaagatatattgctaggaaataaaattcctaagatacaaaattccttatagtacttcctcttcctggactcacaggtgagttgagcaaccagctccataccaacttcaccttagccatccagctggctgactcttcctcagccagtgctcctgggctcccactcctccctagagagctataaagcaagccaaatgttctcagtgggcagggggatagatttgaagctggaataaagcctcagcaaacactgactctactagagtgtagctggtattgttccagttgaaaaaagggtgcttaatgactagcccagaaaacttgtcctgccacaaagttta

SEQ ID NO: 47346 - DNA, 665 bp, Homo sapiens
taaggtcctgcatgctctggcttttacctgaagctttggccactctcaccagactctccttcacgcctcttccccagccatagtgagtgggcttctctcagttgctgcaatgcactgcattctctccaatgcaccgcattctctccagtctccatgtcttcacacaggtgggactctttgcttgtatctcctgcctagctttcctaatgtcaaaattcctgtgcactccttgggtaagacacattcttctaaaccccctatatttttttctggactttccaaacttaggattacatattgacaagtatatgtttcacatccatctaccccagactgtaaaagtccaggatgaaaagtccacaatgaaaaggactatgacctcagtccctaaagcatgccacagtgaaggtgctcaatatacagctgaagactgagagtgtctttcaaaatctcaagaaaaaaagcaaacttgatgaggaagcccatcttagattccagcaatgtgattatcagaaaaaacatttccctaaatcttaaggcagaaaagtagagcagggatgggggctagtcctaaaacccagtccagtagtaaagtagagaatagagaataataattgtaaaattccacctctgattattatatattatatctaaggaatttgtca

SEQ ID NO: 47347 - DNA, 2721 bp, Homo sapiens
ggatatatactgaattataaggttatgccacactgatacataaaatgtaaaatatatatttttatgattatattttggattaggccacagaataaatatggaataaaaacatatatcttgacaaaaaattcagctggatacccacatagatagataaatagaatgaatggcagagagagagaagacaggcagcggacagctactctgctagctattttcaattactgaaatatctctactcacaagttttacagttgattggaggttttgtgtatcttttttattcctttgttgttgttaagtcttggatatatttttattggtcaaaattatttcaatgttccattgagtatcacaataggtatttcaacgtaaattttaaatcgagttttatttacatagtgttattttgttttaaaatcaaaatgcagctttatttgaagacaaatgtgaataatgagttcatacaggtatgtccaaagtacatttgccttccattgcttttgtcaagagtaataccaaaataggaaaagtaaataaaaaaaaaaccttagctttattcacaacatcctgtcataaagaagaaacaaaagactgtgtaaaaagtactcaacaggactgatctctacaagtgaaaacactgaactgtaaatcttcaggttcgaaaaatattttaaaagacaatccagtcttcctaagtcaaacccagtagtcaattagtatttgaagggccaaagggcaaggcattacaatcatagtaacttacatatgtgtagctcaatttggaaaagaatatccaacataaattacccagtttgattctcacaaccctgtaaatatccagaaattatacacgaattgaggataaggaaacaggctatataagttaaattactcatttaccaaattacgcaaactctatgctctttgcactgtaccaggaagtgccacgacataatagttaagagaaaaaacttggagcttataaagttgtgtgaataggatttatagcaaacattgtatgagagaagtatagtaactttcccatatttttggccagacccacagttagaaattctttttgcattgtgactcagtacacagacatataaggatacataaatctattccattaaaaccaaagtttcatgaaacaatacttctctcttcctctacaaaatgtatgattacctttgttattgtttttgttatattctatttcatggttggtctggttttcttccttaagctggttgctacctactgaattgaattcggtacccaccaaatgggtggttacatacaatttgaaaataatgagctgatacttagctcaatgctaggaccagtaaacactaaaatgttagttattgaaaataatttttaaagttatgtccctataggttggtggactcaaaacactcaaaagggatacaatgtttacctctgaaatactcaggcaagacatgtaaatggcccagagaaacatacaccaatggcttcagtttctgatgcagaggcaggtaaaatcctgatgctcatgtattgttgtcattatgtcatcaggctgcagtgaaggagtggctaaatatagtgagacatgaactaaaaatctttatcaggccctgctgaataaacagaatgttgaaatagagagtaatacaaattagaagttgtcagaaacagatgctctaaaaatgggtcatcctagttaatacaatcatgtgattaactgaaaatttgggggggggagtctcatttcaatcactgtggccactactggtaagctttccagccttatgaattacaatttacccagcataattacatttttgattatgcttagctaattcagccatcactctgaatatcaattaattgttaaagtattataggcataaaggtaagagattgagtttaacgtctactgatcacaggtcacacagaagagattgctctttaaaaataaatccctgagagtttatatgaacatatgtctttttcctattatataaccatttaagtacaggaaacaatcgacttagtgctacacctttattaattctgaatattatttgtctctatgtcttctcccacttggtttcctcaaggagaaagagtactaactgagaagagttaaaaatctacattttgttttgcacagtctgaggaatctttattatgaaatctatactctgttgcccgggctaagtgcagtggcataatctcagctcactacaacctccgcctcctgggctcaagcaatcctcctgcctcccaggtaggctgggactagcccgggctaagtgcagtggcataatctcgacttattgcaacctccacctcctgggctcaagcaatcctcctgcctcagcctcccaggtaggctgggactacaggtgtgtgcaaccacacccagctaatttttgtatttttaatagagacagggtttcaccacgttgaccaggctggtctcaaactcctgacctcaaatgatccatctgcctcagcctgccaaagtgctggattacaggcatgagccactgtgcccagcctgaaatctatgtttaaactgtaaagtttggaatgcttccaaattcttgaaattgttcatatataagggaaagtaaatttttttcctgctacaagataaaagattttatataagatatacaaagagaaatcatatggagaaaatccattttcccaaaataagtcata

SEQ ID NO: 47348 - DNA, 2584 bp, Homo sapiens
cttgctattttgcctaccagactaactttattagggatagtaatcaatcctggaaatgcacaaatcaatggttcccgccccaataaggtgttgccaacaagaccatattaagaacacagactgatatcacctgttttaacaagctttgaaggatatcatatttgataaaaatgtacagaatagatatatcctttttgtcattgctcacataaaagacaacacgtgatgtaactgcaatgccaacaaatcaggtgacaagaacaataagagtcttgacctaaaaggacccctcttattctttcaaagcattagcctctggaaaggtaaatgctgacatgacatcctgccccttctctgtcccctgccctttacttgactacatgtgaaagcaacaggaaaaactcttaataaaattatatgcttttctaaaatgtgttggcaactggaagcagcctgtagtataactgtcaatgagcaaggagcaaggatagagtactttcagccaatggtgtgccaaattgtgaacaaactgtggagagagtccaggaaagatctcaagtggatacttcagtgaacagtaagtaactaagaacttcaaaggattgccctacagactcctgaacctaaattaaaggtaaaaacaacagccctcagagcaattagcaggcttcaactgggatgtgcattcctgataagaattagccgggaaagggcacaatgtaccttgcaaaatctgaaacgttgcctaaggagtaagcaatcagagcacctgggttcttctggcaatatctgcgctcacctttcctggttgtgggtttgtccgataccctagtgcaaatagattgaaagccagagcctgaatcacactggttaaaatttatggtttctcatgtacactatcatatttaagtatactactatctagtgttttcattatagagatctcccattttcagttactcattttctgattcagtatcctttaggtattattgtgaccaaaatatgtagcagtctgctttccaaataataagtgagtcacgattctggggtccaggacaagcaagtatacatccctgcttttagaactgtttcatatttaaatttagatgtgccatagaagttttgaagttttgttaatgctccttttattgagactgaatctggtcaaacagtataccaaaatgataacaacttaagaaatttacttgtttttttttttttttgagacggagtctcactctgtcaccaggctggagtgcagtggcgaaatctcggctcgctgcaacttctgcctcccgggttcatgcgattctcctgcctcagcctcttgagtagctgggactacaggcctgaccaacaggaagaaaccccatctctactaaaaatagaaaattagccatgcgtggtggcacatgcctgctatcccagctactcaggaggctgaggcaggagaatcgcttgaacctgggaggcggaggttgcagtgagctgagatcgtgccattgcactccagcctgggcaacaagagcgaaactctgtctcaaaaaaaataaatacacacataaaataaaaaataaatgaagatgagtttatgaagacagctgctgccaccgcaatcacaaagaagacctaggttagtaggagcatccagtcagaacacaaagttgcaaatattgtaaggacattatctcagtgacattcaagcctgcagtgcaaagagcttctccggtaagaaagttaacagggatttctaacatctggagtgcacaagtgttacacaaggaaaagagaagtttgtgtcaattaaagctagaaaagatagtgttaaaaagttggaaaaataaaagaaatctaaagctcgagtctaacataaaatccttctcacagcttagaaaagctttcctctgtgttgacaggtcaaagagcaactctgcaaatgagctaataattgtcaaaactttagccagacctttccaccatgtgccaggactaagtggctttacccagagaacagcagcttgaaaaagtcttggggttcaaatagatttgaaactacctcattgttttgtgaactaaggaaaattaaatagctaggcaacctccaaaaagaaaaagaaaaatgttatatagaattcataaacacgttctaaaagccagtgcatttgtttagcatatgtgtcaaatgcaaacagaagcaatagtgatattcctttctcattctataaccattggggaaacaatataccaacattcttaggcattaaagagatccctcttatcttgttgattaattctaattctctcattctaaatctgagtgctactcccagataggacataatacttactgggatgggcactgcttggagtggcagagatttcattcctccactttctggtcaattcttattttaaccttattcccaatttagaattttcatattttatcatctgagattaaatcgttctagaaggtaagcaattctttgtaggccaaaaacttcccacctccctcaacctacctagagaattttaaatgcattttccaaagatgttgggtaggtttttatacatggcaaga

SEQ ID NO: 47349 - DNA, 6231 bp, Homo sapiens
actaaaatggacaaattttattagtgtgccaggcactcatttaagcactgtaactcaatatttctcaaaacctacatctggaatgggtactttcccattttgaatatgtggaaactgaaggaaagtggtcagatcatgtagtaaaaacatgttggaatgtatattcccactcaagcagtcaagttccaatgtccgcactcttaaacactatgctctatactatgtgtggagatcagcatttgataagtattcttttgcttaaacacaaaatgggcataaaatatcagtgactcaactaacaaaaaacagttttttaaatttctatttttgaaccttgggtatatgtaatctagtaactttaatttggcttaggaaaaatttacacttctccaaaattgcttttctctccttaattcacactagaggcccactctagaggccatgtgggcctcttttaagacagaagttcaaaatccccatttcctggtaagaccgtgagtgtacttaaataactactgttgtccccttcataatgaatgaccaaacagtgccttatgggatgcaggtgccagggcaattaggtgatggtcacagcccaccctcattcctggctgataggactctgccagccactggtctccctctcttgtggctgcccactagacagggcaatgggctacagaagcaatagcagagagagggctgatcaaagtccaggcaagagaggcagttcataagcagctgcaggtcagagcaaacaggattctgcagccaaacaaccagggattatgcatgtgaatattcaggttgtaaatgcacattgacatacactgtagtctaagaggctgtccaccaatcttcttgatcctgcttccagagggagagttagtgacagcaaacctccagaaaacaaatgtgctctctcctctgcctgactttgtttacatttcggattactcaagttttgggaaattccacttggcggaattttactatcattgtggcaatgtgtttgtaattctttttcggtaggcttttacttgtttgggtagttttgagactatggaaagactactgatagactggaattatcctaggcaagttctgaagtgaatcagcaaactgtaagacagacagagctttgacacttgccacatctcaggagtatggtcagttataaaatatatggtcagttaccaacaaagccccaagcttcacttgtgaatcactagatgtgggcagcgatgcaaatattaccatgccttaatagtcattaacattataaatgctgcacaggcactgggacaagtcactgctggcttacttgccagcatacccaaaacctggcacagcatgggcacatagtaaggtgctcaaagattcatggagtgaaagaataaatgaaaggatataaacctcatcaggatcatgctcttaaaaaccaggcagaacagcttagatggcaagagcatgttctagcttatcacgaaaatttttaaaaggaaaaaagtatacacacaactttctatatatgatatatataagtacttaaaacacatttacatttctttaataacttattttataatcacataatctatattgaatatctggaggaaatacaaatacagtaggacccccttacccacagtttcactttctgtggtttcagttgcccttggccaactgtggtccaaaaatattaaatgaaaaatttcaagcagggctctgtggctcacacctgtaatcccgcactttgggaggctgaggcggcaggtcacctgaggtcaggagttcaagaccagcctggccaacatggcaaaatcccgcctctactaaaaacacaaaaaaatagccgggcatggtggaggcaggtgcctgtaatcccagctacttgggatgctgaggcaggagaatcgcttgaacccaggaggcggaggttgcggtgagccaagatcatgccactgcactccagcctgagcaataagtgcgaaactccatctcaaaaaaaaaaaagaaaagaaaagaaaagaaaacgaaaaaatttcataaataaacagcttttaaattacacacccttctgagtggcgtgatgaaatcacatgctgtctcactccgtcctacccgggacatgaatcatccctttgtctagtgtgtccatattgtacagcccacttgcctgttagtcactcagtagccatttccattatcagattgaaacaacatggtatagtatatttaagggtgggttccatacgagtttcagacgtctaccgggcaccttggaatgtatcccccagagatatgggagggctagtgaactacctggtagcattaaagtttatttatacatacataggaaatacatatatgtgaaaaaagttggggggactgctctttatgatacatgattgcagaatcacccattattcacaagaaccatgctcattcttctttattataccactttccccaacattgagaggcaatgtatcacttaaacatgcaaatatatgaagcatttatttattgttttcatttcccttcttcagcatacacactttttgtgccttcagcaatactttccttattgtcaaagtttctattcctaacaaaatttacatttttatggtagtttacaaatataaaactactttcacatatattattcatttcaccttaaaagtgtctggttcagtagactagacaagacattaaagtcattcttcattgtaatattctcattttggtgataaagaaatgaaagatcaagcagaaaggactgctcccaaatttcagaaagtgacagagcttaagactggaacataagtcctcctgtagcaaggccagtgctctgtgcattaaacagcctcctgcatagatctccaaaggcattggttctgaggtaggttgctgccagccccttcacctcattcatatatttcctgagcatttaagtgttggtttagataaaggggcataatgagtcaacaccagatagcaatctgctccaactgaccaggtggttagggcaaattattacaaacttcatcatttaggactgacagtcatcacataaggacataaataagacagaaaaagagtcataagttattatcataagttatttatgataatagacaaaagtgtacgaaaacaagcctccagtgacaaagggaagcatgatgaagtcagtaaaccttcctcctcaaccactgtctacacccctatgtgccaggccagctgccctggccattgaaggtccattacggaccattaaagtgcctggagactatcccctggcctcaactggcacagccatggtcctcagtcaaatccactagcactaacatgtgattaagacagcctgggtaaatctctcattaggagaggaggtagctaggcaaacagctgctacttctctacattttattcattattcagtaccccaagatatttcttatagcaactcttcctaatatcccatgttgctcagatatacataataaatttaggcagcagaggttagaggatcaaaattaaaaataaaatcaccatcatctcttgaggttttcaaaaatagtagagttagtaggttttgtctgtgtcaatatcatttaccacagcttactttaccctttgctttctattaaaaataaataaatgcatacatgcaaacacctatacatgcatacatgtataaattctgtcatgatatctgaaaaccaagcagttatctaagatagtctcttgcattcacagacatattatcaccttatatgcagactactattctaatcaaatccaatcactaagtcaggtttatatttggaaatattgtttcagaaatttggaatacaagccaaaaattttttaatcttaaataataattatatagattactgttaaggaaaatgatatatatatagtatacattaatatatgatacatatatagtaagaacactaacctatacattaaaatctttaatttgagctcaagttcttcctacctgtatgactttgggcaacttacgtcaaatgaaggggtcattaatttctaagatcttttttaacaccaaattctacaaatttttaatgttagactaattcaatactgagacaaggaaaataaaataatggaaataatataaattcatgctttaaagtagtccttaaagggaaagccaataaataaacactctcagattaaaaacaggtgatctgtaaatgtatacaagcctgccagacacaaattgcctctttcctctctttctcttccacgctttcccacttagagatcacctagtggtccacaacagagaacaatctgatcctactgtctcttccccatcatctcccatcttctttcttccccattagaaagattacaaaccctgggccaagccaatcagcacactaacttcccctcagtcagagccttagattcaatggttggaaacaagatcagtggattcaagcactgtaaaccttagagccttatcaggtgcaaccagcagataattcacatttccttaagggacttgaacctgggatcttgttcggtgggagctgccacagccatcgtgcctctatatggagcctaagaagctcctggaataccctagaactaaactaagcaggcagagaaacatcatgtctcagtggaattacgtcaacttctaaatcaagctccacctgaactgtagttaggagagacaaataaattcaccttttgttgcaaccagtctgggttacattttctgccaagatgcaaccaaagaaatgtctaatctttaaacatttgtgtacattcattaacgaatcttgactctaccagtgactcatatagccacttgggacaagttattacttaacccctcgaggccttagtttgtaaaatggagatgatcctcatcttaaaggatattgtgaggatttaaaattatgtaaaacactgatcacaggccctagcaggtcatgggctctcagtaaattacagctcatattgttatttttgcaattgctttaggaaaagctctcttctccaacatataagaaaataaatgaacctaattattgctcataagaataaaagcagtactagtaaaaaagacaagttccagaatttggagtcaaactagaaaaagtaactgtgaagttcttgaagatatacgaaagtgccctctcagagtctctccaccactacttctcctctaacagtgatcagtctcctattaaatctttctttaaacattagtgtctaaattaagtacatatggaaatacactgatttacagttcattaattcaataaattatatattttatatttaagacaatataggttatgcagacttttatttacagtatcaaaaatatagagaacgttgctattatcccaaactccagcttctgatctcatgatacagccaactgtaatgggtgaacattaatttttacttcttgttttttattagtctctgccataaccacgtcattatgccaatattttctgaatcactagtgaatggcaaaaacaaatatagcagttgtgatttaatcagagacaacactgttgaaacagctagcacaagtagacacatttagaatagtaaatggataacaaaaaacacttacaggctcattaataagaaggcaattaggtcttctgggaaaattcattttctaaaagaatgctaaagcaagctataaaatgcaagtaaaattgtgttttgacatgaatagtgtacactgtctattacatcataatttttctcttgagaaaactgacaagaatctctgttcttaaatatgagcacaaaagataataaaaagaacaccagttatatttaatgcattctacctaccaactcccattcattaaatttgactgtcctataaatgagctccttactacaaagatcttaaattacacttagatgaaaaagagaattataaagcaagagactgctactagtaatgtcagagggaatagtatttcctgtatcaacataacattatgctaaaaatgatttgcatatagcatgtttggttccttgaagagtatgtttatctttaaatattcttatacaaaatattcataaccaaaactagtcttacttttagtctcttatgaaaatattttttttcaaagtcatctgagcattcttttaaaaagcttgtatagtactgttgttttgatgtgtctggaatattaaataataatcaag

SEQ ID NO: 47350 - DNA, 3481 bp, Homo sapiens
taaagtacttagaactagatatctaagaacacaattgtttattgtacgtatctaaactccaggtatcagaaaagctcattttcacattcagctggaggaaaagtagtatttatttgttaattaaagggtaaataacatttaaaaagagaaaaagttttctaactgctgaaaatatatccatcgctgttgagacattaatagttgcaactcttgaatacatgtaagtttaattatgcaactggtagagttcaaactttcaattaacaaactacaagccttttcaagcgtaggctctccgtgcagtgacaaacactgtgcagaaatcaatactcactccaacttgcctgcatataatgagttacatcaagcacggtttcaatgctaacgggcattatatgtcagaaatgcatgcagtaatgcttactccagaaagaattcaattaaaccattggattattttttgcatagagctgttaccctctgcgtacatcaattatatacagggcttttcctctgcgtgctgccatttcataatctctgcctgaatgtacgacacatgctgccacctgaatctgttgtttaactccctttacagagttctaaatggggcgggggtaggagagcaatggaagggaaataaacgattactccagaaaacaacaatttgagtttatttccaggaaacagggcctccacaacaacgtgagaaactgtcaggtacaaagtaagttatttgcgtcctgcggcttcagccaggagcgtggctgtcgcttttcccgtcttctccatcaccctctggccaccactgcgtctccatctgcaccgcgaaccccagcagcagatgcgctcgccagccaagcgaagctgggtaggttggccagaaaagttgtcaggactggcgggaggtagacaagtgctcgggagcccgctccccagcgtccacctggtgaaacttcagagcccccagaggagagaacgaaagaagcaaccaacctacacgaaggataacaaaactggaggggaacagagggcgggaccgggagagccagggttcacggacttctctgagcggcttgaccgagaacccccagggctacagcgagacgctccacttgtctccttttgggttctccggcagaaggcagacatttacagtccgcttccagccccaggccggatccggggagcgcggggccagagccccaggccggatccggggagcgcggggccagcctggcggtggttttgcccgaggagcgggctcccacgcgcgagtcaggcttcctccaccaggcgcccagacctcgatgcccatgaacgctcagagtgggtccttagaaccgcatttcaacacatcttacagggctccgccaacacacacacagaacatgctccaagcagtgcccgagcgcacagggcaagcccgggagcaacccagagctgggggaggagaaaaggggactccgggagggacggggaagtagttagacaatagtcaggggaggttattcccgggacaaaaagcacctggcaaagcgcgccgaggtcagtcccttcgaatctccacatttctgacaatggcttcccagggaatttgtttaaacacccaagtggcagacagcaacaaacccgcaccacaagcaacagagtgccgtcacgggagtcgtaactactttttctttctctcttccccactagcccggcgcaggccacgcgagacgccgaagccagcaggtccccacactctccggctagaccgtgccagcctgagccccgagcaagcttcggagaggaacaatgggtgccccgcgtcccacctggcacgaactctggggacagccctccctctaccctgtgttccccacccccggacagagagagctccccacgatccttgtccccagccctagcggggacctggctcacccctcgtgagcccaggactccaggcgttcgtcggggacgccccccggccactcacctgcggagaactggccttgggccgatcccaggagaggccaaggagagaggagcaagagcgccacaaaagcaggcagcgccgccgccgcagtcgtatccatgccgagtttgggagaagtttcaagcagctttgcaaagagctgccggggggatcgccgcgaaatccacgacggaggagcgggccgggcctcgcggggtgaggacggtgagaggacagccgcccgcccgccctttttccttcttcgcggtcgccaaactacctcaggggcgaaagcgtcgccagcgtcgccggccggccgcggcggcagctctccatgctcggcggaggctgctcctgttagtcaagagttactttgctcggggagggacgggggcggagccgggggtgacgtcgccccgcgggctccgggcgcttctgaggaatgcgggctcgggcgcggcgccgccaccgcctcctgccggagagacgcgcgccagccccggccgcgcgccccgcgccgcctttgttcgcagcctgggccccgccgccagccgctgctcggagggagcgagcgagaaaggggagccggcgcagctcgctgccctgttccagaactcagaatttgagaggcgagagttcggtaagccgtgcgaccagacgaccgaggacgcgcgcagagaaacccccgccgtccgaggagaggcgtcctggggttccgtcccaaggtggaggtccccccgagcggttgctgattgaaaggggagtgtggaagcgccctgaggaaacacccgcctgccttgaaaactccccgttccttattcttgtaataaggaataagacaccccacccccatcgaaaacttgtcccttattcatagaataaataaaacttgaaccagaataaacgatcagtaactttccagcgtgaacagctggcgtgtctcctttctggtttatttgtcattggccaagtatttggatttactctgcttcactgactttgcttgttgctctgaaaccctccggcccctttccagttctcacctaagaactgcatcagggcttattatcccttccttgcacctaggtctggtgtgtgtgtggttttgttttttttaatatctagtaggtagttaagacataagtatttaacaaaaggacttttacactgaccatgaaaacagcttcttcggaatgattcatctggcagaaaataatgctatattatgacagtaaaatatttcacagttaactacttcagcagcttgaagtggtttcgccatatgccaccctgccttacttctgtggtaagactgtatggtgcatactttattcatttttgtaaaatgtcacaaaaaataggtatggtcacaattgaataacataataactttgattcagaatttttatgtgttatgtacaattgctaaaacaatagtctgttgattgacatctctcagtttctcagacatcttagcctttgtaaatcaagacaatgtgaaattcattttaatataacatt

SEQ ID NO: 47351 - DNA, 2230 bp, Homo sapiens
ttaggcagccaacattgggccacataaaacaaattcttagagacctataaagagacttagataaccacacaataattgtgggagacttaacaccttactgacagtgttagacacatcattaaggcagaaaactaacatagatatctgggacctattggttcttgaacacctggatagagttgtaataactgttttaatgtctttgtttatatgttctatcatcttcataatttctgggtcagttttgatttaattttttctcttcgttatgagtcttattttcctgcttttttatgtttgtatggcagactttgtgaaatttacctcattgagtgatggatatttttgtattactataaatgttgttgagctttgttctgggacatagttaagttactcggaaacagatgggttctttcaggtcttgaatttaatctttgttaggtgggattagagcagctaattttgtcacgctactgaagaaaagccattatgcatatactactcaatgccccattttccactctgactagtgggtagagaaactattcttggccctgtgaaaactctgtaaattttctcctctaatccttttgggttgttctttttccatcctcagagagtttcctcacagaaataccctgattaatactcagccaaagccttgagggaagggagatcctgtgaagatttctgaatctctgtgtaactttcccctctggtactctgaccagcaaaatgtagctttctccaaagagacctgagcagtttgtcagggattagagtatactggctcctgagtggtgttagccagggaaatgaaatgttttgtggtgatgtcaatcaattttaaggcatcatttcctcattgtcagacatatctctcacataggcaaggaagctcatgtcagctgactagacatcctctctccaggacaatggtggagattccctgtgaatctagccctcttggtctccgtttccttttgttgcatgccaacatacccctgcttgataaaccctctttcttttgtggtaagtttgtagctctctcagtcccagtgacattacaatctttgctaattagtcatctcacttggggtttccaaaactctttattcacaaatactgatagtcctatgagtcattcttatatatgagtaattcagtaattttgtgttgatttttaccagttttatctcaaagatcaatttcattgtaaatgttgtgactataattactgtgaattaagaatttttgaacatattcctatttaaaaaaaaatctttgctaggaccatctatcttatttgtatgagctcctttataatctagatttttgggtattatttatttgttaatatcttctagtttgaccttgcccttattttggttctatttcattgtccatagaattaaaataattttttttgtggtggattggtcggtgaggggaggcagtggcagacagggtcttgctcttttgcccagggtggagtgcagtggctcaatcatagctttgtaacatcaaactcctgggactccatacatgcactatgactggctaattaaaaaaattattttgtagcagtggaatcttgctatgttgcccaggctggaacagaattaaaattctaatatagtaaaaagtataaaatctttacatttattgtttcttctctttaatgtatacgaatgaattaatatttaatctagagacctgaaaagcattaaattccattttctggtagatttttgaatatatattttatttttgtagacatattagagtgttgttccgtctctcatatttttctccttcctgactactcctctcatcacttggctaatccatagcagcatgggggtgggtccataatagccctgttggcacaatctgattcttcctctttgatgatggtttattttaatccagtgaccatctgaatcaagatggcctaattagcattattttcctgggactttaaatctgggctgtaaaatttaaattgaaaacaaggagagtcacttgaatgaataagatgtaatcttaggacactgtagaagagatatcttagttatgatatcactggggtgttcagagaaagaggtgaataaatgaacttaatgctcagtaagaagcagaagtgagaggaggaagggaatttcctgggatttttatgtcttctgcttcctagttccagtgtttctctaaaaccagcctgcatttc

SEQ ID NO: 47352 - DNA, 846 bp, Homo sapiens
actgtaaccgaccatctgtgtgaatttgggaaagctacctgtccaatctatttctcagtttcccatccaagtactaaccgggcccaaccctgcttagcttttgagatcagaaaagatcggatgctttcagggtgatttggccatagactatttctgtttcctcatctgtcaaatgaggatattaacagcacagacatcaaagactttgtatcagagttttaaaagataatgtttgttcaatgactcacatatactgaacgtttaataaatggcataagtactatgtagtaatgataataatgagtactttcaccagcccagggctaaacaattttcattcaatattatatgtaattctcataacggctctgtaaaatatagtctttctacttttagtcgagttaataagaattagctatcttaagcaaccaacccactcacaccactagtaaaaggcagagtaagaattttattctagcgagtcagactccaaagtctgactccttatctctggaacactctgcctttccaatttattctacttttaatagaccatggtaggctattgagagtgtttccagtttttcactattagaaactatactctgatgagctcctctatgcatcaagctttttcattatttccagttattcttaaaatagataagtagttaggaaattataaggccaaaagatgaatatgtctaaggttttcaatacacatacctgaattgtttcttccacaggctatgccaatttacattcttatcaccaatacaacaaagatggtcacagtcactacactctttacagctcatgtgttgtggttatattccataccagtaa

SEQ ID NO: 47353 - DNA, 499 bp, Homo sapiens
tggacgttgtgaaaagcctaatttcagcttagaaaaatgtcctcttctaccgcccttcccattcaatggattaaggataaaagcagacaaacagattgaacatagaaactctgaaattatttacaatttcagaatcggtaatcaaagcaagagctccacagtgttcttacctagctgccttgcagatgcctggcactgagtcttagcaacttccctatgaactcgggttcattttaaaaacttcccgtagtttcgattcaaaggaatgcctgaccaatactgccacctactgatgagtaggtgagaaatcaggacaatcagatggagagtccaaaccagtttaatgaaaacgaagacagacaataatgaaaaattccttgaagtcggtaaaataatctgcctttcccagagagtactagtaaggaatttacatcgaatcctacagcagcattaagcaaagattgtgtaagtgcaaagaattacaatgacctctgataca

SEQ ID NO: 47354 - DNA, 593 bp, Homo sapiens
tttgaaaaccacccacaaaaattggtttatgtgaattttctttctagaaatgtcttggctaggaacaagataaatattctcaagtatatgaaaggctatcatgtaaaaatagaagagccttcttctgttcgtcccaaaggcataactacagcaagagagtcaaagttagaggacagcagattataaatcaataaaacaaagatcaaaagaactcaagctgactgaccactggaaaaacagtctcactgcaaagcagtgctctatcaccatctgcactcactagagaccaaatgacaatgtggctaccacatcacagaagaaatttaaagggaggttagatggtttcaaagatgaagtctaactctaaaaagctatgatacagtgagcttagccaacaacattccagccatatctatgactaagctaacttacttatgccacttgtatctggcagttgcatccataaatctgcctcaaacaagtatttttcaagttgaaaggcagtatctttttttggtggtcctagctttaattttttttttgttctcttcctttctatgcattcatttcctataaatacatatacaaacaac

SEQ ID NO: 47355 - DNA, 2975 bp, Homo sapiens
agcagaggtgagactgacttgtacatgacatcttctcaggaatgccaaataggtcattctagacaccagacaattctttgtttggcaagtctgtcctgaaattgtagaatgtctaacacagctggaacctgccctgcaaatgatgggacaacataaaacacccccacaaattctcaaaataccctttagagggcactactgagaagtactgatctagttcaccccattttgcctctgagaacacagaagttcggagaggttaagtgattacaacactcacagcaggaacaggtcacaaaccatgacaaagtgggttccagaaaccagtctcatatcaccacccacacgtacacgcgcacacacacacgcttcctctcccctttcttctactcctggctcagatttttcatctatgtcctctgcaatcatcgccattcaaatttaaccgtctgtgtccctctgaccccacccatcccaggttcttctgaattgtgtgtgccaaccttactctccacggtacatcaagtctcactaatgtggccacaaccttggccttaactcagatcacaaagatctctaacttagcacagcctcctcactgtctctgggaccttccagttccatccctttatgtcagttccttccttcccactcccaactcagcacccaagagaactcattcagcattgctccctcaacattacccattatgtgtaacatgggtcttggttgacacccactgttggctttttccttagtccttactacacagaagtgtgacgtatattaagttccatatctacacaggcttgcaatacttcctactcaccaaacacagtacgattctattcagtgtagttctagttgtttaaacatttttttccaatggctgtccccagtatgctgagctaatgcctaattcaatcaacctataggaaacaactttgcttttataataattaggcaataaataatgaggatgctccttccaataatgtctttgttcatgctctatggctaagaagaatgccctctttctcaaaaaacatatttccttcaaaatctggttcttgttaatatcctcagtaaagctttcaagaccttagcacatattaatctctgaattctcaacttattaacaacgacagactttcagagaagaaagaaatctacagattacctagtcaagtcattttattttacagatggagaaactggaactcagagaagggagcaagcagtctccagtgatataaccagttgtctgcagagaaagctgaaacatgggtctctccacttcctgcccagtttcttttgaatacaccaatgactcatttcatagcatttacagacctttcaaaagatcagaattgtttttctttaaaaatatgcttctgcataaattttagaaagataagtctattatgcttcacaatgtccttcatctagtgcttaaaaatggaaatatttttgtttgctacgtattttcatactacatggaaattaatacaaatatccagttcctatttcccttgttaatttctttctcatttttttttccccaagtcaaaagccatctgcagcttgcttcccaggacaaaatagtcatgccaaaaaaaaaaaaaaagtcttaaatagagtagccaaatcaatgtcccaaatgaaggttaagttgtacagcattttggtttcaaaccaggtttattttaaaagtgttttttctctttataggaaggatagagtaaaggaaatcacatttctaagtgtgcctgcatgccttaactattagtcaacaatgattcatacatttttaagctcttatctgtctcaatgaaacttctcagatctcaactatttatatggtaaatgccttgaatgatcagaatgatcagattcaattatttctattcttttcatgcacttatttttaccatttgcttcttaaattaatgtacatcagttaactctttttaatggtatctgcagaaaagaccacagtcaaaaatccaaaataacaactcatttcaccaactttgaaaatctgatatttctattcttttaggttattttataatatattttaaatacaactgcaatgcagaaaaggaagtagatatattatctcaaatcttctaaactgagtgacaaaatagagaaagtttcaaaagtactggctcaaatttcactgccttaatctctaggcccacagagtaatacatacacacacacatacacacactcctcctctttgaaaaagatagaaactgatttgttttaagcttcttcccaactctacctctccccatcactaaggaaatatattttattatagtattttataaactgtcttaaaatttcaattaacaatttttatctacatgaaaagtattcattaaaattctcattattataaccacctggtattgaagaaacaagtgtaagatgttagcaaggaaggaggcacacaggaagatttgtaatacatgtccacaactttaaaaaagacaccataggctgcctgcctggttccatcattaattgtgaaatcttgaatgtcacttaatctttctggcctccttccttccttgaaaaccaagggagaatatgaacatggtatccgtttaaactttaaaattctatggttctaggacactacaaaaaatgtactgaattatttttctgtgacacgactgattaaacagcttatataaacagtcagctctccacgtccatgagttccacatctgtggattcagccaaccatggatcaaaaatattcaggaaaaataaatatcccacaaagttccaaagagcaaaacttaaatgtgctgtgcactgagtattatgttgaatctatgcaagtaaagtgatgtatgggtagtgtattaggtattataaataatctagagatgatctaaactatacaggaggatgtgcatatgttatactacaccattttatattgggaacttgag

SEQ ID NO: 47356 - DNA, 1707 bp, Homo sapiens
attacttttgcaccaaccaaataatattaactcatatatgggggaatgaaggctcacagaaattacctaacttgccatgtttctatacaaataggaagtgataaaactgcaattcagatacatctcaccctggattctgggtgagagcaggtacaatatactcaagacaggggcacaccaatgcctccacttttgctattggctcaattggtcaaaagctaccttaggagtaattttataagattaggtttactcaaagtaaaaaaaaaaaaaaaaaaaaaaaaaagtatgaaattaatctctactaatctggaaccactgcgtaaaaaagtgaagtcctagaaaataaatacatttttaacagttttttagaagatcaggtttactttggagggattccagcaccttagttgtgttccagaactgtttgtctccaaatttctccaggaaggtcaagagaaaaaaaaatttattctaaagctactgcagggtagcatcaattttctgggttccctgcaaaaaaccacttccattcattctgagttaaaaggaccataactagggagaagccctcctgatgtggcctttaggttcataccagactattagggaaactggttcatgaaaacactcccagcggtaggaatccgggtacaccttgatgcagctgcctttggctgatgcaagagtcctgacagacactgatctggcctgtttcgcttcctggctcttctcatcctgtcttaataattcatttggttttactttcacttacacacaaacacccacaccacaccagtgtatcactaggagttgttattagtatacttaatacaaatgtcaagagcacgtattctgagctcatccaaaaatggaaatgtctttttctgtgaagaaaatatggctaattccacaaatttttctttttctcctaaaagtaacaattagattgtttagatgctgtatactctgtaacatacaaaaccagacctttaaatctcatgtcaaaagcagaaatcaaacacacaaaaatcagtgaatttattagcaggatggcatagtttgcaaattacctgctttccatttttcttctctacatctagttaccgtaaaaacaggcaatgcggcatggtagaaggattctgaacttgaccatcaggagccctggagtctaggtctggctctcccactaaactgtcattgtgctaccatgggcgagggccttaacttctctggccttagtttcttgatatgggaaacaggaggaaagatgaacaaccagcttctaagatgccttgcagactaatcccctcgttggagactagtgatcccacctttgacaatgcttccctactttaacctttcacttgaactgtgaactttcattatcattgcccaacacctccattagagaaaacaatcacttggttacaagactgaccaaacatctgctctaatcttgcaaaaaaagaactgaagaagcaggagaaatggagcactaccaccttttgtgcgaaatgaaacttgtggttatttgatgctgctgacaaaggacattattacactatttggaattacaaattaggctagaggtagtgttagatattaagcaggttctatttcatggtaattaacaaggatagaaaacgacatgctaaatcacatcagaaatgtcttttggctgtttttcttaggtacgccaggaag

SEQ ID NO: 47357 - DNA, 780 bp, Homo sapiens
caagcatatacactgacgactgcagtataacatggcaagtactgttatggaagctcataggaagcacagaaggggaatacttccttagcctggggattttttttttttggtattttggttcccaactagcattggagcacaagcctgaatcaaaatctgcctgctgacttgccagcctttgccacacttgtctacccataaagcagaaccatgtcactctaccttaaaccagtagcttcagtcaaggcactcatcttaggtcccttgggacccctctgccattgaggcactgccaccatcatgaccacgagtggatattgctcctgaccagagaggtaggcactcatacctaccaggtcagatcacacctaccaggtcagagtccttagagagatgaatgccagtctcaattgcaacatattagacattgtatctttgacagctggctgagctcttagagggcaaggcacattgccaggagaatgcctctagcaccagccacactcctgcccctgtgctgcccgccttagagtcccagtatggttcacaggatgttcaaacaagttctctaggaattaacaatccagccactagcccagctcatttgctttctagcatgtgttactaggaacactgaagtgtcatcataaagagagggacgtggtggtaggagcatgagcttgagacccagacagcttctttgcctcctttgtatgactttgggcaagtcaccttaattctctggttccccatctctcccttcttttttattttttccct

SEQ ID NO: 47358 - DNA, 835 bp, Homo sapiens
gggcgtgtgtcgggaggcggcggcggcggtcgcggcggcggcggccgcgccggggcggcgggcttgtggggggagggtgggggcggcgcggggctgcttttcctgcaacttgtttacgcctgccttattctggggaggaaaagaggggtcggggccggggccggcgccggggccaccgcccgcctcgcgccgcgtgtgtgtgcggttccggaataatgggctttgcacactcgcgtcctgggccccgcgggccgtcctcgcgccgcggcggcggggcggggggaagtagaggccggcgggggtggggatcgggaagcgcaggagccgaggcatccgccgcgcgccccgcgagctggtggagtgtgggggccgccgggcggggagaaaaacttgagagccctggaaggggaggagggcacggtggcacgggcggggggagggcgcaacttttggactggtggtaaaactttaattacctttaaagaaaaaaaggccctgcgattcccccctcccccagtcccggtcaaagcacagcccgcagcgcgaccgtgagagaaagtttaaaagcgggcgtgttcctcccgggtccccgcggagggctgggggcgtcggtctgtccgtcgcgctcagagggaggtgggggtaactagccgctttccagggcgcggggaccgcggctctaccccacccttccacgggagacggaggtaaacgttgcttcggtttcccttctgagtccccctgctgccaccaccccgcttccttttcctccccctccccgccgattttttgaggggacccgaaaaacggagtccctttccttaggcaacttcct

SEQ ID NO: 47359 - DNA, 638 bp, Homo sapiens
caacgcctcgcatcccttggcccgcttctccacctcggggccaccgccagaaaaatgcattcgagatcattcagagtgcacagaaacaaaaatagatttttaattgttaggttaggggaaactgagatgagaaataagaatttggggtgggggggcgcggccggggcgagtgcgtccagttctccttttggttttcctagagcgttgtttgtgatgtctttattggtttagggagtccgagaggctctatgctggctatctcggtcgcgtggatttttgcgcaagtttttagaaaaacactgactcgagtagagagcatttctccggaaagtttcaagtgcagcaaaatagcgaacgtgcaaaactggccaaggggagacctctagtggttgaacgcgtcttttaagttcggaaggccgagagcaaagtttggcctttactcgtagctacgtagtccgttcagacgtggaagtaattagaggacctgagcgagcagccagatgttgtgtgaaaggatgctgatcagaaattgaaagtttagtaaatcgaagcaatgaattctgaggactcagaccctgtaacttccatccgacatgagttatatgggaaagacactttgcttttattcagagatttga

SEQ ID NO: 47360 - DNA, 577 bp, Homo sapiens
ttgttcaaaatcgggttcttcctgtaaatccgtctgcctaagtatagatgagaactctttggagagcaatacttcagtctgctgcttttgtataaccttgccctgcctccttttcccagtaaccccaaacctattccaggaccacttctgttgtcccatgaaacatggttgcgcaagcaccgatctgggaaaccaactacccccatctctcatttctaatttgcttttgctctgatcctatctctggaaccttgaaccggtctgtggccctttagactttgtgtttgcacttgatcgttcaggtatttgaacttcacatctccccaacaggccattgctgggcttacctctcaaatgtttggtattctaggctgtcttgaatagaaattcttgctccattatttaggcctcctggaatctagtcccttttagtggctgcttgacaagtatcctagccaagcctgccctagctcatcctcagtggtgagattgggacaatctgcctgtcattggaaaaatacttagattttagttgggttgggtttaattaagtgtaatgtgccaacacctctgagtt

SEQ ID NO: 47361 - DNA, 421 bp, Homo sapiens
caagtaacccctcttaattttagtttcttcaactataaaacggaacaataagatctgtcctatcaactgcactagccttttgggagagtgagtagctactcatagaagatatttgtaaactaaagtgctgtttgtaaagtccttcaacagccctagtaagaaaggcagtggttgagggttggagtatggcttcagcactgattaagctcccaggtatgcatgagtcagaggtgccttatcacctcccataggcttgcttgtgagcctggactttaccattgctgttttaccacagaacagacaaaaagaatggcttgtatttttcttagccatgaaatatgaactaaagcaagtatagtacattttttttccatatgtttcctgtagctctgaagggtttctaaatgtgctgaacctggtg

SEQ ID NO: 47362 - DNA, 600 bp, Homo sapiens
gtttttgtataagcagatagatgctggtctgagagggtttagcatctatagaatttgagacagttgttttagaaccaaagattgtaaaaaaccagtttgtgtatagccagttaagacctgtgctttcataatatcttttgacatagatgtatgtggccaaacatgagccagaagagtttcatctcacaggtagtctgagggcctcccatcaaatattttaaacttaagtttttaaagaacacccatcattggttaaatgtagataccatataatcctggaaggtttctctcacattctgatgcacatttggcctctctgaacaaacaagcttttgtttgacctttactttatttgtttgggtttgtttggtttagctctgttagtcttgactaaatcagaaactggtgtgcatgactaagaaattcctggggtatgagggacagcttctctctccaggaagttataataatcttggaaggtttttagatgcctataaattctggagagagtcgaggtcctcattgtatctcaacctcctcaatttggcaagttcatagaattctattctattctattctattctattctattctattcta

SEQ ID NO: 47363 - DNA, 874 bp, Homo sapiens
acaataactattacctgctagtgcttgttgtctgtctacctccctggaatgtaaactccataaggataaggaccttgtcttatagaaggatatgttcacagcccccagatcagggcctctggggcacatgttaagccttcagtaaatatttgttaccagcaaatatgaataatgaaagctcgtgggccttttctcaaagctcacaatgctaagattatctttttgttattgaatgagcacctcattacctaacattgccacatgatttcagagcccttatttttgtgtttagtactgctgccaagtgatagtacctagttgacataggctaatgagcaaagttcagaggggcagttaacagccagaggaatatcggctttcatattcagaatctgagttcacattggaacagtcagtactacatttaagtcgtgagtgatgcttcatttcaataaaacatcacctatataattaaatcaaaccacttcatttgaaatcatgagctttgtagttttgcttgtattggttgtacagtagtacataatttgatattccaggtatcagtcaatggctctttgacaccttctgctgatgaacttcagaacttgtgttgctcaacagtatgtctttgcaatgtgtaattctttatggctcagtcaaacaaatgcagaaaccataacagaagcctggtgggtttggcattaccttcaataggtcacaattcgcgatgttagtggccagcagtcactaagaggccagtataataggtggtaagacagtagtccccaagtaatattctcctgaaaatcaacttttacaattacttgtgccttatatcatcatgtaaatcaacactgggagcaatcactactaa

SEQ ID NO: 47364 - DNA, 2616 bp, Homo sapiens
cctcatgcagccagcaaggacgaatgtacctcaggaagaaggagatggggctacatcatgggccactccgccacggacactgtggccattctctgtttgtctatctccactcttaaaggccaggggccatgacttactcttctttgtatacccagcatctagttcagaagttgggttctagtagaattaaatgtttgttgaataaatgaataaaccaatgcacttctcagagaagtattctgagtaggatatatgaggaagaatttctacttgtgggaaaagccttgtttctctttccttggtattaattgtatcaactatgtataaaggaacattcacttttttctagacataagtacttaggtacagtggcataactattaagaaatttttaactctaaaatttaggaaatacagggaaaactcttctgtgtctgagaatacatagaaagaatatacataacaacaagttttgcttggttgggtaattttcattccaaataaacttatcacaaaaaaactcagcttcccaaggtcattcccccgctgccagatacatacttatctctgaaagagcttggaagatggacctttcaattcctctacaattagtagctgagttacagagtaacctgccagcaatcctatcagcattcatcagactatttaaatagagcaaagtccacaaaaaattccactgagacatgctgagcaaaggccggagccccagaagaaaacaagtacagactcagaggaaagctgccctggtcctgagtgtgactcccatggtccccgtggggtctgtgtggttggcaatgagctctgtgctgtcagctttcatgagggagctccctggctggttcctgttctttggggtcttcctccccgtgactttgctgctgctcctcctcatcgcctacttcaggatcaaactgattgagggtaagtgtgaggccacacaaggaagaacttgggcatcctttcccacagcacatcttgaaatataccgatgcactgtcagtgttttctggccaggagaaacatatatatatatattttgtaggtacttctcaatcagtgttctctcaagttccttgatcaatttggccaagtttgatcctttccactgtgtggatcttgtgctgagatgtgaaggtctgctgtagggggccctcacgtgtagcacctcacagacatactgtgaatcagcaattttgacatatggttgcttgtctctctctctcaaggcaatagagtcacatatgtgaaaacattgttcatggtctgccttctttacatgacagatgtgtttatgtggccatgtgtgtgcatgtccgtgcgtgtgtatgcgcccgtgtgtgcacacacacaactttctcatccactgaacttctggtcagggaatgttccaaacattctgctgtcacagtctttgtaaatgtaaagccctgatagataaatacttgaccttggtgtaaacgttccatgggattatagtcttaaggtggaaaaaaaccaaaccaaacaaataactcaggaagcttaaggtgatttggaatggacattcgggtcttggattgacactgtttattctgctataattaaaattaatgaaactgggctgtaactagatagactatgtgttaatactgtgccaagtacacatgagattaatatcatcaaggttaataactattttagcaaaatcaacaaagaccagtcatatttcttaatttggatagtgtcatattaaaacaaatttgaaaaaccctcctctttgaacatctgtttatgtaataacatacatgaaggcatttcttggacttgccaagcttttgtggtaatcttagatcactaatgctataatatataacctaacagaagtgcaatgagggatatttcttcctaagatgagatttggaacataaagaaatcctaggagacacagacagtatgtcatggaatcaagtttttcatcacaacttactcaaatatgcccctagcctttcatttttcgtgtgtctcatttttatgaacagcccttttgctgaggggtcaagccatattctgcctcactctataatattcatgtgataaatccttttctttgttaagtcagtttatcctccactgccctaagaccagtctgttggatgctcttgtcacccagccattcattaccactgaaccccggaagtagcctccaaaaaggaagagaaaataagaaatccccaagatcataaccatggcttcccttcagtgtcttccaagtcgaaatgtttttcagagttgttgcaaagattcccatccgtaacactcactgcatctcagcctcccattgacattgaacgtcccagggacaataaaacgatgctgatgtcatcatcggggacttggagacttcctgtagtttccaagtttcatctctggctggatgaaattttcagtatttcaaaaactgcagcaagtacaggtctagatagcctcatggatatcaagatcccttattggcctctacttcacagctattacaggccagttaattcagtgggacatctggtatttgggatagactctgcaaaaagagggtgaatctgttttatagttttactcatt

SEQ ID NO: 47365 - DNA, 600 bp, Homo sapiens
agcaagccttggggaatgagtgactactgcctggtcttaatgtacgcattagagcagtggtacccagcacctcttgtgtggggggagttcaaatagattgtaactgactcattgataacacctggtagatttagcaatgttaaatgagaacattccacagcatttcagagtgaaaactggctatgcctaaaactcactaaaccaaaactagctttttatttctatgcagaagtcagtcctcatctgaggtgtgattaatctatattgaaaatgaagcagtaataagatgctaattttaggtatgagactaacacaactaggcaaacagaataaaataaaaatgcaacacacctgatatgcctgcagaactgaaatagtcatctggaagtcaataggtttgttctctttgaaggtcaggggtgacactcatcagggcccacatgtaaatgagtggctcatgattagctagagctcagttcagccaacagggttcttttctctcatcaagtcagctaggcagctaatgttaatttcctgtttggcttatgagttcatgttttgaaaccctgcacatcaccctgactttgaaacaaacacaag

SEQ ID NO: 47366 - DNA, 1756 bp, Homo sapiens
aatgaacaaataaatgaatggatgagtgaaaggatgagcagccactcctctgtcgtttcatccttcaggtgctcactgattttggatgaacaggaggcttcattcacttttttacctgacatcaattattactctaagagtcagagaggctcctgtgaagtctgggttgggagagctccctctcctgtggctcattctttctgagaccacacagatcacaccaccaagcctggaacccttcttcctcctgatcgggaccgtttgggaataccactgcagtggtgataaggtcagcaatatttttcatccatgtgagggctcataaatatgcatttgggctaagccggcaggagggagtagtccttgaaaggacattaaaaagttacaaagatttagtgaagtcctcatctgaagtgtgttttctttttaacggggtttgcatttagctcctctctgcctcacagctggctgccatccactgagaaaggtggacttgggaggttcgtcctctgcaggttgttcttttaccatctttctgtttgctctcccctccccctactttcaacacttgatcaaaagctcagagctactccaaagggcaagatcaggtcaggaggagagctttatgtgcctgaaaaagggagacggagcagatacattgcagacagttccccttcttttttgacattccgatattgtcctgatcctgctctttgcctcagcccacctgctgcctctgtgggattctggcagggcagccagacagtagctgaagcagtgaaaacacactcttcccagatctgacagtcaccagcaaaggaaattttttaagagtgagctgcagccagtggggggtggagatgccaaaatgactttgagacactgaggtcattcctagtcatccttcagattttaaactcaaacttcgtttctcaagtaaactggtttctaaaggaaattggttaaatttatgatagttcaagtctcctattttgttctctcatagcattttatttccttcagagggctgatcacatttacattttgttcatttgttaatattcacacctaccttcctggagcacatcctctctgccaaggagggggaccatgtttgctttgtctatcacggaatcctcaatacccagccctaccctagcacatttaggcactcattaaatactttttgaatgcatgaatgaatctttccaaatttatctagtttgttcaccttatatgtaagtttatactttaacttcctaaatctgtttaacaaggcttctcataaaagttagcctctgagatgggcaaacttcaaaagttgtgtgtgtgtctgtgtgtgtccattgtaaaaatgaacataaggtgctaggaataagtgatacaatgaattcatttaaaaacttattaaaatgccacaagtgaaggtggagctactggtaacgcttagagtgtcaccaattttttgctagtattcctgattaagaagcaactgattcataaaatttagagaaaaaaacatccagtgctattaccttatgtttgtataacactcacttttctcattcattatcttattctatccttagaataagtcctatgagttaggaaaggtagatcataccattcactgacttgcctaatgtcaatatagttggatatctggcaagatgaaaacatagccttcagccttctgactcctaagtaagaatgcttttagccttccctatttaaaaccattaggagccaggcgtgg

SEQ ID NO: 47367 - DNA, 1042 bp, Homo sapiens
tattacctcccctcccccaataatcgcaataggagaaaacacctggaagtaaatagctcaacttttctaatgccataaatatacttgaaaagttcctaaaagtaggcataggtcaagcttagtggctttcttcattttttggaaactggtgcattgaactgccattcatttttaaatatttgatcacttgcctttaaaccaggcccacacgaatcttatgttttccagaaatcctccagattacgttgacccaaaagtgcatgtaaagccagtgggaaataaagagaaatctgtgttttattctgattcagaggtaggaaagcttgtatccaggctgtgtctttatgtcctgcttaggaggtggacttcatccaggaggtttggggagaagaggtttacacaggtatgcgacatgatgacaaatgtgaaacttagaaaacaaacagggccatttccaaaactagaacttaacttatttacctggtcatgatcaatatctccatctcctgtgatcacaatgcgtttctcaattcttgtttcagaaattccaccttttacagtctaaaggtcataaaggagaagaagaaaaaacagcaatcactgaagcacgtttacacagtcagagcaaacagagatgggagtccacctagacctgtggatcattgtaaggccacacacaacaagcagcaaaagactgatattctagaaacactttgtgctttatttttaggctcaatagagaatcctattactaaagttatagcatccacaagtatccctcagctgagagcaaccttaaaactcatttatcaatattcaagatggcatctgtcccatcttaatctcacttgattaagataggacagatattatttaatccaagtagttcctttaagggaattctgttatagtttcccgagtttctttactcctagctggccaatttttaaaaaggagagtagggagaaatcagttacttgcagaattacaagaaattataagaatttaggtatctgtttttggtttgagaaactgtttgatg

SEQ ID NO: 47368 - DNA, 811 bp, Homo sapiens
gcccaacattcagtaagtgttcaaagtatttcaaactggcaattcgtatttaatgcctaacaaaagagtcatgatagtgactactgggagcataaggataaaactgagccacatttattctggggaaaaaacttacaaaactgaaaagagtgaccattttccacattaaactctacattaagaaaagaaaagtcaatttacaaaaccaacatttttttttaagtgtcagacagtgacttcccagaggcttagaaacatgatataagtattatgttattccattagaaaacggttcttcacaaattcagttatacatttaaactctcgatgaaacctcatctgtttacccaaaccagaggaaataaagctgtctgcaggaaacaagacagcagcttattgatccagcattacaaggttgaccttctctcaacagaatgtttagctatgttatgttggaataaaaggcaaaggttaggacgcaaaccccttctcacttcctctgggtatggactttgtaactgtaaaatacgtgggaactcctacatttccaaatttccaatcctttaatccatggcccaggaaactatcagaataggaagaaagtaatgaagatgctgtttaacacaaaatttaacaacacgcaaacccttgaaatattttgttccaaaaataaccaaatagcgaaacagttttataggtagtaaaagatcacagaccagaggccttagagatcatctaactttaccctgtttttccatttgctgaattagggcctcagtatcaaggtttcaccgtgctctgtagcactttc

SEQ ID NO: 47369 - DNA, 1897 bp, Homo sapiens
ctcaccaaacctcattttatttatacatatatataaaaaaaaaaacttgacctcaggggaggtgagcgatctagagaagcataactgatgtcccaccacagacctcaggctgctgggggcagcgtctgcgcctggggatggcgtccccagacgccgacttcaaccctgtcgcgctcctttaggttctcctcgcccttccccgctgctcacctaaaaatgctcccaaccctcggcccccaggcgcaggaggagaaaaaacaagccatctgtggtgagatggcctgggtgtgggaattgtaaggatcggagcacgaaacacgcgtccctctccgcagctcccagacggcgcaggcggcagctgggggcgcggacgcgagcctacagcgggcccgacccgcaccgcgcgtggggctggcgcgccgccctcgcccggcttcccgcagtccccacgcgcgcggccggcccgcgcttcccctcctaaaaccttcctcctgaagggcgacgccgcggccgaccccctccccgcgggggggatggagccggatttttcccgctgttgctccacggggcccggacgcgtgacctgagcccacggcaccccgggggggacggcgtcctccccgtgcccccgcctttcctggctccgccgggacgcggccccggtcccccggaagagggaagagggggaccgcggggagcagcgaagccgggatccggcccggagcaacaggacccggacccccgggcaagaatcgggtcgggcagagaccgggaaggaaaggagagagggagccgcagaaaatcccaaagccgggccccctctccccgccccccatcccggtgggaccgtcccgccaccgcttcctgcccggaatcagcttcccagctgcagccagaggaaaaatctgagccgcccctgcaaccccacactgaccagtcgcccggcccgtgcagccccgcacgcctccttaccccgacgccgtacctcaggagctcgctcgccgcgggacccgtccctcttcagtcccagccgccggcagccgcgcctgcctcctccctccgctaggtttcaaattgaaattccctgactggggccgtcagaggactctgagggccggccccgccccctcgcggcggaagcccctcccgcgaccccgccggacgagcccccggcgcggaaacccccgcgggcggtcccgcccccgacgcccaggccccgcccctgcgcgggcgggggacctttcccgcgggattcggcaagcgcggccgcggagacccgggggtggaggacgtctttcgccctcagggcagcccggatgacagctaatgcgcctgggcaaggcgttctcaactgcgattcccggccttaaatgtcctctcaacttttaaaagttatttattcaaagtgcatttgctgactaaaccttcactgagcgccttcctagaggtaaacactggagcagagcctggagatgcagaataaggaaaactgggtctccctcagtctagagtggaaaaagtgctttcacaggaagggcattgaaaaggaaccatttattcttcctgtgggagggacaggaggggttggggaaaccccgtggaggaaaggcctccccagagtaagtaggatttctctgggcagaggcctgggaatctggattgcagagcatgaccacgggtgaagaagagtctggaaaaaacctagtttggggctaaattgtggaaagccacaagcacacacacgctacccttctggttcttttcttttgtacaatgaggtcaatatgtttcagattcaatatatttcatcttttgaaggtttgcacgtcaagctggtgtcaaacaacgtgtccagctcactgcctccagcatctgcctcacacgcacctcttatccc

SEQ ID NO: 47370 - DNA, 2310 bp, Homo sapiens
attataatttctgagaatatggtaccatggaaaaagacttcatgtgagagagaggcagaaagagagaaatgaaggtacaagaaacagattaggctgggtgcggtggctcaagcctgtaatcccagcactttgggaggccgaggtgggcggatcacgaggtcaagagattgagaccatcctggctaacacgatgaaaccccgactctactaaaaatacaaaaatttagccaggcatggtggcgggcgcctgtagtcccagctacttgggaggctgaggcaggagaatggcgtgaacccaggaggtggagcttgcgctgagcagagattgcgccaccgcactacagtctgggagacagagtgatactccgtctcaaaaaaaaaaaaaaaaaaaagaaaagaaacagattaatcacgttaatagcaagcaaagaaagagaggtattatccaaatttgaaaggagtaaaattttgcataagttgacagtcagacaggaaaaagggagctggtaacagttaatctacaggaaggccttttcacctagaattatcttaaaacatgcagtccttactgccactaaaagactaattatgtgatttccttcaatctgaacaaatccttttttatactgctctttatggcagactatagtgtgagtcagaaattccaaaagcatgataatctccatcctttacagcacctgtcccaacgttatgttaatcattagttgataatctttaaagctgagggctacacaccctctactattgtatctacaactctggagttatgataccagattaagttgatcagatcatcattacttttattattttcaaacattaatttcgatgtcaaaaaatttagaaaagtaaattccaaaccgaaagcactgtttttttttcttttaaagggcttaaacatacttactgttatttaaatatttatcacactgaaaaatgtcctgcaagtacatcgttttatagtgacttcagactgatgatacattccaaaaacattcattaaatgaggtttctctttcactgttaccaacttaccttttactctcagtggtatgataaccctcagaactacagaacagcttcaatcttcgttcagaactatcatacctgaaaagaggaggttttgttttattgtggtaaaatatacataaaataaaatttaccattctaactgtacaattcagtggcattaagtattaggttggtgccaaggtaattgtggattttgccattgaaagtaatgtaatactttctgctatttttctatcatcactaacagaaactctgtactcactaaacaccaactgtccattatcccatccactccctattacccaccagctcctggtaacctctaatctactttctgtttctatgaatttgcctattccgggtacctcatataagtggagtggaatcatacaatatttgtccttttgtatctggcttatttcgctcagcacaatgtttcaaggttgatgaatgctgtagatgtatcagaatttccttctgttttaaggttgagcaatattctattgtatgtatgtactacattttggttatcctttcatccatcgatggacatttggatttctcccaccttctggttactgtacaaaatgcttcactgaacattggtgtacaatgtttttttttcaatgttatcgtacttactttctcctgagtgattggaagaacttttacaattaaccgttgcctggactcttgataaatccagccccaaattacttaagagtatttagtaagtcattttcaaaggtcactgtttgtcaagtaggaaaactcgcagtgagcagtgagcagtttgtataggcccacacagggcagtgacctatattctgagcctgcacgttagaattaaaaccttctgagtcttcaatccctgcaccagaacaactatatcagactttggatgtgggatcagaccttgttatttttccaaacctcccctgctgattctgttatgcagccaggatctagaacctctgacgtgggcaaatgtggtatcagtcatcagagctgcaagtaaaaccactgaggccctcagagaactaagagggaatcttttttacagcctgtattgtacatataatattagcgtggctaacctataattggccatatgttcaataattaattgaacatataattgataattggtaatatcactgagattgtccaaggatataactaaagggattcatttccctgattatgactaccaacaccaagattggatcagagcactaaaggatgcatagtggctcc

SEQ ID NO: 47371 - DNA, 646 bp, Homo sapiens
cttagggttccaggcacttgaaactgctttctaatgaagataataattcatatgtgtcactagaattggttttgacaaggccactcaaaatctattagataggaaatggttttactaaagttgttttataatctacaaatcaagtacatagtgtatgtaaaataaatgtttatcagataaattaatgagtgaataactctggcaaatctggtagtgtgtgacctcagcaagaagccaaggaaaagcatacttgtttctgcctcacatttgcacagagcttgatgacacatacttcaaaaagcatattcttatctgagattacaaagtctttcacaatgactgtataggagataaagtggagggaaaaacaccctcttcctagagggagtatcatagaataacagaactggaagggaaacatttcatgcagctgctgactttaagcaggactacgctggaatcattcccaaaagataagtttgctctttaatagtaataattaggccaggtgcagtggctcatgcctgtaatcccagcactttgggaggctgaggtgggtggatcatctgaggtcaggggttcaagactagcctggccaacatggtaaagcccccgttctactaaaaatacaaaaattagctgggcg

SEQ ID NO: 47372 - DNA, 808 bp, Homo sapiens
tattaaataggtgtagtgctttcttaaaaatattatactcaaacattaattgaaaagcttacatgttaaacacatattcttcttccagcaaaatgaaatgtcaccccgagttaccttgggtcaccaagggtcccagttagctttgtactgatatttggccgtgtcttgtagaactgcatgatgtcatccttttttgtaaccatttgcaactttagtttctatggggaccaaggaacatcctagggcaagaattaaaacagagtcaattgttttggtagaaattcactaggtcaggaccgtatcacagaagagaaatgagggacctgaagagagaactcaccataaagaaaggagtcgggcagggtgaatgagtcaatttagtagtagttcctgaaagtcagaaatgggtcatgtttcaggaacagtgtggcaatctgaacctgaacacttcccatccaattatttcagcaatcattgtaccttgccctctgggggaaatggggcagtgtctgtaaagaaacttgctgtatctcaaggaattctgtaattcttataggtcccaaaaatcttctgtgatgcagctcaacctgctctactcttagcagagtgtaatgtgtagggagaagttgttcttttctctttttttgagatggagtttcactcttgttgcccaggcacaatcttggctcactgcacctctgcaacctctgcctcctgagttcgagcgattctctgctccagcctcctgagtagctggaattacaggcatgtgccgccacgcctggctaattttgtattgttagtagag

SEQ ID NO: 47373 - DNA, 2094 bp, Homo sapiens
tgtttctttctctgctattatatgatcagctccataagtaaaagacctgtcttacctgcacatcctcagcacagagctcaagcattaaataaatattaggggaactggttgtactttcctaccagcccataaatgggcatcagaaactcaacgtgttagaattatttgaaaatcagagtaactagtttgccgacttctagtgtgcagcctttacgccagctgttgtggctgtgtaggggtcttcttttcttccatccctattctacgatgcattcaacataagcgaagtgttattattcacgaaaggcgctaatttgtggacggatgcacctaatgttcttaacccctggtttcttcgcactaaaaccaatcccaatagcattccgtttcaagtgaaaggtttttatttttttaaactaagtaaatttctttttctcccaatttactcactgcagtaccttatactacaagaaccagcaactggtttcctcttaatgtctaaacataacatcattgttaaaaattagagactttgtcacaatttgcagtttttaaaagtaaggtaaataaagtatctcattatacagaagtacaaggtctcgttcttgtacatttcgctcttcccaaatattctgcaatcagaaccctgattgcaaaactaagcacatggattctcaaaagacaccaggccagagaattctttcatcctagtcccaatctcgcccttgaaagcgtgggaggggcaaggctgcgccacgggaaataaatgagggctgccaaaggccgtcggaggccgcggggctcggcaggcaggcgaagacccagcgtcgcattgcagagtcgagacgacctgggctgccgtgacgccgcagtcgccggccctagtttcccccgccctgcccgagcgcgtccgcgcctctcgcccgaatccgggtaccaccggcgactcgggtcggccccttctggcttgttccggcgtccggcctggcatgcgggtgctgcggctgctgcggctgccgccgccgctgctgccgctgccgcgggggctgcggcttgggaagctccgcgcttccgcaggcctggcctccgccgcccgggcccccgcagcctgtcgctggaccccgcgccggcccagcgcaccgccctcaggccccgagccccgccctggcctccgcctcggcctcgcctccagccccgggacgcggcccgccaccgccgctgccgccagcccagacgcgccgcccgcatgcgccgcgaccatggagcgccccgaagcgggtgagaccgggctgtccagcgggccggggcgggggcgacaggagccgcgggggcctgggcctgctctgcgctcgaactttgggagggcctgacccgcgccggcccttctccgagtctccctccttcccaaaaggactcagggtagcaccgagaagcccggtgcaaccggggtgtacatcagtgctgcctgtagcgaagcgttttaatgcacgcattgtgggtccgacaggaggcgggggtatgagcccatccccgagtttcacttttctttctccctttctcatcctgtgaccctttgcacaaagttcatgccagtacacattccttccgacggtgttgatgtgggtaaatgtaaacaaaacctagtaaaatttcgattttatcttatatcacaaatattaagcacccgaaccaccatactgtctcatttaggattttctgccaggtttggacatgaccgcttttaaaactggcgccaagtctacactagcgcccggaatgaatttccagtttaggtcagcgtttgttgtgaactgaactttgtgatagagcgagttaggggtggactttcggtaaaagggtccgcaaaccaattagagaaaaggtgctcctctgcaagagtttcataggataaactcatagaagagtataaaaagcataaaaacgttaaagtgtactatataaatagcagttaatcgtgtgaatatgttgacaattgttaagtgaatgatgacagtgagtttttgcatttaggaaatgcatgggaatggaaattgttaaggagaaaagagccatactccagttccttgtttaagt

SEQ ID NO: 47374 - DNA, 1151 bp, Homo sapiens
tttatagctacttatatgacagcaataaactattggaaaacatagcagaaatcaaatccaggaatgccaagcttactatcagtaggacagataatttctttgtcttatatgaagcctgtttatattttcatcatggacattgtgattgctataacaagtaacaataagaagttatcttctattacaaaaatgtttcgaccttcttaatattgatttccattctgaccacaaaaggtttgtcatagaaattaaagatgaataagtgtatcttattttttagaatcttaaatgattttcactttgagattagcaaatgtgaatttccatgttttgtgaccgtctgtctacttcctgtattaaaaatagagtcagaggcatagtaatgtaagtctgagccctctttggtacatattaaattatgcacatcatttagctaaatgtaaatgatatggtgagtgcctcctgagtaaataatttccattacttatcagattgagccatcagatgattctaaaaatactcgtcatgcattcaatggcattttctctggagtggactgtttgagtgccaagttacaaccaagaatgaaattcctgtttcccggtacattgtatcaaaggttatcaagtgtatttgaacatcgctgataatttttcctaaactgtgactgaaactaggctaaagataagttaaaacttcagtcatttctaatgattaattaagatagtcttgaaaacttttttctgtttgacgtttcttaccactattttattgtttcaaagtctgatattccatacttaacctcctattttctcttctaatgttacgttgcataattgaaatgtcacttatactggatacaattataaatatgaagctcttaaaaatatgcctcctccttgttaggtttaaggcaaaaataaccttctaaggactagaccatcaacaatcatattcaaaactccagggttgcaacacccatagcatgatttgttaaagatacctcacatatttttcttctacatgtgaaataatcctaactcttagcctttatagatcaaatttaacaattttcatgatatcttttgaactctcctaacattgtatacctccattgatagttaagtaatagtgccttgggtctggcctat

SEQ ID NO: 47375 - DNA, 1898 bp, Homo sapiens
tgagagaagaacagaaattcacatataaatgggaaacatccggcattggtaggtagagcttgtctagattgggactaatgaactacttttcaatctgaagccttcaggaatagacaggctcctgcttctgcaaataccaaatgaaaagccaacccactgttcttgaatttatagatccaatttacacttgctctttttaaccaatggaactagccggcccctgcatgccaagtttctatggcaatgtgatctcagtgacctctcttctctattgtggaatgtaggtgaaaagaacggaggggagcccgatgacgctgaactagtaaggctcagtaagaggctggtggagaacgcggtgctcaaggctgtccagcagtatctggaggaaacacagaataaaaacaagccgggggaggggagctctgtgaaaaccgaagcagctgatcagaatggcaatgacaatgagaacaacaggaaatgagcccggaacgcaggcccccatgtctctgtgcaaagcctccctgcttccctctgctgagtctagggactgacttgcagcgtgctgtttaagttaagtttctctggtgcaatctgtgaagattgcctaatacttttcatgatcgatgtgttcgcattgctgaaacacaacagaagaaaaatggagtgctgggactggcagaggaaattaattgatgaaagaagaatggcccaagtttcattcgccctcagccacgcacaagggaaagggaactttgggttatgcctcctggacgcaaattaaaggccgagaaagaggccttgccatcaatggaatactgccatttatattgcttagcagggcatttgactactttatctgaggccagaactctcacacacagctatcaagtgctaagtttaaaataatcactgttggaattgtcatctgtacaattagtccataatgtttcatgtttgtcctaagtgtgctgttgctatgcagtgtgatctttatttatagtaaattatgtttcatgtaaatgatatatttttggtgaaatgcaaccttttctataaaatgtgggcaacattttaaagtttttttaaaatcctattttgataagtcagtatgccatatttaatgaaatgttattatataatttttttttcttaggcaagaaacctattggaattcgagacttaattaatgaagctttgcatcgagaaacgatgggtctgaagtccaaagtgaaacagataaaggaacttttattaaagcctgagactcaggccagaattaggagggagctttttgaaggaagacttattaacaacagtaattcagcaaatgacgttgatttcagcacaactttgacataagctctacattgcgattgtgacaacatagcttatgaaatcttttcagcttattaagtagctctttggtaaacaccaaagaagtttctgatagtgtctgcacaacagcaaaccaacatttggtgaggaattagcaatttcttgccaaagaaaattgattctgcccaattattttttgagctacacttgtgttttagaatatctgtttctgtaatattgagagttattttatagaaatgatttcttaattagctgttgtgagatatttctcgggtccttgcagaaaaaaacatacagactgtgaacaaatcattcacaaacagaataaaacagagccaacaacagtattttaagggtcacttgcctcctgttgacacaattgttgctaaatcaaaagaagcgttgtccaggtgtgtctacatctagtgttacttttaatgagaatttgaatgtttattgaacaatagtacttgaatgaacatttataaatgtaattattgcgatcactggttaagaatgttttatatatccttataatattt

SEQ ID NO: 47376 - DNA, 1545 bp, Homo sapiens
ctccaggtctacccatttaaatattaaccacatcagaaagatgcctttacagcaaaatgtagatcggggtttgacagaacaactggggaacatagcctcatcaagtcaatagatataattaaccatcgcatatagagaaattaattttacgtttactgaggttgtatgctttttaaatgttcaagataagtttattacatgcaagttttccaaactaggcaactacctgggggcatagtaaactgtccaaaattgagatattaaaataagtgattcattcttgtaaacattacagaatcatgtactattatctttcagaagttcaactgtatggctctgctgacctcaggtaactgtctactgcctgacttacagtgatgtcaaggcctgcagatggggaggcctgcagagcagcctgttgtatgccttgcaaaaatacttggtagacaatttattttttctcatacaaatgcactgaccacttaagttacggtagagccaattttgatgtcttcaggtatgtagggaagcatgtctggagcttgagatgcctggcaatgcatatttacatttactaaatttaaattattaatttatttatgatttaatagcatttgtagatcagtgccctaggcagctctagagccaacttcgcctagaactggctctgttgcaacatatgaggttggcaaatctggctaaaacacatcgaaggtgactatttcccgaggaattctttgtccatgaggggacttccaaaccatgcctgattcacttcacatccacctaagctggaagtcctacactcctggcctgagcagagggaaatgctttggagacagaaatttagacagaggaagccattcggaaggagactccaagaagcaatactttatttttgtcatttagatctagaaaaagccttgacaaatatgaatgaggtaattttaatgaaagtttgtggtgacaaaaaataatgagaaaacccaaatcatgaaagaatataaatgaatcaattttatatggcacagatcagagtgttttcatagtcatttaatagaattgggagctgttttagagtcaactaatccaggctccttgttctgagcctagagaggggctgtgcttgacaattaattaattgattgctaaacagtggccaaaccaaaacaaagaccaggtgtcacagcttccagcccagggctttttctaccatatgtcatgtgaaattattctttagttctattcttttagagaattcctttaagactcagctttataaaaatgcaacttggcttcaaattataaaacttttgggccaggcgcgatggctcatgcctgcaatcccagcactttggtaagcagaggcaggtgaatcacttgaggccaggagttccagaccagcctggccaacatgatgaaagccgacctccactaaaaatacaaatcaattagccaggcgtggtggcgtgccctgtactcctagctaccagggagaggcaggggaattgcttgaacccaggaggcggaggttgcagtgagccg

SEQ ID NO: 47377 - DNA, 2101 bp, Homo sapiens
ggcccacacactttgggaggttgaggtgggaggattgcttgagccaaggagtttgagaccagcttgggcaacaaaacaagactccatctctacaaaaataaaaatgaaaaaattagttgggtatagtggtgcatgcctgtcatcccagatactcggaaggctgaggtggcagggtcacttgagcccagaagattggctgtaatgagccatgattgtaccactgcactccagcctgggtgacagaaccagatcccatttcattaaaaaaaaaaaaaaaaaaaaaaaagttgttcactgtcttcctcttggggggcctagtcccttccctttcttggcccagccttagccctactccaggttcagtcggcagttcaggggtgcttggctagtgggtggttgtaggtgtggaagcctgtgagggagtcggtggagaaagaagggggcaaagtcctggcctctggcaaagtccatatttgcttcattctctgtagaattcagttaattatcagtataattaccatgataatcaaggccttcaaaaacttcagttaatccttagaaactatcccatctgtttactccagtatgctaggcaaagtctatcatttttaacgtgtgccatggcaagaaaaagttttgggaatcattgaagtacctattcagaaggacttccttagctctcagagagctaggtgcagtgcgagtttaaaatgcaggctcctggctgggtgtggtggctcatgcctgtaatcctagcactttgggagtccgaggccggtggatcacctgagctcaggagttcgagaccagcctgaccaacatggcaaaacccggtctctactaaaaaaaaaaaaaatacaaaaattagccgggcatggtggcgggtgcctgtaatcccagctacttaggaagctgaggcagcataattgcttgaacctgggaaggcagaggttgcagtgggccgggatggcaccattgtactccagcctgggagacaagagcaaaactccatcttaaaaaataaaataaaataaaataaaatgcaggctcctggctctcatgccagaccaattgcatcaaagtctcatagtttggagacctggaaatctgcatcttaaaaattattacattatagttttttaatattatgaaaaaagtattcctacttttccttcgcagtctagagctcaaaactgaaaacacgggagagtaacaagcaaaaagacttttccttaggggtttctctacatccagtttctaatgggttacttgctcacaagcagcagcagaattactgtctatttcctccccagtccgctggagggcttcgttattttcctgttaaaatccaaaaagatggggactcttatccagaaatgacattttgattatttgactgaatttccccccaaaatcaataccctgggctgtatacatctgcagccttttaatctttttttttctgaaaatcaatatgctgggctcaactagttaaaaaatgagaactgaaacaaacagctggattcatttaagacatttccttttcatttcaacctgaaataaacttttcagcagattgtctttgtggcagttggaggccaacataaatttcaacagtgggttgcttgcctttaagaaaccaagacttcctggtgctcctgccaacaaagccttcctcgggagttggcaggcgctctgcaaagcaccaggctctgtcagtgtgcacagaagggggacgcctgctttcggagaagatgtgaccaattcagatatagcctggcaggaggactctgaggacatggctcacaagttgttacctgatatcatatcctgctactcagcatggccccctgcccaattcctcattgttcctctctattgtatacctcctacttgggcaatagcagagaactaattttttaaagggaaaaaaaaaaaaaggtgagaacatgctgtgaaaatctctattgactgtgcaaaagcagtgtttgtcctcgtttctcaaacctcagcttttgttcaggtttataattttctcagtgggaacaaagctgcctagattgccaaaggatttttgccctgaatccaatgcaggtatgcc

SEQ ID NO: 47378 - DNA, 2537 bp, Homo sapiens
aatttcagttcttttatactttgaaatagctagtttttaaaatagtttctatgtattgatatttgatgagacatcataattacctttaattccttagacatagtttctgttagttctttgaacatatttaaactctttgtctcgtaagtccaacatctgggtttcctcagagacagtctctattggctgtttttcccctttttgggggccatatcgtcatgcttctttgcatgtctcattttttgttgttcttgaaaactggacactttacataataaaatgtagcgactttggtaatcagattccccttctcccagagtggggttgtttgtgactgttattgttgctgctgctgtttgtttgcttagtgtcttttctacataattctataaggtctatattttttgcatgtaactactgaagtctctatagttagcttagtggttgggtaatggttggatagagatttccttaaggaatttgaaccagtaagtcttccaacctttgccaaatggctacggtgtatgttgaggcatgccttcagtgatctggcaggcaatttacaactttgctttaatcttcctaaagatgaactttagcctctctaaaaccaaattttgcacggagcctcaagatcagcctaaggtgagaaactggagccttctcaattctttcctgggcatgcacacaaccctaagcatgcatgtggcctcctagaatctcagaaatatgttggaatttttcaaagccctttatggatatctcactccccagtttttccttttaagatttttggtcagcctcatgctgcctccagcagtggtgatgttaaaccattgctattcattgatttttacaaatgctctggtgaaaaggttgtttgcatggaacatgctctcagtgaggtaaaataaagacaagctttgagaatggagcttttccagggagtttccagagatgtcaaatatgacaattctctggggatggggcttttggggggagctccaaatccattctgcccattgccgtggctgctaggctgctggttttcatagctactatagtgaaaggctataggttttcaaggctaccatggagctatagagcaagggatggggacagggtcactccacaaaggtcactgctcttactgaggttcatctgatgttcttgaataaacactccttagattgttgcaagcctttggttaattgccagaattctgaattttgacaatttttgccagtgatctccttgtttttacaaaggggcagattttgagaagtactaactttaccattttgcaagtgcttctcctagtaagtattttaagctgaatggaaaggaaagcacaacatatcaaatgttttgggattctgctaaagcaataattaggggaaacgttatagcactcaccacctctgttagaaaataagacaggattcaaaaccatgacctcagctctcaccttaaaaaactagaaaaagaagattaatgaaacacaaagtaagcagaagaaagaaaatagtaacaatcagagcagaaatcaatgaaatagaagacagataaacaacacagaaagtaaatgcaacacaaagctggtacattgaggagataaataaaattgatgtacctctagacagattaatcagtacggggttggggtgtgataacacaaatattcaacatcaggaatgaaagaaggggcatcactacacaatctgcacatattaaaagtataataaaggaatattattaacaattttataccaataaatttgacaattcatataaaattaataaatccctggaaagtcagaaactatcaaatgccagtcaagaagtagataaactggatacttccacatctgttaaagaaagtgaattcatagcaaaattttatccacaagaactctgatttttaaaaaaataaatcaaagaagatctaaattaatagagagatattctatgcccatggctgggaagttctgacagtactaagataccagttcttcccaacttgatctataggtttaatgcaatccaaatcaaaatcccagaaagttatttgtggttattgataaactaattataaagtttatctggaaaggcaaaagactcagaatagccaacataatattaaagaaatagaacaaactcagaggactggcattacttgatttcaagattattataaagcacagtagtgaaaacagtgtgatattggcataagaataacaaacagatcaaaaaacagaatagagagctcaggaacagacacacactaatataatcaactgaccctggtcaaaggagcaacgacagttcaattgagaaaaaaaaaaccagtttttttcaacaaatggtgccggaacaactggacatctacatgcaacaaaatgaatccagacacagaccttatacttttcacaaacattagcttaaaatgaatcataggcctaatgtaaaatgcaaaactataaaacctctgggaggtaacataggagtcaatctaggtgaacttgggtctagcaatg

SEQ ID NO: 47379 - DNA, 1418 bp, Homo sapiens
cccactatctgcattatgggagctacgtgagaatgttgttgcttcgtgttatcatcaccattgttacgaataggcaggagcactcctcagccactgctggaatcaagcacttgacaattattgtaggctactggaaggagcaacctctgactccttagagagcatcagtgcacagctgggccccccacacactcagacctgggaggctcagagctcagaatgaagtagaatataggattctgagaagcctggagccctgcatccctctggtgactccaccagtgtccaatgttgaaggagctgaagttagcctggagagattcagaaaaaggggaaaggaagagggtggtcctaggaggcttgagatgcagagagaaaacttggatattcaggcatcgctgaacccctagatgcagatctgggtaaagtctgatgtggcctggacaaggctactaaccagggtcttaattgttccttctcttttgctcttctttagcccacaagtgatcttggatgctttccatggctccttcctcttccactaatcctcccttggagctgcgacgactccaagtacaggattctttgattggctcaatgagtctcattttttttggcttttgtcttttaattcctacttattaatctgtaggatttgaactgttttttattattaacatatacatgtttataaattaaaatgtgtggagattcatactccttccaataacagattggaagctcttatgagacagggaatttgccttctacaggaggtattctattttaagctatgcaaacaggagtattttaaaatgttaactgacatctatgcttctcaattctgatagggggaatggttgagtgtctgtcctcagcgtcataggtgaaaatattaaacagcactagatgttccaaacttgtttgtttttctttcccaagaggactgccttgcatctccctaaccagtttcacctggtggctcaccaaaccataaccttattcaataaatttgccaggaaaatgatgtcacagaagctgaacttaataacctttagaacaaaccaggatttctggcttcactggttggctcaaagtatctggagtacttgttcatgttttcttgactttattctacatttaattttatttaaaacttagtattgactggcaaattaatgaggtttaatgagataacatatgtaaaatatctcatactttacgcagctttgacaccaggcaagctctctcaatatgagctcttcttattacctgatctttggagaagttctcttattttacatcctctgatggaattatgtaccacattatgtgagaaagtaatgtcaaagttgttgaacatgcgtgccgtgtttaacatttttaaggtatcctccctctcttattttccctgcatt

SEQ ID NO: 47380 - DNA, 1297 bp, Homo sapiens
taaattcttcactctgtcaatgaagacaaaaatctaaatgaaaaaaaaatttaattcccataagagtggtttgtaacatttctaggtcatagtccctcccttaagaatctgatgaaagtgaggaactgtcttctgaacgcacattccatgagatgttacaacttcagaagctcaaggactactgagcccatctatggacaccaattaatcaaccctgctatagaagcttgttcttttaaaatgcaaatctagcaatgtttatttagagaatatttttagagcacccatcctatgcaagagctctgttagatgtgcagtagcaatctgtgttttaacaagccctcctggcgattctgatgcacgcttgttagagactcactggcttaagccaaaatacaccatattcaggccttgctcccagaagttcttatttaaagttctgatttatttggtctgatgtggagcccaatcctcggtgttttaaaaacctctccaggaacttcttacatgcaagcattgttgagaccctttggtttaaacactggggatgtgctttctggtttctgatgaacacttatagcccccaaaagaaaaaagtctgtggcccacacctatatatcaatatctatggctcccagcatgcgtggtagcacaatgtgtttagtatgagaggcagcagcacttcaatcatatggcaattaggaggctgtgttctaatatccccttcaccccctagttaatttactcttcaagagcagtagcctcaaatcctgctttctagttaactaatgaacattcatttcttttagagctttttttttcaaatgggaaaggtaagtacaatctttgagttctctatatgaaactggaagataataaatccattctttgggtgaagacttttaacttacaattgctgtccttagcagcaaatagatcaatttttgttactgatcagctgctctgctaacagtttctgtgagacacatctatttcacaactaatggaaaaatcttggctttgaagagtatctaggctttcaattcacacgagaaacaatttttgcaagtcattgccccttggaatatttgtatggagtcactgaagtcagctgaaatagacattgccttattcgatggagcggtctttattaaatgaatatatatatattgcatctatattatacacattatacacattcatcaaatatatattatatatgttcatcaaatacatattatatacattcatcaaatttatattatatattatatatattcatcatctttgaagcttg

SEQ ID NO: 47381 - DNA, 2486 bp, Homo sapiens
ataatttggataacctaaatattattgtttcatgcaactttgtgaataattcatgttatgttagggttttaatgtttctatgaaactgttcattcatggactaggtagaatcctttatgtgcctcacttggaaggggaaaaaaagaacaaaaaaagaaagaaaatcctactgcgggttggcaactctaaaaggattttaatggatttatgaaacccccagatttccttacagccacgagctgtgaatccacacatgccagcaacattgaatacacttttttttctgcctgggcacacttattctagtaaagagagtgtgatgacagaacaccttagacttcaacacgcatctgtgcttaaagaggataaaaaacaaagaacaaaatcaaacaagacaatgtatgagttgaaactactaaggttgattttctccaggtttctcaggatctgggcagcgttttgcttcctcttaatttggaacccttgctgtgtactctgactttttactgcaaaacaaattgagagaggccagaggttagaggcccaaactgcatttggactgtcagtaaatactactttgcttcccctggaaatcctccaaaagtctctcccaaacacagggacattttgctgacacagaaatgttccttttaaaatccacactgttctcacccactcttgaacaggttataataaatatataatttaaaaacctcacaaaagggaagcaagtgtcctccttctaccaccctcctcccattaaaacatggtcatgagaatggagttcattgtctcatgattgtaaggactaagagagagagattttttacactaagtcatagagtagagaggataaaatggccaacatataagtatttgtcctcacctaaaggaggtacaagtttgacaaataagcaaaaggaaaggattagagggcagatgactaaaatgttgagtctgagaaagggcttcatccctgtctcacctccttgaaaggcttgcaaggcagcgaacaaacaataaggtaggtattatttttaccttacagttgggttaaaaaaaagcccagagaggtttggtaatgtgctcaacgtcacacagccttgactgcataattccagacaagataatctgattccaatgcctatgcccttgatttgcactgatgtctcttcagactattcaactccaaaggcgaccttatacttgtggccatttagggattgggcccagcttagaaagtcggtggagctgacaaagcaatttccaaagtgggcagatagagcaagcaagaggaaagcccaatcatgagaagccatttgaataaaacaaataaaaaagaattctagaaaatttaatggctgtgttatagcaaatatagtgtcaactaaggggtctatgagctttgttctaaaatatgaaagggagaagggtaaaaaagccaaggagttttatcaaactgagtattgagtatctactatatgtcagctctacactacaaaatatagtgccccacatgtaaagcaagctggactgaaatctaacaatgaggaaaagacaaaaacagacacaaaactaaaggcaaaacatgaaccaagcagcaccctattggggttgaaagaaggagaaatcatgtttacttgattggggagaggcaggtgtgtcaagcaaaaagggagtaaagaagcaaaatgtgtcaggcagaggatagggcgggtcccttgctgccagggacaggaatttaacatcaaggatttgcctggcacccagggcaagtcttctgttcctttgaatggggaaaaaatacttgcttactttgatgccacagccccaatcctaaagatagacacacgtgtcttttaacacattgtctcatctgacaacatgtaataatcttctgcatctaaaagctctgttggaaattaaaatcagaaagatacagaaaggaactgtgcctttagacctctaattgttcaggggactgaggaagacttgccccttggaggaagagtgttagtttccctaatgtcaaaacggcaagggtagaacttcccatcatactgttaagcaggccaaaacttgaaattactgggttggtctttgtttgtagttttcagctcccagatgatgactttttctgttgcctgctttctccccaagagctctagcttacttatgtgagtacatgcacgtaggtctctttcatgtcacactctttcgatgcttttgcccaatcgttcccttggtttgcagagtttctccatcactctgtcttgttttcctaactacctactcatgtcgcaagactcagcttaaacagcatttatttcttgcagcctttactgacacaccctgtccccaacagtgttaagggcatcctgtttttgttactaggacattttatatcatcactgaagcagctatgtattgaaactggagttaaatgcccatatctcctatcagcttatgagggactcaaagtcaaa

SEQ ID NO: 47382 - DNA, 1383 bp, Homo sapiens
agcatgaaagtaaatgttaaaagaaaaaaaaaaaaaaaaagaagaggccaaaaatcatcagctgaatgtattaaaaatgaagcgctcacctgagaaagaccaccccaaaactgtctgaaggcccccaaacagctaattagttttgttttctcatcttcaggagtatccataaacatgctaaaaaaataaaaattacattatttgtcattcgttttaaaaaggtaattacacacaatcagaatagtggatcttataaccttccaacacgaaactaagtaaaatctgacagacacaatcacataaaaacacaaaactctgccacgcatacactcacccaggaaaagcctcttctataacttccgttttctgtaaaaaaaaaaaaaacaaaatgtaaacaatgttaattttaaaaaggcgcctcccttagccaagtattacaatgtaacacagggcaagtcaccttaatcagctctgaaactatcaatacctgtctggcctgtcactgtatcgatttcaaaggatacaatgaacttgacagcagtttgagaatcactaaacttccccgcatacaacctcggtgtcaaaacaagggaataaaaagggaggcgtgagaggaggttgcccaggccagtttccttggtcggctgcccccgcgtctccccgtccccaagccgtagtcctggatggccggcagctgcactcaccaccacctcttcgaaaatgctctgcagttgcgtctccatctgtactatcacccccgcctttccagggtgcccggcaaggcccggatcagactcgagctctgggaatataggggcagaggggcggagacctctggaggaaaccgtagctcctcggcgtcgcttcctcccccagcgctttacctggagcgttccctcccgagcccagccaacagcaggaacctgtacggaagacgggaagggcccggtacgcgccgtttgcaaaccccgcagaaaccagcggcgccaccagaaggttccgtctgtggagaagggcggcccgcaagccggacgagagcgcccccaaacggaaccttgagcccaaggaccccggaggcatcgtcgaccgcaggccgccacctcccggctggagaaggagttgcttcctgttcggggctaacccgcttgcagactgagaaatgaaaagtttggaacccagaagctgcagcctgcggaaaatgctggagccgcagccgacaccaagttgatgtctgtgagcagctgaccttctggacctccatcagcggcctgcagccaggagctgaagccacagagacggtgtcttctcagctatgataacctcagtgcaaatgtaattgattgacttttgaatgccaaaccaattttgcttctatggtataaa

SEQ ID NO: 47383 - DNA, 489 bp, Homo sapiens
tggaggagagtgaagattagaatagtagagttccttccattatgttccctgaaaagggcaagagggagaggataacccagtatagatagagatctgtgttccctttacttaatctccaaaaatcttctgtttctatgtaaatgagaaatgctggggaaggaagaaatctatatgtaactgaagtggacaaaagttacctattgagaatgtttgtctaagcacaaggctaacattgattttagtcactgtttcctggcaggtggcagtgccaagccacctgcctccagcctcttgctgtttttagcaatgggatttattgaaactgttctcatcctaagtccatagcctgggagaacccctgaggcatgagtgggagctgctctgtcactgctgtcactttccactgagaagtaccttgatctgcctacattctcaaagacatgactgtgctcctgttacttctgttgtcaccttttcttccttgctgct

SEQ ID NO: 47384 - DNA, 700 bp, Homo sapiens
gagggcctgtataaaccaaaactaatttgtaggtaagcatggcttttaaaggaatagaagcccgattcagaaatgtttactgaactggagtaattgagctgactttcccacataggcataccaatttttcttatttccaaaatgaaccagacattttaaagtcctaaggtcccatttatgaaatcagctcctatgtcctttgcacaggtttgtactatgtgatcagtatacttttatatgagattgggtagctacaagtgacattttaggctgcactctatgtgtcctttcagatgacaaagtcctctgtgatgtcagggagcggtttctctctacctctgcctcttagttaaacttttgctcttaagaatagagtacttatttgttttttctcttctgaatcatgactgaccttaactcctcagaacttttacaaacaagaagaattaattaatacaagagtgataattcagagccagtgtttctggcatgctttggggagagatgttttgtgtttgtgtgcatgagaccaagtgtttaaaagctaaatatggccagacatggtggctcacgcctgtaatcccaacactttgggaggccgagacgggtggatcacctgaggtcagaagttcgagaccagcctggccaacatggcaaaaccctgtctctactaaaaatacaaaaatcagccaggcatagt

SEQ ID NO: 47385 - DNA, 1344 bp, Homo sapiens
catgtgaacccacgtattttaagtggacgatttctctctcagagtaccgtaggtagtgggggacggggcgcagagggggagaaacagaaagtcgccttcctccatggttcatttgcatttccatccagaaactcacaggtcgaccccaagactccactctctcccgcctttgagaagccggaccggcatcggcggctgcatccttctcctcctccccgctctattttggggccccatgatctcatgccctctgcagaccacacgctgcaattccagcccagcccgcgccgcgaggccacgcagggcgattcctgcaagtgtcgggagggtggccggggcgcggggaggggacggcttggggggaagtttaagacacgcccacgtaagggacccaaaataaccgacacacagagtgcccgaaatcagacaggaagccaaataatccggggcgttgagtcgctttgccctgactgcgagagccgggtgtagggcggggagccaaggatctgaccgcgaggggcgggcgcggcggggaggggcggggcggggcgggcggcgcggggcctattaaaggcgcggccgggcagcggggccggagcggccggggccacgatggagcgcgacggctgcgcggggggcgggagccgcggcggcgagggcgggcgcgctccccgggagggcccggcggggaacggccgcgatcggggccgcagccacgctgccgaggcgcccggggacccgcaggcggccgcgtccttgctggcccctatggacgtgggggaggagccgctggagaaggcggcgcgcgcccgcactgccaaggaccccaacacctataaagtactctcgctggtaggtccgcggccaggccccggcgcccgggagggctgggagtacggggagggcggcgccgagctcctgcgctctcagcgcagtcagcaccgggcaccggagagaggcatggtccgggagtgcttcttcgcccgcgcgctctcctccgcagcctttgcaagtgccctacacagccgcccctgccaggtaccttgccagggcaggatggttcactctcacttgaattatggatgcctgtgaaagcaggctgttcaaaacggtcatccttagaaatactcgaccccctgccccaggagagtacgggtttttagaggagaaaaatgtcaaacgcgaaagttgttggtcttaagaaggtgcatcaatgtgttgcttcttttagggggctctgggcgcagtatacatgacttcacttgggttaactgattgcagttgaagagttagcggagctctttaagttttattaggaactctacggaacactttttccctttc

SEQ ID NO: 47386 - DNA, 1126 bp, Homo sapiens
gttttttttcatgttgtttaatgacatgcgttaacatttggaagaatgatagaacttagtgaaccaatattttccaaaggatgagtggatgatgttacaaaattatgcattggtataatttccattcaaagtgcaagatagactaatggattttaatgtaacagtatgtaaagttcagtaataccttttccatttttatgccataatttacttctttcaaaagacaaatataagataaaaattaattcaagagcacagatatatgcattctatcgaaatgaatacaatgtgatttataaatgagaacaaattaccaatgaacagtatttcagaagttgaaaaggtgacactaaatgttaaatacacagccttttagttatattcttcagattcagtttttttgtgaatttaatataaagatgagttcattttgcaacctaaaaatacttacttattgaaactatattaatactttaataaactatacaaaaaagataatgagacaaacgtgcatttgtggaactgcatgtcagtcagccagttccctgcagagggaattcccagcattacctcattcatctgtgagaacacagagcagtccctatttagacacacacatttgtctactgctccagcatggccagccccccacttcttgatggtttctttctgctatgaatatgcatgtccagttgtctgcttcatagagcagacatttaccttcctcatccaccagccattggaggaggactggggccacgcaaatgattgattcgaccaattctctggggagagtttcccagtggccctcttccatcatcatatctggaatcagatgagtttccatagcttcttttttttttttttcgcatcttgctgaagcagagttttgaaaagcaaaaccacaaactcagctgttccccataagaaatctgttatcaaagataatctccatggagactgactccagctgtccagcacttgtccatttgcgatgtaaaccatcttgccccccttccctgcttcggagcgactggtcatagtttaagagattactacttttagaattttggtgtggttttaaagaagaatgtccataatcatctgaaaaggcatcttagggttg

SEQ ID NO: 47387 - DNA, 965 bp, Homo sapiens
acttgacacaaaaccaaaacaaaggaatcttataccaacgctttttcaggtgatgtaaaatcaggttaaatgtccttggcccagagtttattccataatacttcatcatccaaacacactagcttcctataaactgccacccagcaccatttcgattataatctctgggatactaggaaacaggtgaatgaaatattcatgtgggaacagtgtggtttaggagcattatgagtagactctgttggtcttatctacttttggattagtcggggaaataagcaggaaacaactctacttggacacgatttatttgaataccttactaatcagcacaaaggaggtaaatgtgaagaatattgacatatataagtatttatacatttgttatctcttagaaactttcaaagaaaaagaatattgagtattatggaatgattcaagcaaaggtcttcagagacagggttcatgtaaagggtctaaacgggaatcacatgaatcatttgctatgtgacctttgaacaattactttctttctttgactttcagtttccttaaccgtaatatgaggagttggattagatgggttccttctagttccaaaatatttgttttgagagcttacaatattttccccattgctataaaaatactatctattgcaaaaaattcagaaaatataaaaaagtataaagaagaaaatgaaaattgcttttgggttttttcccctccaggacttttctatgtgtacatatcacttttaaaaaaaaaaaaacaaagatgagatcactttgtgcatattattctgttgccttttttcatttatattccattatgaaagtttaccattgatagacagctttctaatgtacttttcataagtaggattttgagacttttattttagtatcctcaattcagtaggtaatctttgaaactatttctatgcatactttagacattctcag

SEQ ID NO: 47388 - DNA, 664 bp, Homo sapiens
tatacatgaagaggtgacacatttctaaaattgtgttccctttctaattataagctcatatattaattactaatttttttcataatagtcacccatttttcatctttattaacttagaaaattttacttcttatttaaagccctggagcatactttcaaaaatgattttgaaacatgagtctcttcattaggtcaacatttgtctaagcacgtctgtaaatattctgttacaggaagaggaagagtattgagcaaattctcttcaacaatcagacagctctgctttagggactgatatccttccagttcaggaggaagtgtttccaggtaatttccaatgaactccagatgagtaaggtttgacagctgacccacatgaggggacaaattcatcaagctacttttccccaaaggtaaacattgcagctttttgcactgaaacagcccatctggtagcatctcactgttgttgttggttacagcacagtactgcaaattactcagatactggatttcttctggaatgaaggtcaagtggttatagcttagattcaaataatgtagtttgctgcataggaaaagctgctagggcagattctcaatattaataggaccccaaaagagctgctctaggttagataatgccccagtttatccaggaatg

SEQ ID NO: 47389 - DNA, 759 bp, Homo sapiens
ggattacaggcacccactgccatgcctggctaattttttgtatttttagtagagacagggtttcaccatgttggtcaggctggtcttgaactcctgacctcaggtgatctgcccgcctcagcctcccaaagtgctgggattacatgtgtgagtcaccacacccagccgagtgtgtgtgtgtgtgtgtgtgttttaatgaatactgttctctttattcacagttagcatccacttagacaaaatcttattgttctctttattcacaattagaatccacttagataaaatctattaaactcagcctgctactgattttccccacttaccaaataatagaagaacttggcgtttttttaaatgcacgagattcatgacactgacacaaattagaagcaagtactgtttgacatgatggcatacgtccagcaatttcattaatcattattgtaaaaaaatgggttgatggtggattcttggaaagtcaaacaaaattgctgtgataagtctttgaagcatgtttttgtggactcctgtcttaacattactcattttaaagccaatattcttccttttatgtttatggaaagtgcggtactggcatccatagggcagagattgtttttatccatagaagcaggaatccctttttagggaaagtgcttgtgaccttagcttgcttagagctcatgcagagaggtcctagacgtgctttagcagctgggcttgagcaggtagtgacaagtactaccttatgtgtgg

SEQ ID NO: 47390 - DNA, 1437 bp, Homo sapiens
cctctgagagtattttattgtataagtaaaatatgacttgttcaaccagcttccttaaaatgagcttaggttgttcctagtttttttgttcatttgttttatgaatacagttttgaaataaacaccttggacaactattttggccacttgtgagagtacagttagtactagctttgcatgattctctgacatgcacaaatttcagttaccacagtttaattaaataaaaccagctcccaacaacatagttcaaatttcatttaccaagatatattaactgtgagtaattgcgtaaagtacaaactttgctgctagctcatcagtccacaaatcactgtgcaaatagcaagtgcaagttatggtcagtgaccaattgcatcatttctttcaaaatctgccagtgattagcccataggcatcttttagtcagttcatgcacagacagcaaaagcatgtagttgtgttgttgctttgcctctcagaggtaaacctatatgacgttttcaaaaagtggataattgaaaaagtgaatgaactgatgaagaatgaaagtaaagaaaagaaaggaggtaataatgctggaagtgaaattgaagtcaaagtaaatggagttatggaagaaacagctaaccgtgggaatgctaacactgccatggtgcaatagactccagatatgaagccagaggagtctagtgaagctgaattttttgacataaatgaggagagtggttgtgagaaaaagaatgaagatatcccagagggagtgacactgccacaaaacttcctcttggagacatttcataatgttgaaggtgcaaagcttatgtgaaaacattggaaactgatctaaacttagaaaggaatatggaatatgacaattctccaaggcacagaaaatattctcactctgtattgtgagttatgtgatagatgagaagaaggtaagtactgtttggactattctagataagtttacagataaatacaatttcaattcttcatggtttttttttttttttttttttttttttttccttgagacagagtttcactgtgtcgcccaggctggagtgcagtggtgcgatcttggctcactgcaacctctgcctcagcctcccaagtagctgggattacaggagcctaccactgcacctggctaatttttgtatttttggtagagacggggtttcaccatcttggccaggctggtctttaactcctgacctcgtgatccacctgccttggcctcccagcgtgctgggattataggcatgagccaccgtgcctggccaattcttcatgtttttaatgttttaaattataatacactaaatatagatgttttactatgttttattttcttatacatttataattgacagtaaaacagtttttgttgttgttttggcttgtttttttttttttttttaatttttt

SEQ ID NO: 47391 - DNA, 1295 bp, Homo sapiens
ccacctcagcctctcaaagtgcctggccgtttgtgatgtttttgatagatatttttagagattatctttccatatagttgtgtcagtttacaccaccatcagaagtttaggagaatccattactattctcttctgataccttgttctgcttatttgcccttgttgacttgctcaagctcttcctctgatacctccttattttaaggaatatacacacacacacaaagaaaaacacatgtttttgcatccttaaagaaggctaaccttttgctttctttgcaaaaactcttcctttcttttatccattttattttgaagtaagtaagacctgctgcctcactttccttaccattcacttcctcttaagtctttgcagtcacttgacagtaggcacctcgagagcagaggtcatgtctgttttattactgaatgtccagtacatagtccgtactcaatactcttcatctgaaggaatgaattcttataaaagcctccaccaaccatctacttggtcctattcacccattcctcctgtctctattatctcttcaccttagctttccggaaatactacaccatctttccatacctccacccattgtccattcccgtttgcattttcttggtttcagctaagataggctgttcattatttatctgccaccttccatgtgcctgccttcgtggaacccttctttatgctgccctttctcctagaagtttgctgtgttctgtcctctctttccttcctccagttccacctggcaacatcacgccatcatttcccccccattcagagccatgccaaaagcttgctctaggaaactctttctgatctccctctccctaaccaccccaacctttctccttctttaaacaactgtagaactttgcaggcggtttgtagggcctaccaaatatgggccactgatgtgctgtttttaacttctcctacccaagtagaaaccccttgagctatctcttattttttccttcagtgtataacagtctttgcgcatcattggtactcaattaatattttattgaggtgccctgtaatctgacattccagggagctttcaaggaaactttgtcacactaaaaaaaattgaggattgttttgtgggttattccgctcctttgtcttctaactcacagaagttctgtcatggttcttaggggttgtagggtgtgtccacttattttaaaatgtcaaagaccagaagagtggagaatgggaaagtggcaaagtgttagcactggaaagatgtttagagatcacgtagtccaaccct

SEQ ID NO: 47392 - DNA, 1634 bp, Homo sapiens
ttcagaacacatgtatctaagtttaactgaagtaaacagttacagactttagtgtttacctatgtcatcttttagcatgaagtgattcactcctgagttgacacatacaaattaaaaatgaaaaataacaattttaatccaagcccaacatagtatgcatcatatttttaaaaattattaggtgcatattaatgagctccaagtaatagctattattccaatagacttccctgacccccactccaggtcaggaaagttcgtatttctgacactagaaattattattgttacttcatcttcttaaaattgcctgatttcccagtgtcaaatgagaggtaaattccatggcagtgtctttttgggtcagaacaccattaaagtcaagaactaagattatttcttttttgttgttgttggatgtcccttattttccatgtgttcctttttttctttttttctcattgtcctaattttctagctctccagtgaaacctggcttattcaaggtatctagtaatgaacttcaacagtaaaaaactgtcatgaaaagtactttcctcccatgtctaccatttattcatttagcaaaaatgtgctaatctcaactatatggcatgcacctggctgggttttagggagacagtatgctgggcaaagccagatgtggtcttggtttgccgtctaactgggatattaaccaaataacctagttacgtgtggaattaagtaattgaggggaaggacaaggttttatatgagcttaaaaaaatggaaatcaggcctagctggggagttaggaaagctttttagagggagccagtctggatctaaaggtgaaatgggtgtttcaggtcagggagggaagagctatgccagggagcatgttctgaacaaacccactacttctttacaccaggattgagagtgaggcaggctaggtaatcttttcctttctaaaatattcttaaccacttctaaaaaaaatttttcccacattttgaaattttagggaaccccatgcctgcttaagccaactttttcatagcacaaagtattcagaacaagcctttattctgacttttattttatcacaccatggttatttaagtcttatcagacccagtaacgtttgtaataataatcattaaaaagttatctttctttcctacatcaggagataaaaatcacaaaccaggcacataaggttactttctgtttgtatcactttttgtgtgtatttgtgaaaagatttttgccttactttattaccccatctgtattttctaaagtagtatttgaacctagtgtacacctaacttagttgtattcgttgatgtttactttgaattatataatgattagaaacatctgacttatcgttcaattttttcagttaaaagttgcaaaggtcgctgtttcgagagaacatttgggaactgtcgctgtgatgctgcctgtgttgagcttggaaactgctgtttagattaccaggagacgtgcatagaaccaggtaaggatgagcagggaaaaaagtggagttatggtcattaggaaaagatcaaggaaagttctgtgtctttcaggtatgtgatttacctaattcatttgaattttttttagtttagcatacatac

SEQ ID NO: 47393 - DNA, 1205 bp, Homo sapiens
gctttttgtattttagtggagatggggtttcactgtgttgctcaggctggtcttgatctcctgagctcagacaatccccccgccttggcctcccaaagtgctaggattataggcgagagctgctgtgtgcttcttaagtgaggtaagtaacttccatagaaaatttccatcagttcattcatgaaagaacaaagaacctggcaaaacttaaaaaaacgtttccaagaatcagataaaagaggacaaaccttagggagaagaaggcagctgctcatttccagcaggggaagtagctgcatagagtacaaggactggtaggcctgttggctgttcctgtttaaggagacaagatgggcatggaacagggaccaccccctcctctgggagaagctgttacccccttcacttttcctcctctgtcattacccacaatcactctccttctttgcgctatggtaggtgtttacccatcataggaatgggcatttgaactttgaaactgaatgtggtgattacacttcatgctgaagcttttcacatgagtgctttcataagcattaagtaaaattttataatgactgcagtccaaggacattttccctggtttttggccagtctaaatattgtaagagagagagaagaaaagtgtacggaatataattgtctctaagctaagaaatgtggatgttcaaataaaacatacgtacagaactctggctgctttcctttgtggctttgtgtgtggaggatgggtaggatcatgggcgatggtgcttctctgcagacatgaaactgagtccgagggttgttgacagttaaccacagctgtaatgctgaaaggcaaaagaatccaaagttcatttcaggttcatagagtaaacacttctgatctgtgacctatatccttgttcttggtattttaattatatttagtcatacttccaggtaaaaacaaatgacaggcatatatattctttagtatttagaatggtctggaaccagacttggaacttctatagattcttttaatgtgaaatttttgtatttatcctctccattatagtgattgaacaaaaaaatgtttactagaaatcatattcataccagaaaacagatatgtgaaatacattttaatctactagaaatggaagaatccttggaagaggcattatactcatgggatgtcaaaaggaaggaatataaaa

SEQ ID NO: 47394 - DNA, 1706 bp, Homo sapiens
acttccattcccctagaatctcattcagtgaatcctaaaatgttcaactttaaaggacctcaatcccaaacatcttctctacaaaacgtctggatttctccaatagctagagggagcatttgatttctagcagcacccccaagccaggtctcaataggctccttacgaagccctggggttcagttagaatgccacactgttttttcaaagtcctttattatctccatcggctactattcatacctccggtagaagagtcccattgacaggtgttctggacttcaggcttgaaatattggtgagtgttttctcatcaagggggtcctccatgtaattcggttagctgagcaacttctgcatatgggtggtcactaaactaccatgttagggacagtacaacagaaagactaataacacagatagaaaattgacagactcaaactaaaaaggatgaaagccaactagaaatgttatgagtgaactacgagtatgtgtcatatcatccagggtcccattcctagttgtctttcccactttcttttgctgttcaccaaggccaaacacaggaatgtacattcccagtgctcaggcagagctcctgtcctccctattagttgtcttccaaaggtcacactagaaagcacataacttcttcccccaaatagcaaaagcaagggaagcatggcattggctaatgctccacaagcctcctttctctaaccacatccggctattgatattgaggcatctatgtaaacagagtcctggcaaatagcccagacctcccagggctccttaacataagtacgcaagcttgcctaataatcctgagtttaaaattatgagtgacataagataatcttcacactgggagtcatcggcccaaattacggttaaaggttaaaaacaaacaaataaaatgcaaaaaaaatcacatacaaaccaggcttatgttgtagaaaatatttcctaagcccttggatttaatgtcatttttagagtttgatgatacctccctagagagggtataacaaatactgaacaaggatgacacagatcagaaagaatttagctagggaggaattcagattggggagaaaaataaggagttgggcctattctcatttaaaaataaatccctctggaaagacataaaagaacatttttaaaaagactaaaagaatggcagtttatcttttcatttttaatgctaagtgtttctattttaaagggcttccatcccaagtatatacttggattgaaaaatggaaaacagttaaaaatgaagatttttaagttcaaaatgttgatcaaaatttcctgattcaaattgcttttttgactcttggattacatatggtttgtgttacatgtctgtattttctaaattccaactttttcatggagcacaggagcagttatattggaacactttacatgtttttgtgtattgtttttataaagatgatgatagactgcaggttatttgacaatacaagacaatgaatacaaaatggtcctcaatcagttagattcatgggacttattattatcattctctttatctttattgtatcttggaccaaaaatgtaattactacagtatttatttatagcccagcttttgcagggaagggacctacatgccctaagtgacattcatcaaacctagtttcttgtatgaaagtgagtctacgcagagtaac

SEQ ID NO: 47395 - DNA, 2867 bp, Homo sapiens
acatactccacagaatttagctcggtatgtcttcatgctggtgcagccagaaagctcaaacttgataggcttggagattttgggagtacggatgcactttttgcccttctaaggaagacaagggaaaagagagaggaaaaaaaaaaatcagcgactctacaagaggagtggctttcttcaaccctctgtgttttagtcttctgttgtctgacttctgtttatattttgaggggaggaagtttgagtctcatttgctatgtccaaaaatagccagagcctctcttggaatgtcttgaattaactaaccctgtggaagatttcgtagtggaaaactggtggttgctattacacaagctctcattccagcaaaacagctcaatggttagatagttttggagataacgggcttatactaacaagcgtggcaagagccctaagttgggtcctatccactgtttttcctgtgaaaaatagttaataggagcagaacatgtaccttaatgttctcttccaggtcagcttcgcaaggcctgaccatgcacaggcggctctgcttctctagcctgcaggaggcgttgtcattggtaacccgggtggagatgcccatcccacaggtcttggaacaggcgctccactctgtggtctggaccaggcagttggctctaatcatagttgggtctgggccaaacgtgtcttccagtcggtaagctgcgagagcagagcacacaaacaccatgtaaaacgcctggataaggtatttcccccgttcggtcggcacagttaggactccctccctgggagagaatcacgaccctgacttagaggaagactcgactcacccgcgagggcaggcccaaccacggtttggtccttgggctcgtcacacacccactcctcgcagcatttcccgggcagcttgaccctcctcgggaaggggcagtcagggctgggcagacgaacgtccatgctgcacaggggcatgcagcccaccgccccgtccaggcacgtgcactggtacttgcagctgctctggaaggactctccgctgcggtacaccgtaccaccgaagatgcagggagcaccatctttggctggagaagaggaagggaagagaggggtgggggatgcagaggtcaggcattggggcactctcacatccagagcgtcagggatgcgagttgggatctgggctgcagggggcgggctggcagcagctggagaaagaaactcagtccgagcggtttctttttccagcgggcgggtgggcgtgagggaggaggcggccggacacctagcggtgggggctgcgggtcttaccggtgcacacgccgatcttgcggttggccggggagccgaagtgacagaataggcccttgtgcgggtcgcatgggtcgcgctcggtgcacagctcgcccagctgcttggcgcagacgcggcagcagccgcagccgtccagcacgaggctcacgcccgccgggcagcgcggcgccggctcgtccgggcaccggcacggcccgctgcagttctggccgacggccggctgcagggaggacagggcggtcagcggcgctcggtcggcgcgcacgccctccccggccggccccgagtccctccctggcagccgccggccgcagcgggggctcccggcgcttacccggctgcagagggcgaggaggaccacgaaggcgacgcggacggggcccatactggcggcggtcatggttggcactgcgggcggagcggagggcgcggtggcggcgagcggggagcggcggggcctggagcgctggcggtggtcggaggtggggaccgggacgcgccgggctgtcgtctcggggctgtcggccggggcggctgccgtcgagctggagggtggagtcgcactggctgtctcctctcagcggggaagagttgttgtgtgagtttggggcgggcggcccgaggcttttatacgctccgggcggccgcggctcgccaatgagctgaatggagtcctacacaaacagggacattcctcgcattcctccccaccttcctgcctcatcaactcacaccggattgatcctgaccccttgacactcagcattcctccgtctgaaaaagctggcacactccagctcacagaaaaaaaaaaaaaggaaaaaaaaaagcgcagtatttccagcaccaaatagaatttttttttccctatcctcttcgcaccactcctgattcatatcatttataaacacactggcaattatttcttatttctttttcgaataagtttgccctgttctgtccactgacatacatcctttttaggaagtaggtagctgaagaggcaaacagcaggaattcctaaaaaattcgaaaaggtttctcccccccaacccttagcaatgatttgcgttttagaggctataggctcttgaaactctccaaagagtagaaaaggagtgagttgcttttaaccatttgaaatcctcaagatgcctacctgtaaaaccctgaattctatatttgagatttgatcatttgtcacttgaggtaacggttttgggacaagaaagagaacaaagacgcgtgtgactcaggatgcagtctcctggggcagatttccaaaactcttgcttagttttctcttaatatatgtaggagttttatataggcaaggacaagggaggagtggccatcaatgtttccagaaaaagggatccattgttctatcagagcaaatgattctgtgttgggtaggtaggggctctgggtgtcagggtgggaacactgggatgcaaagggggttcacctaggagcatttaaacacagcttcactagggtctttgagaaatgagtgcattttcttatattaaaacctataatcttca

SEQ ID NO: 47396 - DNA, 1707 bp, Homo sapiens
tctgatgtcagcctcagcccacactgaaagcgttcagtctaaccctatgcagtcttgtttcggctgagactgggaccaaccatagacatcatgaaggtcttcttgaataattgtatcattcactgataagctacccttagggataaatatcatgacagagtctgggacaaaccatcagcactgaagcaatgtctactatcaacataggtttttcacgagtatcccctaataaacatgtcctgccatgttattgatatttattttatgaacttgccttaactgaaaatgcactttcctcaaactgaatatgctttgcctttcaggtttacagctttctccctctctcctttaaccatggaaggatttgattggaatcataactagtttcatgttgttaatggaatgcgatttgtcataactacacatggcagagagagagggttgtctaggaatggtggggttatgatgagggaattttcttattgacctgcacatgtgtgtgaaagttaacaactacaggattacatttcatataaccattgacttgctcatgtctggaaataatatcactattaagctatttctcatatacagatgataaaaacttattttgtccaattgaatcttttgtggcattttcatcatttctaacgtctctatgttggttcttcttgattgtggttttccctgctgtttccgtatttgactgattgctgaggctcctactatttgctttcagctcagaaggtaagcaagcaaacttccagtccagtttcagatggactttgaaccaatgttgctttgcagtagggctgagcactgccacagtcaaatgtatcctccctggttggctttgatcgctttcgaggcaggcccatccctcatgggtcaagctggtttttccttgtcagcttctgaagcctccccgagaggggggacccacagtgtggtgttaccacttttctctcatgtgttctcattttacacactgaagcctggccttcatctaaagtgaactcgagaagtccaaactcctgtatttctcatgcatcatatccaactttccaagaagggaaaatgaccttatgttgagcagaaacggccatctggaagccattttgtctaccgtaagcgccaaggacgaggagaattcttagaccctgcatgtgagggcaggaggccacaaggcagaagccactcaccaaatgtatttatgtcatagctacatcacctggcatcctttactaaagtgttgcagggggtcattttacttggacttccttatttttcctggcattgctggtggtagggaaatactcctgttgtactgtttctggcagcccaatattccaccaagctaggcctagaaaagcaaaggtgcagtgaggtggggaagacactagtacatcatttaaaaaaaaaaaactttggtgtttatgctttgttttcaagatcgtaagaataaaacctgccaaaataaacttggctcatatttaattgattaaacaagatttttaacaattgtagcttgacattctagtgtgaaattttgtcacttaaagtaagctaattttatagtttaaagcatttcataaaattagccaccattttggattgagtgagtcctaatttttatcttgatttagaatgttttagaaatagatatatcatcaaattgatctgaatataaaatttgctgtactttgt

SEQ ID NO: 47397 - DNA, 1089 bp, Homo sapiens
tggtctatcattgatcaaaacatactcatgtgacacatggttgtaagtgtaaaattatagctgtgatgggtgctttgaaggagaatgcatgatattatatttatgagtattagtgggaattgatcaaatacatgaggtcagggagggtctttctgaggtagcgaaggctgagccaaggttaagtgcagctgttaacctgatgaaaggggtcgagcagtagggatatgaagcgatgcaattcagttcagttcagtgaacgtttatagagtgcctaccatgtgccagacacgatgcttagatgctgggaaataaaatatgaataagacatggtctttgcccccagtaaatagctcactatacaaaggtttccttgtcatttaatttataaattaggagagccactctttatgtatttattttgcttctgtgtaatttgagttttgttttctcaggattgcctcactgaagcaagtcctaaatcaaatacagtctttgtcatggagtcaaagtttcacaaacaaacacgcatagtttgctagattaaagtccaataacgctattctaggctttaccatcaactgaatgtggtcccacagcatagatcatgcctgtttcagtctgccaacagcgtggctccaggaaggaagcctgactgctgcagaacaagaaatgcattatgactttatcttttttctaaaccattagctgaaattactaaattattaacccagccatataaatgaattataaacatagcatatgtgcatttgattaatctgtttttcatgtcaagtgttatacagacctggggtacaaactcatggggatacttaagtaacacacagatgaagtataaagggtgtaaaccaagggagaggcaggaagtgtggcaaaatggtgattgccaaaacagcaaaagaaaaacaaagaaaccaaacaatgcacaccacagccagatttttgccccagcctatagggcacctctccattctctgcacccacctaaagcacattctagaacggtcattattactcccacctttggtctaggccccttcgttatctttctgattctggcattcttcgctt

SEQ ID NO: 47398 - DNA, 730 bp, Homo sapiens
atttgtgtgaatgaatacataatatcagcaacatatattgaattatcttccttgtgtctctgtttactagaatttgcacatcttgagatcaaggactctgttctattcgtggtattcatatttgtattcccagagttcagctggaagcctggatagaatatggagggtgcttaaaaatgatatgattacagaacagatgggaaacattttaataccttcgaaacaactagaactaggcttcattctgggggcaataccacttctttgaaatatttcctcatgtcagaatttcccaagacaccgaagccaagagctgacagatgaagatgtgtcactgtggaatgtgactagtacacaattttctcatgtcctcttgcctcaggtgatgcagctggtgagagggaaagagtaggcgatttacaaaggatatttgccagtaaatacaacagtctctcagagcttcaggagatgaattgacataatctgataaagcataagagtgtgaaggttttcattaagaataatttgtagaagaaagttttgctaatgtcaaagatttgtggggaagaatcggaacagaaacagaaagtaaaccaaggctactgtcagtgaaccatttgtatcgtaatagtccatcaattgaaatcttgtgtttccttttcaaatttcattctttttgatgcatacaagtgagttaaagcaaggaaggaaagaaacatacacgtgggca

SEQ ID NO: 47399 - DNA, 2208 bp, Homo sapiens
ggaggccgaggcgggcagatcacaaggtcaggagatcgagaccatcctggctaacaaggtgaaaccccgtctctactaaaaatacaaaaaattagccaggcgtggtagcgggcacctgtagtcccagctactcgggagactgaggcaggagaatggcgtgaacccgggaggcagagctggcagtgagctgagatcgccccactgcactccagcctgggctacagagtgagactccgtctcaaaaaaaaaaaaaaaaaaaaatactgaccctgtaatgtatcagagtagcatttaaaaagtgttccttattctggttacttcacacattcacattattatcacaatcacagggggaatgccaagagttgcctctattcaaaaatattaaaattgtacgaattattaaagaaagtcatgaccatagaaagtatacgaatatagatatattggtattcctgacactggaatgaacatttaatttaatcttgcttgtagcctggctgtatgatggcagaagaaataaataaaaagaaatacaaagcagtgcatatggaagtggaggcaagacacaaacatggaaattcccctgatgacatcaaactatgttattgatcccacattcttgtacaaaggtggggtgtacagacccagaatggtgacaggcccgtgagcttaccttctgatggcaaaacagaccaggcaaggagggcctggcagccgtgggttatttattaactactgtgtgtattaaaggaacagcccagaaaccagaacacagacagaaagggaaagacttcaacctgaaagaggaaaacagtctcttccattagatcaagtaacgggagctttcagatacacttgagatatcttagcaagaaaagcagagaacaacaataaacagttgctcaagagtagccaaaaccaaggtggaaattaacactgaccataaagctgaccttgacaacgaccgtttttcctaatctcatcatctcttcttacgcactttatccaggtcaaatatgcctcacatagcccctgcagcacaaagagtgcttaataactatttattgaattgaaataaaatgaatactaccctttccatgaagccaacatcaatgaggctgaatcattaaattcatttgcctcttagtttcttgattatctccactatactgcatcccacttcagctactgaatcccattgtcacaccctgcccatgagtacactacctctgaaattctctttctgtgcctctttcctttcctgttagctctttcacacttttccagttgctcagccagccattttctcctggaaggtcactgaactcatcactcaccagcactcacaactgacccaaatgctcaaatggtgaatcactcctgtcatctgctccttctcatcctccactaaggacactggagataaactttatacaagtattcgcatgagacttcaaagttcataactcacacttttgcctcagaacgtcaatctttctttggttttgctctgcattctgttcagctccctgaagtggctatcctaaaacctttcccaatttatgcacacctcctaatcagctctcagcaaatgtcttcattattttgatgagagaggaaagcgtttctatccactctgtagctgcctgagggcagagctggggggatagaatttgatgcaaaggacacaatatgattgaaaaaatcttaaatatcaggaacccattttatatattcattttttacaatgtagaaagtaatgaaacgattcaaagaatctacacttggtggcatcttattctacttaacttgagctatacagagtgggatgagacatagagaacctaagaccaagtgactgggtacagagataataccaaaaaattctatgtgttgcagaattccctagaacttagaacgaagaaaatgtttcagaatttgaggcaagaaaatcttaggggaaatgtatatttcccttcagtgactgaaagaatgagatctttgacaaaactgtgcctacctgctgatctctcttcaccagcacctaccctgaaaacagattcagttcaaaaagggctttttgtgaaagacaccgagtattggaaaaaaaaaaatccgtatggttttggaggcttcaaatagccaattacctaaacaataatgctggctgaaagaaacatattttttttttttgctttatttccc

SEQ ID NO: 47400 - DNA, 1944 bp, Homo sapiens
aaacacacagcatttgatcagaaatgcaactttttttctttgtctgaatttaaagaaagtaactagaaaacaaggtggaggaaatactagaaatattttatgtacgtttaaaggtttttatgtaaattaattaaaggtgtatactcaaagaatgtcaaagtatgttaaagtcatcaagccaaattaaaaaaacaatactacgatcctctgaataaataaacatacacggttcgcctgctacagccatacatttttcagttcctctatattcgggaagtttagtgtgtttttcaatccgtgagttgaaaagaggaagaggtcatttggtcgtgtctggattcctgagctgggccccagccggctctggcgccctccccggggtgcgctccgccagccgtgcgcctccggagctctgcccaggggaccgcggcgggtgcgtggctgggtaggcccacctgaccacagccgcgcgcacccggaatgcggaacgcgccgcgcccttgcacccggccggggggcgtggggagccgcaggcgctccgggagctggggcagtcccgcccttcctagcctcccgagtgcctgctgcagagcgcagggcggcggccacctgaccacgcgcacaaacaagaaggcgcagcagccgcaggggcaccgcgcctccctgtcgcccggccagggagccccctccccagggtcctcttacctggacctccacggctccctcctacacctccgaccgccgtcacccacctaccccggagccctcagctgcaattctcagctgatgggcggtggcgtggggacgcccagtgcgcatgcccgcagcacaactcaggaagaaggcggggttcaccccttttctattggcccgcggggctgagtgacagcggccctcaccgcccctccggttccaagctaaggaatgggggtatcagcaaaattgcaagggagctgttctttgaagcctgacgtagagatggtgaacgcctcttagcctgcgtgcaaaaaaggacagaatggaggacagttgtcttctttatctggtgaagccagccttcttgcacgcgggtcttcaccccgccccattagctcttgcctgtcttgtttgctaacctttaactgcagtagatcgcgttgacagctctatcgaaaaatgcaaaggcgagtacacaatcctagcaggaacaatgaaggaataagtgaagagtcatctctgggtgctcacttgtaaacaagttttcctagtacatacaagtcattctaagcattcctgaaaagcagggcgtagttttcacagggtttaaaacaagcagagacagttccaatgataaatatgcaaatatattgtaattgttagatgaaaagcatcaattgctacaaatgaaagaaagccctctccaaattaattagaagatagattggcttagcctttgcctatattaaggcaacactattttctaaaatgattacccggataggtgatatcaaaagtccagacgcacttaggtggaaaaaaacaaaacccaggatagaattctgattggaactcaccaacactaagtgtggaatgttgtctgcttaagagagatggacagagaaagaataaccctgaaaacgagtaacccacaagataggaaataaaccaggaaaaggtaaactagagaatgaaggaaaaaaggagggaattgtccatgatgtcacctgttacacaaagttcaagtaaataaagaactgaaagtagtgcattgtacttgagaattaggaagtggctggtgaacgtaggaagaaacatttcaatcattgaaggaacacatgaaaggatcttacatccatgtgaggtttagtgcactttccaaatacccattcatattacctttgatagaactctgggctccggggagggaaggtacaatgcactacagaagaacctgagattaagtgg

SEQ ID NO: 47401 - DNA, 1300 bp, Homo sapiens
ggcagattgagtttttcctgtctcgcttatattggacagtttttaaacaataaaatctcctcaaggattatgaagaactgtggaactattatttaatgtttagcttaaacaataattatgatctgaatattatgctgatgcttcctttttaactttatgtgtgagcatttgccaatgctttccatcctgccacttatgacatactattcgattaaggaaacatttatctctccagtatggagaacaacatagtttttagagttttgagctatattatggcaaattaaaaatatactgaggatcacaaagttataggtgaataatcaaaaatataaaggaaaaacccacaaataacagattctataaatctgtggcttatctcctttcatttagcagctgtattcatgaattcaagctcaagttgaggtcctttccccctgttttcgtcttatattcgtaacaaatgtgatacgtgtgagtgctcattgtttaatctatcattttgtataattaatgccattgcccttgtaatgtgaaaataatgggactgacttatccagagtatgacatgttttgatttgttttttccagtgccggagctggatgtgtaattctggtgacgaatgcgatctaaggccaattgaaatggactttggcctgagaataggctaaaactgaatggtcctttgggaaaatgaacccacaagcacatcctcaccagatttaattgaaaaagacattaataaaaatacaagcacctttaaaaatactattttcactatttgctacaatagcttagcaatgatctccaatactgtatattattttaaatgttaacattatgacatgttttatttgctctggatatagtaacttgatttcttaaaattttttagggttttttttaaataccaatcaaatattaaacaattaagttgtacttgaaacaccaagccatagggaaataaaatgtaagaagaacaaagatgtgttcagctcctttataaagtgcagactagcaatcagaatacacagaataaattgtttactagtcagtttggttccaaagttctaaaaggctgcaaataatcaaatcttaatatctaatattttatttaataagttaaatttagcctgctctttatctcccctgcatttgtaatttaaaaacctttcctcaattctttttaaattcttttaaaaatcaatctttaagaaagctaacaattacaaagtcatttcagcatttgccactatatattcataaataaagcattccccatacaaaattttacatttc

SEQ ID NO: 47402 - DNA, 585 bp, Homo sapiens
tatattctcctttggcttgccaaaatttggctaattaggctggtgaaattaatataattgaaaggtgagttatctgttacactacggtttcttaccaagcaaatttgcactgtgttctcttgttgtctgccctgctcacactcacatcctaggaacttggggccacactattgtaggtaggctcctagcaggctgtgctgctgccagtatttatgcctaaaatatgcctctaggggcagtgtcctatgtcctgcttttgacccgtgtgtcttttcacaaccttcggtgtgctgccagcaagagattatagttaagtcaccagagaaatggctctgggagggagcttcagttctgtgcaaacattgctatgacctcagagggacaacaaggactagcctcacacaaggccaaaggtaggaagaatgaaaaagagggaaggaagggaggaagagaggaagagaagaaggatgggagagaggaaggagaaaatgtagctgaaatacaacccatgctccgtccacttattaccaaatgcttgataatgcattgattccatgaattctttaatctctagtgaaagtttga

SEQ ID NO: 47403 - DNA, 774 bp, Homo sapiens
gtattatggtgtcatgaaatttgtttggggggtaccctaaggaagacttttggagaaagtggttgaaacaagcacaaggagaggccttgtgattgctggccaatcatggagacataccaagcagattaagattctagagaagcaggaaccagaaagtcacttcaaatgtaaaccacaaagttaataatcgcaaaggcaaaagctcaaattgcatatggtgattcataatcaacctgcttcacctatggcagtagtgagcctaaaggtatcagaaaataactgaatagtttgtaaaaatgatggttaatgattctcccaaaacatatgataaggcaggccgctagttgttaatagaggtcaaccttaaggtacacttccttcatggacccacaggtcgcatgatcttccttttcctgaattcctagaatggtatcagataggaaccaaagccaacactttttaaaaaattcttatattgctttttaattatctcatgtatgtaaatctaggccaacctagtctgaactatgttttatatttctttcgtacattttccctaccagtcagaggtgagtgtggattggaagtgggttaacaattaacaaataattgagtaattgatttactagtcaaagatagtgaatgtacctcttgtgtaggtgatagaacacttaacgttgattactgaaatttaatagtatcatgtttgcagtgatctggggatgtaaggtatgtgctgcaagtcaaaataataacaatctcatttgcaatatt

SEQ ID NO: 47404 - DNA, 1188 bp, Homo sapiens
tgttagtagaagaaaacaaaagtggaagtatttcagctaaatgcagttgggaggtgctgctgctagtggcatgacacccctccgtgtcccattaaggtgtgaagatggggttgtcttggctcttttcagtcccatatgtaatgtttgcaccttatctaccacttagaggagttggggattttcttccagttaaaactcacatactctcaaagataaaaggaaattttctgttgcagaatacagacttgcagttaaactcatacagtatttaagtccatgaatacatacgcagttaatgattacacaggggactctgccacaccctagttgcccctatgaccttattgatcacagtcacgacatttaagcaacctcacatgggtcttacatataagtaactgttccatgttttaagtattgggatgattctataagatgtttcaacatgcgatcaaatctttcactatgtgcaacttcctatacacataagggaaaattcatatactttcagaactggagaagtccataaacgaaatatttacaaagatatattatgtgatgcagtttctagcctcatcgttatcttaacattccacagtggggcatctgtctagtaagaacacaatgaggctcacaataaccagctctaacaaactaacaatgttcttttggaaaactgtattctaatttccagataactgatttgcaaataaacttttactgtttcataacctgtttatacgttcaaagttgacatgcagatctttgcggccattaacattgttcctgccttcctccctgcttttcctcataaaaattatgctagctcctttaatttttttatggaggccaacaaaatttttatgttatctattatgttgaatcacatagcctctatggaattctcattttttaaagttacaaatgttcaaatattaataattacaaataatttcccactgggaccttttccttttcctcctcaagttttagttttaagcactgactaaggttggcatatctccagccacatacatttggaaaaagtcagatttgcaatgcaatatatcatggagttaatacttgttgaagagaatctttgattgtctggacacattcattttagtaggaggcagagatgacttaatagcaacaccaagttaggaatctaattttcacagccttcca

SEQ ID NO: 47405 - DNA, 1591 bp, Homo sapiens
tcaaaaaaaacaaagtttatctgaacttcaaatttacctggagatcctgtatttttatttcctaaattaggcaactgattcaagaaggaaattagaagaatcttgaaacctgggagacctgaccatcccaagaggaagtctccaaagacacttacctccgatttccccgcagcaaaaggtccagctagatcattctatcatgaagctcaaaattggcaagtgttactcacatggtcagaattttctatgagtttttggtaatccccaagagttaccagacatgtgagaaaaacttattgcatgaaaaagcaaataaaaaagcagataaaagcaacttgaaggaagcaggggggaggagcttcaataaaaaatttcctaaatagcctcagagagagaagaaaaaataatacatgcacaaaacaacaataagtgttgaaactccgaagacaagaaaaaagagttcttggaaattaagaacatgttaacaaaaataaaagattcagtacaagatttggaagatcaagaggaggaaatctctcagaaagtagaggagaaaaataaagtagtaaaaaatagcagagaaaatgtcggaaaattagagccctaatccaagaggcagaagatcccaataataagagtttcagaaaaagagaaaagaaaatagaaaggaagaaattctgcatgcattctggggaaggtgtggaatgaggaatacacatacaaagaatcaggaatcagaagaacttcagaattctcaatagcaacgtaagatgggaggatataaatacattcacaatcctgaagaaaagtcataaccacctttgaattccatgcccagggaaatacttaactaaatttaagaggaaaggcagtttcagaccagtgagtctcaaaaatcttgcatcccgatcactctctttccggaaactgttaacaacaagaaagagggcacaagcccaaaacaaggaagacggggaacagaaaacaggaaatccacacagggaagtggtaaagaaaaatcttcaccatgaggataaagggagattccaggatgactcctatcgtatacaaggcatggagagcagccagttcagattagagcaatgtgactagacagcgttgactacaacagaacaaaggagcaaataaaggtagaaggagaaaaacagagaacctaaaacaaggaaatagctaagagagcattcctaggatgacagtaaaggaaatctcaatatgacaactgtgcagaatgactagagggaaaccagtgcagagaaaggttattatttttagctcaagataaacttatgaaaatgatattgtggaaaaattattctgagatgctgttggaagatatggggttttaacaaaaagtcaaagaaaattaacgaaatttaaaaaaataaggcaattaataactttaggaaaaacaaagaaaaactataaaagcaaaactctgagtgatgtttgcaatgacatactgatataaacaaaattatgcatatttgctataaaatgcttggaaaatctgtgtggcaagataggggtttatttcacttttacctctctttgtgtctcttcccttggtttg

SEQ ID NO: 47406 - DNA, 917 bp, Homo sapiens
ggtacattgaattgattttcacccatgaaaaggttttgctgcaataaacagaagataaagagaaaaaaattattttaggaagttgatctggacatcacagtgtgggaaaaagtacaagctcacatcttagtgccaatttcatctatgatcagtgttttcatgggaaatgagtttgctttagagaatcagaggccattctagctaaactgggcctttagttcagtctccacattacaaatatgtacatgggtatctttatctataaagacccactggaatcttataagacataaaatagattacttctgtttgccaagtagacttaactgttttccttggcaaggaactttgtttgttccattctcctcaagacagagtctatgtggtaagcagtttttcattctagccttgacccattgccagggtatgcctttaaaaggacaaagtccaaaaggcaacattaggcaacataatgcatgcggcactttctgactgctacacactcctgaaaacacactcctgtgttcttatatgtacacggaaccccttaagcctctttataggagctttccacgctttatcattactttctatgctttgcccctactcgatttctaaagtgtgcttatcattatcaataacatatttttctccttgcccactttatttcattaggcattaactaattggattatttgcaaattaattttaccttatggtagcgtgccaccagttttccttgagaatcaaataccacatcagtgttgtattggtaacggccatcagggggacactgaggatcactggtatcgcatggcttcttgtccccaatatttgccacaacatagatagagttgttcttggccaggcagctgagtctttcttgtactggggtctggccaaatctgatacatgtt

SEQ ID NO: 47407 - DNA, 3130 bp, Homo sapiens
cagtttacttcagggtctgggatgtcctccaaatatgggtagagagagtccctgttgaagttccagccataaatagcatcttctggagtcacaataatatgcgcaccctgttaaaaatgcaacttaatccaaaggggggcctgcaagaggagctgaggagctgagtggctgagtaacaactatttgggcttcccccacaccccttaaatcttattttgttttctatatttttataatttattttcttttccaaagcattttaatttccttttttttcagtgcactgtcacttctttttctttttcttttcttttctttatttctaattttagattcaaagggtacaaatgcaggtttgttgcatggatatgttacataatggtgaggtttgggcttctagtcaagcatttttttttctctcttttttttttttttcagatggagtttcgctctgctgcccaggctggagtgcaatggctagatctcggcttaccacaatctccacctcccgggttcaagcgattctcccgcctcagcctcataagtagctaggatcacaggcatctgccaccacgcctggctaatttttgtatttttagtagagatggggtttctccatattggtcaggatggtcttgaactcccaacctcaggtgatccgcctgcttcagcctcccaaagtgttggaattacagacatgagccaccgcacctggcttagtcaagcattttaattttctaatcctgccattgttgtttcctatggcagtcgttaactataaacctagcttatcctggaaccaagcctctccttgaactttcgctgatgactgtgcctgtgtcaagactgattaataacttaaatattctgtttatttcctcctctgccctagctttcccctgcaaacatgattcctgcttctcagaaaaagaggagccacaaactggttacttgaactgtcccatgcctacaagtactgcctgagctaacctgggcaccttccaattagagagtcaccttaaaaagctctgtgaccttcaaggaaatagttggactaaggatgaaaaagaacatcagaactcctgataaccttttaaatattagtatatataagaatatagggcagtcacggtagctcatgcctgtaatcccagcactttgggagcccaaggcaggtggatcacctgaggtcaggagttcaagtacagcgtgggcaacatggcaaaatcccatctctacaaaaaatacaaaacttagctgggcacggtggcatgcatctgtggtcccagctactctggagactgtagtgggagaatcacctgagcccgggaagtcaaggctgcagtgagacgtgatcacaccactatactccatcctgggtgacagagtgagaccttaactcaacaacacaaaagaatatatatttatagatatatgtaatacacatttatccatgacttttatcacacttcatgtattcctggtctacacctaatcgatcaatagcttttaaaataatatttgtgtaaaccacaatttatactgtatgattaacttcaaactgaaaccttcactaaacttaaggactcacaatgcattacatatacttttatcttgtaattagaatgaagtgtgaagtatataatgcatgctggcaaggaattgaaaacttaaatttgttttcagattataaatttattcgaaaacctgcaaagccttaatagcacatgagtacatgaaggccactaatactctgaaaatagcacctagtccctgacccatttatcctccatcctccatctgtaccagaaaaggggaacaaagatgttgaatttatggccagttcctcaaaggtctgctgcttcttgataatgagcaaattgttcttttcttaactttgttcttacttttagggaagtccttgctctaattttgagaggaaagtagaattctaactgtaaaataaaggttcttggctactctgatacatatatcatctaaaagtgtaactgaccctgacagtggccctgtctcctaggaccccctcctttctcatagaatccagtacactggagagatggtagagatggtacctgatctgctgctgatgtgatcgctccttccaaaatgtccagattccgattcattaatgccaaagcctcctcacgagacactggtgttagggtggcattgggcaatatcgctgcatgctcataaacagctgcagtgaaagtgtcctggcagctggctcttgagacatagaaaagcaaaattgccacgtaagctggcaactgagtagtcatgctgaagtccaatgagtgctgaaaaacagagcatgtcctggtatttatagaaagaagacacgtggtgtccagaacttagtaccttaaactacggaagttaattaagaaaacgctatgatttcatagcattgttacataacaaaagaccctaccttattgcagtaatttgtgaagattaactcaagaactctatgtacattagttcgctagggctgcctaacaaaatacaataaactgggtggtgtaaaaaataaaaaatttattgctttgcagttctggagggtgggagtcccagatgaaggtgtcagcagagttggttcctcctgagggcggtgaaggaaagatgtgttccaggcctctctccttgacccatagatggctgccttctccctgtgtctcttcatatgctattctccccatgtgtgtgcctgtatccaagttttccctttttgtgaggacaccactctaatctttaacacagggaaagggaaaatcccagctctagctttttttgtcatcgttgttgtttgtttattgttgttgttgtttgagatggagtttcactcttgtcacccaggctagagtgcagtggcgaaatctcggctcactgcaacctccgcctctcgggttcatgtgattctcctgcctcagcctcccaagtagctgggattacaggcgcccgccaccacgccaggctaattttttgtatttttagtagagatagggtttcgccgtgttgggcaggctggtctcaaattgctgacctcaggtgatccacctgctttgtttttatgccaaataagggcagaagaaaaaagccaactgaa

SEQ ID NO: 47408 - DNA, 934 bp, Homo sapiens
aagctggcaaattttgtttcagttgtgcattaagtataatatttacagaattagtgtttatgtttttccattttatttttagatctatttgtctttgaatggtatttttatagttcaatctgcaaacaggcatatctaattttttactttagtaactataatgcatttattctgcaattgccaaggtaacccaggggttgtggttggctggttctcctgagtttccggtaaacaccagcttctctaactgcttgctgacctcttagggcctttccatgcccaggtgggtgggaataccacatatttcacaaaaagatgtcattattatgtaacaatttgtaaaaggaagcactgaaataaaagttaaaactgagatgagttggcaagaggttaaaaaattacttcttgaccttcttagattaaaaatattaaacctcccgtggagtttctagtccaactcataaagagcttggcagtcatttttcccatgctcacaccaagaaaaaagctaaacaaatgaaaatcgacaacttttctaggatgcatcagagaattgagatcacaggataaactgcggtcctcagaactgcagagataggcagatacagaggttaagagtgtactgcgagcagagtcctctgcggctggcgccagtaccgtgggttcacttgaactgtaattgacgaattggtggaggctcagggtggacaaccttgagagttctggtctgttcttcttaacaaaagcctgccctcaaagtaaagtattttaccagagcctaacctacctaggggaaggaaaaatgccaaccccagccactctaatctttaacttggggaaagggaaaatctcatctctagcttgtttttatgccaactaatggcagaagaaaaaagccaagtgaagttcataaacccaggggtacaggctcact

SEQ ID NO: 47409 - DNA, 1338 bp, Homo sapiens
agaagagacaaaaaggtcaacgaaaataaaaagcgaaaggcattaaagtgtggggggtaaaattactccaagaagtacaggcttagtaagagctgagaactgaccatgagatttgacttttttttttttagacaaggtctcactctattgcccaggctggagggcagtggtacaatcttggctcactgcagcctctatctcctgggctcaagtaatcctccaactcctgagctcaagtgatcctcccaccccagcctctccagtagctgggatcacactagcatactcggctaatttgctgttgttgttattgtttgtagagacagggttttgccatattgtccaggctggtctcaaactccttggctcaagccatctgcctgctttgtccttccaaagtgctgagattacaggtgtgagttatggtagcctgccccgagatttgattttaaagttccttttaataaagaggggggcaggagtcagcttacataaaaatgccatgaggtgagaggtgccaaggaagctggggcaaccagagtacataatgcagcctacagacaactggcttaggaaagagaagaaagaattctagaaggaacaaatgtaaggcgataaagagggaagatgcccacctactgcacacagaggaatcgggggcacaaacctaagatccgagagtgatagtccctgaagagagaatccaggaaaaatgggagggggaaaccgagtgcattttctgccacccagaatatctctgacttactggtactggactgaattatagcaggtggaaataaacacctaggaaaagttcagaaatgcgtttgtcaaacattctgtggacaaagaggtgtctcctacataacccagagaacccagctgctcttcagcatatctctttccagagttaatcagtgaccaaccagaaaaatgactaagagagccaagacagtgggccagaggtatctggggaaaaggtgacatggtggtcctgtctaggaagctcccagcctggcacagcctgcaataaacccctgaccactgagaagggctcaaccaagattgggtagatttcagaacagaataatttcagaaggaaatgagatgtgatctgaacgacataatttattttatttatttatttatttatttatttatttatttattttttgagacggagttttgcttttcttgccccaggctggagtgcaatgatgcggtctcagctcactgcaacctccgcctcctggattcaagtgattctcctgtctcagcctcccgagtagctgggattacaggcacgcaccaccacccccaactaatttttgtattttt

SEQ ID NO: 47410 - DNA, 2678 bp, Homo sapiens
cttgaaatttagcagattctgctaatggagaggaccttttctataatccaagccataatttgtacaaggttgctgatacgagatgtggttggaaacagaaatgccaggtgacagtaaatagtttgtaccctccagattgtctctataaaaaaacaaatatagctgtaagtagtggaaatgttaaaaattaaaataaaaaataaaaagcacttcactgtactgactcagtttcttcatctgtcaaatgtaaaacaatagcttcctttctgccttagtggatccacatgagaaatcctgagataagtacagacatgaaattgttttaccaagtccatccatattaaagatatttatccttggtataagaagagaatgtagcatggtgatagctggcttcaaatatttgaaaggcttaatttataggagatgggtcatatgtgtgaacatagcatagaatgcaggaaaaagacgaaaggaagttaaagtgaggcagatttcagcagaaaataagacaaaaaatgtttagcaaccagctcactctgttaaataagtggatttgctagtcactaaaaattttattataatatggttcatctaggcccttagagtccattccgttagcacagttaaatgacatagctgttttaattccagccaatctaatgatcaatcatgagatcataagccttccttttttcacatatttgtaatgcaaatagtaatgccaactacataaattgaatgtaataatgggtatagtataccaggtacagttcttgggaccaagtaagtgctcagtaaatgaaaattgctattatggattgtgtgattagaggccattccatgtctctctatgaactcacagcccctctgcaattgaggttaaactaacctttgaataaaaaggacagattaatggcctactggtttagaccttttctttttattttcttctaaaaaaaacagagaagtactattaatattcatattcattaagacctttaataactttatcatgtactttgtttaatttttcttttcttgactaaataatttgagttatttaatatttcctactagttactcgtgaaaaaagcccatggaactgtttgacatgtcagcattctaaatatttaaatgcacaaggatgaccgcatgcctctctactattctcttcagggataaatatcaccagggagaaaactgactttcttttccaatattatcattatattaaatactggatttctcctttctgtaacacaaaactgaaacgttgtcatttgaataagtaggtgtaagagttcataatgttgacatttcatcagtcacctactttcccaacttaaaataatttatcgatagctaattatcaaatttatggatatattttccctggaaaagtcagtttcattagcccagtcaaatacagtacattttcgtgtaagcctcatcaactgcagcaaataatgattccttcctgttctgggaaacgcctcataagcaagtagatgttgaatcatagtgacatggtttctgtaaacacagaccatgcaatgtttagagaatatttttccaaagggcaaaatcccagagtgaggtttgactcacatagctgagcctgaatgttgtaccattaagcatgactttccacttaatttcacataggtaaaattatcaaagaagtttctctttttgcacaataggtgtagttctaaacaggtgcatgtaaatttaaaattagcaagttaaatgacttcttaacccatcaattttgccatttaaagaaataatcttaaactatttttaaaagttaatacaactaaaataatctatttcacagatatcatatttattatgcatattttctttaagaaagttatgcctaaattacatctactaataattactaaagtctctcaaaggacaagaacacaaagaagttcagactcagtcccttctgttaacaaaaaaaaaaaaggaatagtgacagctagcattggagagtgcatcacaatgtacaaattccatgtgtattacttcattactcttgtctgatctgtaagagaattaagggactctattatccctgttttacagataatgaaacagaaatgttaagcatttaggttatacgcttacatcactcagctaggtggtcgtaaaatgtggtcccagaagtagggcttcctttttcaagtcctatacaatttccattggccatattgattgcattctgaatgacagtgatagcaaagctctttggaaacaggctcattcatctttttactcttcctgtgaaggaggcaggtgtccatggatgaaccaacttacttgtatttgggacacaggttctagatattccaactttttcactttgttcaaacccaattaaacacatttactataaaaattgtgtatatacctactatttttttttcgagatggagtctcactctgttgcccagtctggagtgcagtggcgtgatctcggctcactgcaacctctgcctcctgggttcaagtagttctcctgcctcagtctcccgagtagctgggattataggcatgcacaaccacacccagctaatgtttgtattttttagtagagatggggtttcaccatgttggccaggctggtctcgaactcctgacctcaggtgatttgcccacctcca

SEQ ID NO: 47411 - DNA, 3927 bp, Homo sapiens
gttaacaaaaagtcaaataataaaagatgctatggagaaaggggaacacttacacactattggtggaaatgtaaattagttcagccattgtggaaagcagtttggagatttctcagagaacttaaaacacagcaaccattcgactcacaatcccattactaggtatatacccaaaggaaaggaaatcattctaccaaaaagactcgtgcacttgtatgttcatcgcagcacttttcacaacagcaaagatatggaattaacctaggtgcccacaagaaggaacaaaatcatgtcttttgcagcaccaaaggacattatcctcagcaagttaacacaggaacagaaaaccaaatactgcatgttctcacttataagtgggagctaagcattgggaactcatggccataaagatgacagcaatagacactgggaactaatagaggggagagagagagaggaaggcaagggctgaaaaccttcctgttgtatactatgctgggtggtgcaatcattgtaccccaatcctcagcgtcatgcaatttgcccatgtaacaaacctgcacatgtactccctcaatctaagctaaaagttgaaattacagggaaaaaaaagcatctacatcctatgccacagattgactatttatcaacacaattaccagtcaaattcagtgagtttactgttggtgttttaccaaatcacaactttttgtttagaaattaatgatatgatattacctccaggggtctctacatggaatccagttcactccagggtctggtatatcctctagataggggtaaatgctctccctggtgaagatccaaccatagattccatcttctggggtcacaatgatatgtgcaccctgctcgaaacaagtggggcaaaaaagtttgtcatgaattccaaatactctttgaccaaactgcaagtctcctttacaagtataaaagggtaatacctgcttcgctgccagcttaactgctttctccaaaacatctatgttcttgttcatcaggagcaaagcttcttcttttgaaacaggtgtttctgttctgtttggtaatatcaccgcatgctcatatactgcagcaataaaagtgtccagtgcaccaacactcagagcaaggagggcaaaaactgccacacattttggaaaatgtgatataatcataactaaaatttagtgatctttgaaaaacaaactcagattcttacgttttgtttcactggaaaaactttacattaaatccctcctggcaatcagctgtttatattttcttgcacatatattacacaacacagcattgagaaaggatgttgtgcaagaaaactgacagccaggacgtaattggattgattcaagtgtacagtgcagttgttgacattgttcagagtcaagtcaacactaaaagattgagccaaccagatgaattcaccccagtccaaaacacactggcagttgaagtcttttctaataaaaaaaaattttcctggtaagccaacatttctattaatagggccaatattggaaggtagtcatcatagcaacaatttgttgagcactctacttacatatttgtatggccatttctatttgaaaagcccttgttctccatccgtctaagttccagctccccctagagtcctcccaaatccactccagtcctaagtgatatttctgaactcctatagcatttttttctgtgctgctgaatgtctctcactccttgctgttgtcttgacctttaatttaaatattataccaatacttaatattatatatgtatgttttgtcttcttaaagagattaaaaagaaacttgctgttttctttcagaacatccatgtccaataaacatctagacagagatgatgtatcctgggatgtggcccctggagggtaagggaagtgtcctgctcactgttgaacctcatcaccccagcacatgtgtgacagatggtgaaagctcaatatatgaatgaatgttgaatgacggaatctactacctgatgggccagtctattccacctttgaacattgccaattttaagaacattcttgttattgagatgcaatttactttacctgtcttctacagtttaaacccgcttccatatgaagactaatcaataattcaaaaagtgttaagttctcctttaattcttttattttttaaacatatcatccttataagtcccttaagggcagggtcacattataattctctgctgcttctatagaattttatactgtgctaagctctgtaaatgttttttgattagttaaattcacttccctcgcccaattttggattgaatctccttgtttgaatatcagttaatttaaaatgtagaattttttttaaggtttaaatctctgattctagaacaattaacactgcttctccctcttgagattctttctaagatctaaggaaaattgtaagttatggagatttgtgtctattttgggtttggtttgtttctataattcaaagtcccttggtttcaataaacttttccattatccaaatatttctgctcccagataccccacagtgtttccatatgtccttatgccctgataccatttcaggaaataaggacatatgaacataaattcagccctaaattctgagtttatgtctgacataaattgttttcatcagacatcagacataagttcttttccaaaaaaatttctgaggagaagagggaaactatgtaaaacagatggattgatctgggatgagaagaaaataattttcatatttcaagttgaaattctaactcttttcttggttcacctgactttctgaatagaatcaaaaggaaacatatgggaattccccttcattctcccagcccctagttccaggaaatgtaccagctttttttgtgtgttgaaatcaatagaaacttgagttaaatatttgattacccaatgttgttagtaatgtctttgcttcctaggtgtataaggcgtgcagctatgagttatttgaaacactgtattggtacataatccttatgacagtctggcattattgtaggattaagaagtttagagtcagaagttttgtattacaataaatataattcttcttttaaatatgtaagggacacatcttaaaggagaggtgctgtaataaaatatctaagagtttactggctttccccaaatctttatttctaaactcattgtaaaacctcctctccattctccttatcaagttcctgaccccataaataagaattctttcaggctctccatcagcctctctgatcccactcctcccaccctaaccctcaatactgtaatccattagagttcccttgaccattgctgtcattaattaagatacttcccatgcatatattgaatcaaagcagacagtaagagccttctttctcttggttccattttatattttgtgttcttagctaaaagtactcttcttattgtaacatgatcactgttgctctgatcctggaatgattctgaccaaatcctgcctttcgagctcaaatccattgcctctccagtcttgttgctattcccttctctaaactcttaatgcacttatggccagtagccacattgttgttcactgtctttcagtcccttactctaccctctcccctggccccaggtttttttctacttcataccttcaactatcttctacaaaaggataatgactgtgtctctatctttagctcaaacttccgttctgaacttcaggcctatttatccaactcaaaagaactcctttccacaagctcccaccaagtatcaacccacctgccagccatttgtacctgtaaattctgcctccccccatccttactgtaaatgactcctcttgaccctacttaagtctagcccctatctttgagcactggatcccaaggacattg

SEQ ID NO: 47412 - DNA, 753 bp, Homo sapiens
gtacagacagggttttaccatgttgctcaggctggtcttgaactcctgagctcaagcaatcctccttcctcagcttcccaaagtaccaggattacaggcatgttttctttcccattccaagtactttctgtcttatttacatactcaagaaatcctcttcacagttgtccctgtttctttgtccaaatgtcttctcaggaatgctttcattggaagtagctgcgtgtggctcagtgtaagcatgtgagtgtgggtgtgggtataataaccatattgacctaagcaggcatccagcctcagatatcttttagaacattatcacccatggactatcttggaatgatggtcagaatggagttagaaatgtaaaaagaatttaggaaagaggccaaaacagaaagaatgctgacagaaatcacctgtacagagcaatgagccaacactatgaggacaggtcaaaatgcaaagaaagtagaaagtaggggcagtgtagttgcaaagcaggttgtgagcatatcatagaaattatggaaatagatcatatcaaagggggcaatgtcacagagtggcaaagggagcaaagagaatgcatagaccactgtctcagtacttagtgcttgggatatagtaagtgatcaatgcttcctgaatgaatgaaggaaggctaggtagtgagccctgagagaaggctgctgctgagcatgtgactttgtaatacagggggctgtaaccaggaagttgtaaaagagcatt

SEQ ID NO: 47413 - DNA, 459 bp, Homo sapiens
ccacttaaggaagtcttcttgatgttctccacagtaggctggtttattagtcaaatcgaaactcatcatggttaggttaataattttttaaatatgcttaaagcaagcaataagattatacttaattcccattgtaaatattttatcccagtgtatgtacgtgcataaatgcacgtgtgtgtgtgtgtgttgtgtgtgtgtgtgttgccatcaatgcatggagtcaagccaaggaaaagcacctggttttctggaacaaatataaaaagttaacctggaatttacctttcacttgaatgccctttcatttgaactgaaattacctgccagtactctcttctccttcggccatgtaatcctgtaaaagctcctagaacgtatacttcattctcttctttttgtaacattctgtagcttaaatgacagcaaagctccttttgacagactgtaaggtttcct

SEQ ID NO: 47414 - DNA, 1353 bp, Homo sapiens
ggcgaggagcattgacacaatttctactgaaccaagctcagcagaggaaccacagcaatagaatcaggagattctctagcctacaaagcctaagtcgactctcatattcatgtcatagtctttctctttagcacattattcttttactgtaagacagatcccactccagactgtccttcaaattagagagaactaaattgtgtatggtcctgcatctagttatggagagcttttttctcactgtaagttataagggtcatggtggtatctaataataattaacatggacatggactctggggccagaatgcctgggattgagccacttcctagctatgtgactatgagcaagttttgtgccctctctgtgcctcagtttcctctatctgcacaatggtgatacgtgctgaataatttttgctattattactattgcttcattcctacaagatggaggccctattacaagagccatgcccaaggcagcttttacccagggtttggtgacataaccacctgtccttggttactgtcttgttaaaagaatgtcaatgtgtctacttctttatgtttgcattgttctgtctgtctccacaaagtctttcaagtttcctttcttccaggtcaacctgatctgaatggtttctcctaaaattatgaacttaaattctgtttctacttgctaatcttgatggcattccctccatttgtaccacagattctctttctgataaaaagctttcactccacctatttcatgcaccattctattttttaaaaaacatgctaaacaacctgctgtgtaactggattactcacacattgctgttgggaatgtaggatggtacagccactctagaaaacagcttggcagctctctgaaaagtgaatcatggctctactcctttccctctctgggtggcagccaggcatggaggcagggcaggatcatagcacctcctttaccctgcttatccttcctctggggaaggctgacaggacaggaatttagaggctccagtaggggaagaaattctttatgagctgtttcttcagtttcttgtaggctaaaacattaaccacagtgactacatgcaaaaacagaaaaatggaagtctggcatttgtctgcattttttaaacaccttaaaatgtgagtcgtatgccatagttctactgaatggagtttgtttatatggaaagatcaattcatgcacaatatcaattggaaattctcactcttctgaatcatctcaccaaagttttcagtgctgtgttatgataaattcctacagctatatgaatgaagaagctgtgggcagatcttaagataaattaagataatttaagatgt

SEQ ID NO: 47415 - DNA, 1862 bp, Homo sapiens
tgtaagtaggagaaaacaagctaaatcattcagctggtgaattaatatttacagcggtatgcttctggatagacaagtcccacaaattcataaataaatactttttttttaccctaattactggtcttttacatcagttaatttaacacttatttccagggctaaattgtcatttaaaaacacgaaatcaattactgagttccaaatatccaagcaaatccatcagccatttataaattaaattgtttttaggaaaaacttaagagaaatacatttgctttgctctatttgtcagaggttgccattgcagtccagaaggaaaaaaaaaatcagtgcaacatgaggaagtcttacgaatctttgtaaaatgtttgtagtagatgagaaagggaaatgaaagttaaaaagaaaggcaacaacaatgggtacttgaaaggtaacgttttacatttgcctaatggcatacttatttgaatgcattaaacacacagtacttaaaaagcagaggtataggttagaaagtcattagaaaccgtgacacatatccaatcctggaactttaccccgtccagagagaaaagaaacgctggcccgaaccccacgatcaggccccagccttttccaatctctcggaaacagatcaagctataagcaattcaatcgttgctaaagagacacgccggaagccgccgctggtctccgggctcccggccacgcaattcatggtcacctcctggtgcgcgtggtccctccaggtcacccagcgcctccatccccggtgcgtggactccggcgccccagctcccggcttcaagccacgtccttggactcgacctccaaggagccactggcactctggcgggcggccgctgctcagctggaacctggcatccccgactccctgcaggcagcgatccgcccggcccggagctccccaaagccttccaggactctgggtccccgggaggaggccgggggcggggcaggggtggagcaaggctccttttttttttgttttgcgccccccccccgcctcattatcttaatccaccacctcagctgctatatcatggtgtcctttttcattctgtgacagagagtgaaaaaagatgagtctatattccatacagctgtacccccctcaatcttaaaataagttcaatttattcctacgaaacgaaagaaaggaagcttatgtagacacagaaaaggcagggagtacctcaactgaaagacacaaaagtgaattagaaaattaggttatacaggaactttgaaagagtgaattatttttcacagtgggtaaatgcggtagtgttcgtaattactgaagccagacactattgaaccggaaatgaattaacctatgtgaagcacctggagtcgaaaaatatttgcaagaatactaatgaatatcgaggaagcatggcgaagtggctaggagtgcgacctctggaggcaggtgccagggattcaagccagggcacttgctggcagtgtgtaactttggatgacaaggtcagtttctctacctgtacaactgagattataatgtttatctcgtagggcggctgtgagcattggcgataaagtgtgttagtagttagcacatgaacatgatggctgctaccttactctcacactcacagttttcttgcataaaaaataggtttcacttattttcaccgtatttactatttgggaagtgttaaagctcgaggactggctggacacggtggctcatgcctgtaatcccagcagtttgggaggccgaggtgggcagctcacctgaggtcaggagttctagaccagcccggccaacatggtgaaaccctgtctctactataaaaatacaaaaaaat

SEQ ID NO: 47416 - DNA, 3699 bp, Homo sapiens
ctgacttcattttgggggttagaactggttatataagtaggacttatataagtaggttatataagttatataagtaggttatataagtaggacttaaaaaaaaatgtagctccctctaaggagggaggtttgtgtgaaaagacattttagtgcagtgaaacattaaagcagagatccacgatgtctgagtcaatagaacagattagcagctgctgaaagatagaaaccaagtctgagctggttggtactgggaacaactgccttagctaacaaggcacttgatcattttccccccacataaatatgctgtttggcagtgaatgttttcacttaggtttcccaaattccctgcttcttccttaaaaatttgtttggggaaggaatctaatatgcttagcatatcaactgtactgtctttagataatgagaaatgcgctgaaagactatttgccacattctctttcaaaaatacaaacgtgttaattataacctccaaaaaaggcaagaaggatttcatgcctttgcccctacactttcatccatttagaataccctcctctccttccatgctcaccgatttggaatctcttagtttttgttttgagcctgtttcgaatgctgccagaagcctgaggtcctcttaccttttcacaccatccccactccctaaccccctgccactttgtatctcctctgtggccctgaggtattctgatttttgtctaaaatcttaatcccaccacaaacaaaccagggctacaggaatgaatcatctttataaattcctcgttttttttttttttttaaatcaaaagctcaataaacatttgcatgagttactgacagagaagcagcttcaacgctttaaaaatgaaactgaaaccagcggaaaatctaaaactgaactctatcagtaaactgaactctatcagtttattaacattacagcaggtctctgttctggtgaactccctggtgctcttactgcgttacccatttttgtttttttcgctgcactcaccagtctaacagtatctgcccactggattcacagcgctggcacgtgccaagcgcctaataattgctcactggtttggcggctgactacccaggagaggaaattaaacacaaaggcagtattgatcatattcagtagtgtttcgtgcgtttggtttggaagtggggattggggaatggccaatcacttccaaatttaaaatattgcttcctggaagaaaatggactcctcaaagactggatatttcatgtctgtagtcccaggacctggccctgcgtcaggcacattgtaggtgttgaaaatgcacctgaggaattctgagttgcgcggaactgtgtattccgagcacaacgcgtcgttaaaaaccaaacaaagcagaacaaacttcgttcagaagcgactcccgctatacttagaaactagaattgacccctggctgcagggttccgctttaccaacacaccgcagggaaagggcttagaaatagtgaaagcggccgggggcggcgggtcacgcctctaatcccagcattttgggaggccgaggcgggtggatcccctgaggtcaggagttcgagaccagcctggccaacatggtgaaatcccgtctttactaaaaatacaaaaaattagccagggtggtggcaggcgcctgcaatcccggctactcgggaggctgaggcaggagaatcgcttgaaaccgggagccggaggtcgcagtaagctgagatcgcgccattgcactccagcctggaagagtgaaagcatgtaggctctcgtttcatgaagacaaagatgaggatcacacccacaacgacacaaacatggtctctcagggtgacttagaagcgaaggaacaaagtgcgctgcctggggaggctgggtcttgtagaagcaacaggaaagtagaacgtggtgtggaaagggttaaaactggcgctcggcgggatacagggctctaggtgccttaaagaacacgcggacacacttgtttggcttctgtcgcgctccgtagaatgagttccctgggcctcggtgggccacgcctccgcaaagaaggacaacgcgaagctgcccgcgtagtgcctgttgcactcgccaaggaccggcctggcagagatagaaaactcgcagtacgtttgcctcagaaccgcctcaatccggaaacagaaactccccaggcccggcactgcgggagccacctctttcgagggtgggagtgcacatgcgcacaggggacctgaaaaacccttaaataccggcatgcgtgcggatgaggcctctttccctgccgccgccgagtcgcgcggaggcggaggcttggggtaagttgagcgaggcggcaggggggtgtattggttataatttgtggctcgttgcgttcttgctgggattcgtgacgagtatctggttctttaacaagtcaatgcttttgttttttagtgcgttcaagattcaacttcacccgtaacccaccgccatggccgaggaagggtgagcccaggggccggggttggagttggggtcggggtgcggctgaggcgtggggctagagctggcggaacaggactgggtcaaacgggtcgccgtaagcgcgtctgttgtacacttagcttttgctgagtgcaaggccttatgtggtgtgaggattttaactgatggttctgatgtgtcgcgtttaagcattgctgctggaggtgtaatggacgttaatactgctttacaagaggttctgaagactgccctcatccacgatggcctagcacgtggaattcgcgaagctgccaaagccttagacaagtacgtgtatcagtctcaatactgtgggttcttgcaaccggaacaaaactgccacccaagggaagaaggcatggagttcatggtgttagcgcaaaagttctgaatggcatccgtcctaccggaaacctaggaaaaggtatcagaactcagatctataaagcccacttaaaatgtgtgggttgctgtttggaatggggataagcactcaaaactacagtgtttgaatgatgactttaattgtcggataccccttcactccttttatgagtgaaacataagagtctgacaaacctgtaggttgtggagctagtcagtcttatacttatctggcagatagatgagatggagagccacattacatctggtagtttgcaaaacaagcattaatttaatggaatttcaaactcaggtttcagaagcatttggtcctagatgaatttagtagtataatagctgtgatttatttgaatttgggatatttgttaatgtatttgaatggatcgagttaatgtgttttttagggtggtggcattgacaaatcaacctactcttgagctgaatttaaatgcagttttaaggttttacaggacaagttcgttttggtgtaatctagccagttcaatccgatggaaacggcattattgtttaatgtatttagtaggtcctagtatgagtcttctgtatttctatttcggcattattgcatggcatttcataactgttccattaatgccacagtcttttttttttcttttttcttttttttttttgagacaaagagtcttgctctgtcccccaggctggagtgcagtggcgcgatctcattgcaacctctacctaccaggttcaagcgattcttctgcctcccgagtagatggaatt

SEQ ID NO: 47417 - DNA, 642 bp, Homo sapiens
tgtttcctttggggtgtggggtgaaaagaagaagtctaggtgtgaatgctttattttgtttattaactactttttacaaagatgccttgaaaagaatagagagttggaaactgattgtaagtaatggcttcagttgaaagtgctgaagaaattcttttcctatgtgtgcaattttgaccttcagggggcgtccaagtgcagcaaagctaaataagctggcatgcaccaccctgttttcatgctacctgagtaaccttagctcagaaaaatgtagcaaaagccaaagtaagcactccttcctcatctgtcactgcatggacgagagctgaggcagccatatttaatcagcaccaaagtctccccctgggtgatgttcgtgcccttctgtaatattttattctaagccatttcccagacagcattattgattcatgtcattattctcccccaagctccgggagcttgtgcaatgtgataccaactgcagttctcttcatgaacataacctcagaaccgaaaggtaaggtgactgcttttaacattcagaattacccagatggcatattatgcagtgtatcataggcattttaaactcttaaaatcagacaccaattggttataatgcttttgctaaaataggaa

SEQ ID NO: 47418 - DNA, 2044 bp, Homo sapiens
tcttggtctattttctcacaataatagaaacagaagtcctggtcattcgcaaaatccttcaacctaaagaaagctagatgctttattagcatctgattaatacagctgctttttaaaatcaacatgcttatctaagcctctaagatgcgatgagttaaaagctaaaatggaaaaatgagattctggattgcttttttcccttgtaaacagcacctgggctcctaccagtccccacagttagccttcttaccggtgaggcccccatgattaaggcaggtttaacagctgcagatgccaccagggggtgccaaaggacagtacctgcctgcataataggctacagggcactacaaaagactggaagagaattccctaaagctagaaaattagaatgtagacccaccttgggccatgatggagcatattcttataataatgtatttgttctgagaggctctaatcactgcagatggacaggaccattgcaatcatctcagaaacgtcctcattttataaatgagtctgctgagatctagagagattgaggattcctccaacacccatactagtagactgcggcagaactgggaccaggactgaggtctccagatttttcttagaccatcttctgctccaacctgctatcgccccatgatgaaaatgctgccaagaaaattcacacattgcgtttgaccctatcccagggtccttttcaacactttggcagatggaaaatgatctccttccctgaacatccaggttttaattagtagatactgtgaatgttcacttcccaattcctccttacagattcatatagaaatgaacagaattcaccccaagaactttgtgttctagttaggaaaacctcattcctataggagtgttttctaactctttcctacctacttatctccattttctagtgagtaccagccgcaggatctttcttattcctctgatcaggacactgttggcctcttgtcaaaactaacagaatcactcttgccaaaaaatacattagaaactaatattttaaaatatattaaaatgtctgtgttacaatgcatgctaaaaacccatttccaacctatgcagacccagtgtcttccaggtaaaacctatgttcccgctttgtgagagagcccctgctttcttcaaaaacaaccaatttcggggccatattatagatctaggtgaagagcccacagcacaacataaattagaattagaatcataactgaaaccttttagagcgcctattgattttaacatgcctggtccatagaggcaacctcagtgagtccacttcctcctaatttgacagctgctcagctatggccagagcttggactaatgaggttacagctgtcagggttaatcaacagatccaaatatgaacaaggaattgggtagctggtttcagttaatttgtgcaaatgtacggattgggtgggcaatatttacactggtgactcaaaacaaactttcaggaatggagccaaaaatgatctcaccagttctcagctctgctctggagagataagacacaaattacagaaacaggagatggaacacgaaagagttcatagtttcaaactacccatgaaaagcccatttatatccagcttatttccctctttatcaagtatctaatttaatttctaatacttgagtttctggtcattccacaaaaggttctcaaactgtcccctgatgattcagtgtgggatgtgtgggtcttcttcccttgccatgggactttatgtaacagtcatccctctcccaatctgcacacatatgagagcatccaaagtaaatgccacaatccctacatgtccattttgttatgaaaacatcattctattaatataaatacagactgcatttgccagagctaactagaacaggtgcaaagtctttagatgcttgcttgcactgagaaatgaaaagagtgtacaaacagtttctcttgtggtggcactgctggtgtcgatgtaacattcatctctgttgcattccttgatgttcatggaaggtagcc

SEQ ID NO: 47419 - DNA, 2001 bp, Homo sapiens
ctgttaaagaagaatcctggagatcttatggaagagaatgctaggaaagtaaaagagtttgagatggactgagtggactgagggaattggagatgccctccctgagagagaaaaagctcttgggcaggacaggtcattgatgtgtgaaagactgttatatgaaagaaggtttagacttgacccatgacaataaatgaattttcttggaccaaagtttcagggaagccccggatagaaaactttctgatagtataagttatctgaaaatgaaagggctgcctcttaagaaaatgattttcttgacactacaagttttcaaatagacaaaccaggctgttttattgtctgtgttgtagaagtgattgtagtaataaaatttatgaaggatgcactgtaggccaacctttggatacttttttttgtgtgatcttatttaattcacacattagccttccagaggatattattatctccaatattgagactaaggtcccatgactggtaaatgaggcagagtttaaaattcaggttttagttgacagtagagactcttaacactgctctcatagccttaagcacaatattccattttgcttttgaggacatttaatgtcccttcagaactggaaatctgatcattttaataggttaccaccttttttttgtacattatatcaatgctttgctcttgttagtacaacattgggaaacctagatttgtttatcctgtgaacagtttgatctttactggtagagttttttcttagaaaaaaacagtgatatgtttcttagtacaattgatggcattaaatgttttgattgtggtcttatggctttactccactacttgctagaggaaaataattttctgcttcattaatgatggtttgaactgatctgacagaaagtgaatcctgtgccattcaaataatgcttggaaaatccattggatttttgtttatttctttgttttccgattaagggggacttttaaaaacaaaaatttagggaaatgcttctggttttcggaaacatttattcacatttcttggggttggagagaactgacatgttttaaatttgttagagtcatagtgaacaaaggggaagagttgcaggtctcaagtctagagctgtaggccctggaaaggaaaaattgcaaaagtgtccagagaacagtgtgttcatggctttatttgctgttagtccgaggcctgaggtcaccctggcagatgggtcacttgcactgcaagcactcatgctggcctcagggacagggatgaggtcactggcacatttcaagaacagcttcctttctttatgcatacaccactttcctggtccttgttaagggtctccttcctcttgcggttcccatctctgcagctgaccccagttctgactgtgtctggggaaatgggttggtgagggcctccttctgggactatctgtccacctgatcagtgatatagacactgtgccgcggagaggagccacatctcccagccagcctgccagcagagtaattggctcagggttacaagttgtgacaagtggtttttggatcctaatctgaaatatgtcggtttaacatgacctggcattgttacctgatgtttttaaatgcccgtactttttccagaaagtgggaactgatacacagcagtggcatgtcctactaattttcataagatctaaattgatcaggatgctttattactttttttattccacagtatatttttcctctttgactctaaagtgcatgtgcacgcgtgtacacacacacacacagacacaaacatgtgtgcacacacacacaccccccctcactcatttgggagatctaacactgcacatataaatattgaaacttccaggctgggcgcggtggctcacacctgtaatccaagcactttgggaggctgaggcagttggatcaggaggtcaggagttcgagaccagcctggccaacatggtgaaaccccgtctccactaaaa

SEQ ID NO: 47420 - DNA, 1038 bp, Homo sapiens
atcacttgaacctgggaggcagctgttgcagtgagctgagagctgagatcgcgccactgcattccagcctgggtgacagagcgagactccatctccaaaaaaaaaaaaaaaactactacacagaataaggtcagctaggaaaagtgtgcaaatggaagaaaaaggagagctgaggcctgaaacctgaggtgtgccaacattgaaaggtcaaatttgggaaataagctagtcaggggaaggagcaatcagtgaagtaacaaatcccaagagagtggtgtcatctcagatgctcaaagaaggaagtgttcaaaaaggcgagagtggtttacagtgccaaatgttacacggggcacaagccaggaggtgacagagaactgacctttgtcttgtcaaactgagaggtgagtggttttataaacaagagcagtttctgtgaaatactgagggtgaaaagctgattagagtaggttcaatatattaagaatatattgagtatacccagtcacggtaggaattttactaaagaagagcaaagaaatgggctagacatgggtatgtggtcaacagagggtttttatttcagacaaatggccttatacttgaagcctcatgggaataatttagttagagagataaaataatgatgcaagagagagatgatagttgtggaagaatggatgggaccagtgaccttagaggagcacagaactcctcattttaacaagagaaaagttgatatacaagcacatgtaaaggttggtcaatttggtgatgcaaagatgaggtcatattcttctgaatgcttctgttttctcagtggaataacaaatgaggtcaccagctgatagtgaagaatgggaaagtgaagttgaaagtttgatgacagaggaaatgatatcaatttgccttctcagagatgaggaaagcaagtacaccaggcaaatggagtaaggcacacagacatcactttccctgattcctttcacggctcatggtcaatcctgaacagactgcccacttccacaaacacatgattgt

SEQ ID NO: 47421 - DNA, 547 bp, Homo sapiens
taggcttttgcccatacttctaaggttcactatgtgagacctctagaaagtttcctattgattttagcttctaaaaatctcttgaacctctgtacttatcacttactctccactgctactattgacaactctcccctgcaccattttaatagcccctaatatggtttggctatgccccacccaaatctcatcttgaattataatccccataatccctaggtgtcataggagggacccagtgggaggtaactgaatcatgggggcggcttcccccattgtgtaattgtgatagtgagtgagtcattacaagatctgatggtttcataagcatctggcatttcctctgcttgctggcattcattctctctcctgccatcctctgaagaggtgccttccaccatgattgtaagtttcctgagctctccccagccatgtggaattgtgagtctttatactgtgagttataaagaaaaacctcttttctttatacattaccaagtctcaagtatttcatcataacagcatgagaatggactaatacaactcc

SEQ ID NO: 47422 - DNA, 1073 bp, Homo sapiens
tattttattctttggtccttttttaaatatctgcaacgtaatttttcccgaagatatttcaaatttatcttttatttcattaaataataactatagttttattacctgttttataacctgctaaatccaaatattaagtatttgtggttctatggcctttgttatttctgtttgttcttgcttatgttgtcttctttcctcatgtgtctgtttaaacttgactacacatgttctggtaatagtactttaaaatgtatttgtgggaactatcctagcctaacaggaatccaccttcctatagagagatatctttgtttctgctaggcacctaaggacaccatcagtctgagactaccttaatctaagttcaaagcttgaaattcccgggaccgtcaccatgatggaaacaaccaaaagaggatttgtttatttcaggtatattcttgccctaaggacacagccctttcatttcctacctcactgtcaggaggatctccttcctgttcagcttcctgctttgtgcaatccctgggcaattgccatacctttcactcagtggggacatcaaaacgaaagttcaagttgtcattacccctacaaagcataaacaccttctactgcttatttatctctcttggttctttttcgttcctaattttggtcttacagtatcttattctctgttcagtatttgcttttaaaaaggattttagattttttccccagcatttttaatagttttcttcagaatgtttggtcaattaccaaaatccagaggttcatttctttcttcctgtgttatatttgctatacgtttttttttatttttaagaagttatccatttcttcaaaatgttcaatttattggtacaaagttgtttatggtgttctcccttttattgttttaggcttcattatatctgaagttaggactccctttttcattcttagttgtttttatttgggctttatctcattcttcttggccagactcacccaatggttattttacgttttttttttttaatcaatagaatcatctctgttttctgtttttctatttcatgagtttc

SEQ ID NO: 47423 - DNA, 1315 bp, Homo sapiens
ttatgccagctgcttccaaatgatggtatatatggtaagcctcgttaattctattggcatgatccattgctgcacttcctttgctgtaaaatgagttccctaatcaaatgcaatgttgagtagaaagcactgatggtagatagggcattttgtgagttcatagatagtagtgctggcagaagcattataagcagtaaaggcaaatccatttccaaaatatgtgattattccaattaagatgaatctttgctccctctatgatggaagaagtccaatgtaatcaacctgccaccagatggctggttcattacccctgggaatggtgccatatcaggtactgaatgttgttctctgctcttgaaagattaaccagttggcagtagtgctggcaaggtaaactttggaaaggggaattccatgttgttgagcacatgcatagtctccatccctaccactgtggccactttgttcataagcccactgagcaagcactggttggttgggcaaagatgctgactgatatccacagagtgtccacctgattattaggagtctcctcagcaatggatacatttaatgtagcagatatacttcatagtttttaaacattcaggtaagtccttccagatatctctttcccacacttccttgttgcctatttttcaatgtcattctttccaagtcacagactatctatacaaatcattagccactgcccattctggtcatctctcgctccagacatgctgggtaaacaaatgtactgtttgaattatgcccacctggaggagctgccttcaccactgcccttccggcgcctgactagggctgggatagccacctgtgctgcagaagatggattctagagaggccttccatgctgcaggagcctgtcagggaagcacactggaaccagaaagtaaaccctttcctatttcaatgcgtctctagcattctctatggacagaacttaccattgtggtaggtagacctacctaccacatagagaatgctgagagaagtagtagaagcctattttaaggggtcagatccatctatatagaacaagcatgaaaagtgaatttggaactgagaggcaacaaataaattacagcacaggtactatagagctggctagcttaggtagaaaaactacctctctgtcaatcaccgtggctattgcagctcccatttggtctatcattagactggggataggcagagaagaaaagtagttctcccaaaataagagggtgaagcacttttcccaaaagaagagaggagttctgggctaacaaaacaaaaatgttcccta

SEQ ID NO: 47424 - DNA, 2316 bp, Homo sapiens
agtacagaaatgaaaacaaactccatcattctacggagctttcaaatgctcgaatatgtttctgaacactcagaggggaaagcaaaaaatcaagaggcatccttggagatctcgtaaataataaaatacctaaatggttgcctactgtcaaaaccccaagaattcagcccacgtcttctcttttaaaaaggcagtggcattttcatttttttcatctgattcccaccaatcagaggccaggtacccatgaacccggctcggcgtggtcttttaataattaaatcagggctgccattgacctcaactaacgccaggggcttctgactgcagccgagctctggtggaaaggccgatgccggcctgagagtgggaaacgtggggccgggagccgggggcttccgcgcggcgtggcgtggcgtggcgtggcgtggcgccctcagggccgttacgcgattttcgctcccgcgggcagcgcctctcaggccactcccgagggaccccgaggacgcactcgggccccagggcgacggttcaaacgggccattgtgcgcccccggggtcccccggcccctgcagggctacttgggcgcagagccgcggagggtctccgttcctagaggtcctcctatcccgggctgcctgagtcctcgccagcatccgccctctcccactcccatccttcctggatccgcctctcggttcccgagggacagtcccgaccgcaaacccacgtagagtaaggaatgtgggacaggcgacagaagtggcatacggtcctgcgttatccctccgtctcgccacaccttgtgtctccatctctccccacttccttccctccgtctgtcatctgtcatccccggtcgctctaagaccaggattccaattcgcctagtgaggaatctcactaggggaatttatcgcgacatcataaattaacgggttcattttgactgaaaaagcgaaggacttttttcaggcagaaaacaagtctcgtctggacggtaaggactagctttagcaattatataatggggggtggggaggaccttttgtataaatttaatgagctgatgagaaagttctacggttttgacaaaaaagtccacctaaatattcgactgtatgccagaaattactacacgtttagatatcaactaaaaatatacaaaggatacacggtgttttcagaaccctttcaagcggttcttaaacaaaaaagtctagtccgatgcccattagcgccgcccccatcccacctcttacctcccaccgagcccagcgggtgggcaggaggggcctgatttggggaccaggaaggaggaaggaagggtgggggcgggggacggggaaagtgactggagcagtgagagccggaaatgagtggctagcgaggcacccaggagcgccctgtccggcggcgctctagccctcgcgcactgtctctatgctccccagcgtctagtctatttattgtcgcggggaagctgcggccgcctcgcacccggaacaacaaagcaaggaagacggagtccgagcctcgggggctcctagcaacgggccggggcgggagttccatggagactggggagcgcgcccgtctcatcctcatccttgtcctccagcttctccttcgcatccgacgcaaccggcagcagcgctgccgccgcgtcctcagccaccgctccctcttcccacggtaaccccctaggcgaccctgggcacagggagcgcgggcggctgagcggcctgagcaccgggtgcggggcgtctgggcgcggggtgggcatgtgcggagcccgggccagacttggggtgggatgtgtgggggcgggcgactggagggcagccgctgaggtgggggaaaccggtccggtggccgagggagggctcagttctgaagaggaccgggcgatatttggggatctctttagggataacgggttgggggtggggcgtccgtacctgggagcgttaccgagcctggtgtaggataagaaaagaagggttatctttcgtttaagccaccactgggaaagacggggaaaagagattcctcatctgtctcggagccatcacccaggggaagagggaccgtgcaaagatgctaggggtccgttgcttctcagaaaacttacagcggcttctctaatagctcccaaaaagcggcttcgtcggtttctgattctggcaatgccggcagcctcgctttattttattattatttttgaccaaaattaggattgatggagaaggatctagaactgaagaagagaaaatgaattgtgggtagggctaagcagggatgagagtcgggat

SEQ ID NO: 47425 - DNA, 1166 bp, Homo sapiens
ttataaagaatactagttttttacattgtggctgcaaggaattttaaaaacaactatagtatgtttttatcattttctgatctttttgtgagttaagtcaaattgccattgtttattttttgaagtgtgaaaatgcaaagagagaattttttagctgggtcatgagtcacgtacttagtaaaaactggggcttgtttgtttgtataaatcataggagtctcggcaaatacatgttggaagattctgatcttgataaaaatggtattatgcaaattacttggtagagctcctcctgtacacccaagtttgcaaactccttgaggacaaaagactttgccttaatcatttttttccctccattatcttcagtgtataggtgttcagaaagaaaataatgaatgaatggttagtaatgagaaaagtctgttagtaaatgttattcatatttttgctgctttaaacttaagtcagttactctgcttgaaatagaagtatgtcatattttttatagtaccagcaagttgcatgagaagggttatatgccactaatggttagacattggaaccagagtccaacccttgaacgtggtgcatttggggatttgtcattactgtggtacacctggaacgtagtgtttgtagaggtgaatagcaggagataagtctggcaagctcctgtcaagtaaaagttactttttagtttaaggaatgaaagttaggcctagattttgaaatatattagatgtcatgttagcttttttaaaaatgacatttttagtggggaaaagaaaggacatgatttggtttgtttgttttgacagagtctcactctgtctcacaggctggaatgcagtggtacgatctcggctcactgcaacctccgcctcccaggttcaagtgattctcccacctcagcctccctagtagctgggattacagacatgcaccatcatgcccggctaatttttgtatttttagtagagaccaggtttcactatgttggccagtctggttttgaactcctgacctcagatgatccaaccaccttggcctcccaaagtgctgggattacagacatgagccactgtgcccggccagggacatgatttgattctagtaacatttgaaaaataaataatatagattcattttttacatttcaattt

SEQ ID NO: 47426 - DNA, 596 bp, Homo sapiens
ttaaaggctgtctttatcatttcagagtgtctcttcaaaaccagttccatgacactgaaaagagagcacaggagtcgcaactatgcattggtccaaagacaccctcctaagtgttctggcactatccacgttcagaaggtgttgaggccattaggtctctggagaaagctgcctggattggcccctaccacacagcttgttacactccaagagctgctcctggggttttcttttttgaggctgttttggcactaattcttcttggtgatgactcataaaacaaatgttgtttttcacatagttcctgaaagagaaagaggcactaatgaaaatgtcattcttagtttacatgaaaaaaatgtgtaggctattattttttaaaccaccctggggctttaatgttttagctatgcaaaaataaatacacatttttattaggaatcctgctgcatcatgaaattcagtatgccacagactttggtcaatctcatgcaaggggtaacggtgtcttctcagaatacaatcccagcagtcagctctgtggggaaggattccaaggatagtattacatacagagaaccagtggaggtttcatc

SEQ ID NO: 47427 - DNA, 700 bp, Homo sapiens
caaatttcattagcttaaagtgtcatagtagccatatgagtatctcataggtatacactcaagataattgaaccccaaagtaatggtagaaatctgtttccgggaaactgttcattaatggtaattatcattgttaagtcttaaaaagcaggtttaaggttcaggagcaggtctgagtcatcagaggctggtggtattgtaatgtttactctatctgcccaagcagtcttatagcgggaaatatgtctactcacagtgcagaggaagggccatgtcttggtcttccatgtcttggaccatgacccaatcttgccacagctgtttaggcctgaacttccatctctgacttggcacagcaaagagcagcgtcaatcagatttcacctaacccttctctctctctctttggaatttgaacaaatcaatatctagaaactgagtgcccttagaagtggaattagaagctgaaaaatgaggaggtggagttagagcaggagaggacatatcagccatgtgcaagtctagttattaattgagattaagcaggccaaacctgctggttgctgaccagaaggaggcagatacagagagtatagctcagtccattcacctacaatctccctgaagatagggacagtgtctgtcttggtcattatcctttccccaatatttggcatagttcctggttatgaaaaaaattc

SEQ ID NO: 47428 - DNA, 524 bp, Homo sapiens
caccacctgcccagcttccatttaggaaaaaggagttcacagctttaaaagcgttttgagaacaactgccttagaatgttcatctgctgagcagaagcgtgtatttcttaaattccagactgtggcatcttcagaggggataaaggacagtcctttcagctgagttcgtgagtcccgttcttcatgttctgggtcccagtgccagagagttctgcagtgctgacaacctgcactcatacagtaaatattgttcttgttttctgaacctttggacagttgggggtgaagggaaacttaagaggactctgtccccagccaattgtttggatcatgaaataaaggaagcctgggagctgaagtagaagtcagtattgaatctcctgggccagaggccaccagggtcagttctgcaccatcctctgtgtgaccgtgggccgatcacacatcttttgacctcagatttcccttgtgtgagttgctccatccgtctaatatctcacttcatttatatctgttgtcaactc

SEQ ID NO: 47429 - DNA, 1039 bp, Homo sapiens
tgattacataactaataattttatgaagcctgtttaaaatactgatttttaaaacagtggttataatgtcaactggttacacagtgtccatttgtgacaataaatgaaaaagtgtaagcaagcgtgtgcttgtgtgtgtttacaaatgagactatctttgccagtggaccgttccaatatgaaaaacatccatacattgtattatgtaaacacaatcaaggggacccatcataccagtggtggatgtgtaacctgtattttcttggcacataaggttccaccaagacttcgatcttcacaacattacagctccgagctgtcccacgtcccaccagaccctgtccccttctctccactcatccagcgcgcccacatgcgcgcgcgcgcatacacacacacacacacacacacacacacacacacacacacacacacgggactcaagagacagtacactcgggagatgagtacagcttgcttctctgcggtcacccgagcactgcaggctcactttacctctcgcccagggaggatgccggctgccgctgccctccgtctccacggctgtccccttctggttcagcagactggggccctcggtgttttcaacaggtaccatggtcacgtagaagttacagccgcttccccgccaccaaaccgccccgaccacccccgctcccaggagtggtcactttccccataatagcatgctaaagaagagtgtggggaaaaacttcgggcaaagctaatgtgatttgtgaccaactttgtttctatttccgaaggctttgcccttttcggtgacacaggctgttgctattccaagcagcctatcacaggcagggggagggccgtgagtcagaggattgtttttgcctttagatgcagagttggaagcaaggggttaaaagaaagggaactcagacggagtgtttggccattagctaagggtagctcttgtattctagcacctttgaaaagaggcagagaaaggaaacatgcagatttaaatgcaagctgagagtggggatagaatact

SEQ ID NO: 47430 - DNA, 924 bp, Homo sapiens
gctacgtggaatgagcactgttcttcctttgattagctatttttccaaataaagtatttttaacttaaaaatctctctcagtccgattgccatgacccttggatggagggcattaacaaaaagctgttcaatgattaaacctttccttgagattaacctgcctttgataccatgaagtcagaaaaagttgcttgatcatacatgacaacaagcagtagttattgggttgggaactctggtctgctttcattacatgtcccttgtttgccagacaataaggagggcactgcacagaaaatgactactttccaagtttaaataatctgaataactcagggaaaatctggagcagaaagcttactgaaatgcgaaaccttgtgctcagcttctgaagatgaactcattatatttcagctcaggtggacatgttagagcttgtcacgggcttttattttcttctaggctgcccaggatcagaagatccttcctgtgttgggaatccccctctgcaaggaagaacctgtctcctaaacagaagctggaaaggcctgatactcccttttctcttaggaccaggctctgccaagcagttcatgcaccctggattttgcatcagaagctgtagcacaaagtagcaggatctacaggccccaccttccagtgaggatggtggcagtggctctggccaaaatatttaatgtcagagttgctagatatacactgttaggtatgtgctcaggggtggctagattagctcaaagcaggatttggggagttattcttgactacagtttccaagttggagttggtttctgttgctttaaaccaagaactaggaatgacaccagactcaactagataagtcctttttcatgtgtgcagaagcagattaatcaggaagctaatgaagtttaagctgcaggg

SEQ ID NO: 47431 - DNA, 2346 bp, Homo sapiens
gacctcaagtgatccacctgcctcggcctcccaaagtgctggaattacaagcgtgagccactgtactgggcctggttttggtttctcatggatagttcacaagcacttaactaatatagagttaagccctcactagctctcttggaatagaaaagacttccaggaattctcttgctcctcactatgccatctcatgccgtgcatatcccacattatcactcacgtggcacaaagatggaaaagcacagggctagaggctatctctcagtgtgaacttgtcctacagctcccagggccatggcagagggccatgctagaggacagactgggttcttttattttctttatatagaaagtaatgtcacaaaaaaattgtgttacaaaaaaaagatcaaaatgtgtgcaatcaaaaaatgaagggaaaaaagtattatggaagtgtatcaggtaattcctggattatgcaatttttgtaatgcttggcagctttttatcatttgtaatttactgccaggcatgatagctcatgcctgtaatcccagcactttgggagaccaagacggacagatcgtttgagcccaggagtttgaaaccagcctggacaatatggtgaaactctttctctacaaaaaatacaaaaattagctaggcatggtggcacatgtctgtagtcccagctgcttgggaggctgaggtaggattgcctgagcctgggaggcagagttttcagtgagctgagctcatgccactgagctgagatcacaccactgtacctcagcctgggtggcagagctagatagaccctgtctaaattttttaaaaattgtaatttatcaaaataaatattcacctttttttttttttttttttgagacagagtctcactctgtcgcccaggctggagtgcagtggtgtaatcttggcttactgccagctcccaggttcacgccattttcctgcctcagcctcccaagtagctgggactgcagtcacccgccaccatgcccggccaaatttttgtatttttagtagagacagggtttcaccatgttagccaggatggtctcgatctcctgacctcgtgatccgcccgcctcggcctcccaaaaagctgggattacaggtgtgagccactgcacctggcctgtattcttattttttaaaacagagcccccaaattttataaacatcaggccccacaaaacttggttctgcccctatgaatatgttggagaagtatagttctttccagatgaccatgtttactaaaaaccttgtacctccattcagtcctcctcatccccattaccaccctctaaatccgggccaccttataatctcccacgggaagagctgcaatagcctctaacaggtcttcctgtgggcattcttgctttcctaagcccattctccacagtggtgccaagattttttctaaaatctaaatacttaaatggctttcagttgttttaaacttttctccaacttctagttgttcttagggttgatctaaatttcttcatgaggcttaaaatgccccacagggtcttgcatgggctgatccctccaggtccatctcttgccacttcctgactcgacctctgcaatctggtcccatcatgaactatatggtggagatgccaatcatcgcctccttgacctgatattcttttagacagtcttgtctcacactttattgtggttcccatctccccacccgctcctgtcccccaccagcctccagcaaaattaaattaaccaggagtagatgtctcatgctcagggagccgataggacaggctagggtcctctctttcagatcctttttctctctgattaggttaggggttgttatatcaattgtagttcagtgcaggaacttcaagtaggaagaaatttagcacagagaattgggtgcttatattttcactggaaagcctgaaagattccaagcattcaggaatgactcccagaataatacagagctgactcatcagctgggctcctacatctgagctgcccaatggagccatgagttcaggaatgcattgtttaaacccagagagcagaccatttctgctcccatacctgcattctctaggaagctatagatactggaatgtcacctcaggaaaatctcgtatctgcctgattccctaggatagcagaaactccccaaagaggaaaacaaaaagaaaacaaacacactcccttcatattcatcttcgtgcaggtgcatctaactgatatctacacccctactgcaaggaaacctgggaaatgtagctttctaatcaatctctccagtgggagggaaggcaggatggaagttgagagggccacgct

SEQ ID NO: 47432 - DNA, 562 bp, Homo sapiens
cagactcattttacttggccagacagtggttttgtttttgggtttcattattattttaatttcagggcatttaagagaaaatgcattgcccatggctctgattaccatattctaatgtgatttataggactggctcctgaagccattaagtttatgacccctggacttagagatctttcctattctggcgtttttatgactctatggaattggaaggacaggatagttcatagtgagagtgactcacaggaatggctggaagggaaagtaccccctaatcaggaaggttttgggaaaacattcaggtatgccctaggcatagaagaactatttagtaacaggaaactcaagatggtttctactctgttttacaaagattgtagctaggatgaagttgcattttgaaaggtgagatgtcagattctaaagactgtgtggggtgaggcaaaaattgtacgtagttgcaaagggcaaccttgaaagtcaatgctgtgtctcaatgcatctaccaattttattttgtggttgttgtttgctttgtttttgtttgtttgttgttgtt

SEQ ID NO: 47433 - DNA, 3258 bp, Homo sapiens
tgtagaaaatgttacatctacaaatgactgatgcaaatgaccatacatctataaacattcaaaactacatttcatcacatttcaaatgagtatggaaactgcacacagtcatgttgtttcagacagataaaacctttttatgaaatatgccttttaaaataaccactttggaggtaaaatatgcccaggaaaaaaataaaataatactctgactcaatacttaaatatttatatcacttgttatgccataatgaagcattcctgccttgatactaatttctagaaatgctattttaatccattaatgtaggaatactaactgactcccttacagttctccacagatgcacggcacatacaaaaacttactggaggagaagggttggcattcataagctcaggctcctgaggttgggagatcttcaagatggactgaacttcagggctgcagggaataaagggcacgatttagaatccagctcgccactagggggcacaccaacatcaaaagtgagtttctggctctaccgacttctacccggataattcactgtttaaactgaaaataccccaatacattagtcagttaaagaaaataataaaccccattaaatacagaaataaggattgttgctcatggagaaaggccgtgaattcggccaacacgaaccatttatcttacatctccagttcaagccaaatcagcaaattaactttaatgtttaaaatgtgtcaaatatattagaatttaaggagaaatgagatccccaccccagaagaagtcttcgccttcccgataaacgccgtgatgagaatgtttaccgctggcaaattcaaactatactagttatttcctcaaatccggtcaaacttactgtttgcatgcataggagttattggcaatcttctgaataaagtcgttcagacccatcctcctctgcttcatgaaagctgtggatgaaggaggagaaataaagaaacgtttagacggcttcataacgtccggcgccacacacactaatctgatccgggactttcaaaaaatttccactttgcgtctcctggagcagaagtcccgcaagattcctgcactcaccgatgagaattgccaccatgcccctcatcctggagtaagtgagggtgcccttagcagcctcagttttcaccgtcatcaccaccgcggggagacagaaagacgttagcgctcaaagaccggctcggcgtatgctgcgccaggccgcgcgctcggccttataaaaaaggcaccgccgcgggggcggggcctgcgcgacagtgagaagtggccccgcccttcgcctcgcccctcgccccgccccggccgcctcgcggtttgctggcggctacgctgcctgcggcgggcggttctgtccccattgagagggcgagccccgggcgggggcgcgaggaccgcccggggacggcctggcgcagggccgttatcagtctccatcggctcctggggcaggagagagagaacgcgccggcggagggcgcggggagggccggagagcccggggtagttttccacctctctcatttattccgccgccggagaaagccgggttcgcagcgccgaagcgcttcccggcgggtgcgcggcggccacggtggcttcgctcactgtccctgcagataccctctccccggccaggcgccgtcctgcggccggactcccaccctcctccccaacccgagccggcggtgcgcgccaccctccggggtttatccctggggcgcaggcctgcgcgcgcgacctcgcccgccaggtcctcccgttcccgccgccgggaccccggccccgagaactccgacgaaagccggcccctgcctccaagccgctctggggaagtgagccaagcccccagcggggccggcggcggcgcttacccagtccgctcagcaggaaggactcgctccttttctgcgcctcggccctctttttgtggcggggccgcagcagggactcgagccgggctctggccagcgcgccctgcatctcccccatgggcagcgggcggcggggcgcgcggcagacgagagcgaccggcgagcactgacgtttccttgaaggagccgccgtgactcaggccgggcaagatttcctgccccgagtcccaaaacaaacaaatggcccttgtgcacggtcgggtcgcttccgaaaacgccttttttgtgcttttggccaaaaccaagcaaggctgaaaaatcccagaacttggaagaggaggaaggaaggaaagaaagagggaaaagggggagggagaggtcaggaatgtggaggggagggggcggaaataaaagtcgtctctgcactaaaggaagaagtacaatctgcatttcacttttttttttctgaagtaatctctgagaacattttgtccgttccgcatgtaatttttttccttgcatttttaatctctgccatgccaagaacacgtgaggaggtaacaagcgaagggaggggtagctttgcccgggggcagacctggcgtgaaccgggcatcctcgattcctctgtggggcctgctcctctcccgctgtcccacctgaaaaccctgcaggtcatgatacatggtcttaaaatcgtccctaccctccctgggtttaactcaaggctgccccagggcttcttagttttgccacctcgctcgctctttatgtgagtcccacataaactgtgactttatcctgaaagattagccgggtgactccgctgcagaaggcagggaagagagggaagctcgaggcggcggcccgggctctgcagaacagcgatgccggtgccttccagtaaccccgcggctgggggatgtctgggagccgcagcctgaccgccggcgcggggacgtgagccagtgctggccgggaagccgcgagcacggcgactgggcccggagcgggcagttacaagttaccactattcgcagggccaggtacctggcgctcgctgttgctgtctgcggtggctgccctgccatgacctcttgctaccaaaggctctgccattttaaagttgcctactggatctggcacagtcccgaaataccagctgtcaaaccaggaatagcatgtgaaacgccttttccttggtcttgggcaggggtttgttttgcaggcaaaaccacccccacttgccctaaagtgagctctagtctcaactccttggtttgctttgttgcaacagccccaaaccgagagaagggaaacacattctctctcctggagtctggctgggaa

SEQ ID NO: 47434 - DNA, 1427 bp, Homo sapiens
tctttcattcttcgggttgcccaaggatatgcaggttggggattacttctggaggctggaggtagagcccagttatggctggaataagcctccctgctacatgcctctgataagctggaactctgagatgacatgagagcacgagccagagacggctatccctgttctgttatgaaccccactttatatcaaggcaatttaagtacaggaagggagcaagctgcaaagttcaacactgggccatttattctccccattgcgacatcactcagaaaattacagtcatcagtgtcctagctttattacacccccagcacgcacacaagaaatgtaacttaactgattatcctcacaaatcagtccggaaaaaattcaaaacacatgcacaggatttattttctcagaggctctgtggcatgcattccgggaggaacgtggcattcaggtcggagggttctacgcggaatagagaatagatgcaaccgtatgatttgtggttggaaaagaaagggaacgtctgatgtgctccttcctcccctaccctaatgttcagcacttggagacggatggtcggctaaacttatcatttaaccgagagaatcaagttgttgagactggcttttcttccaaccggatacgtgatgggtggagcaggcgccccctgttctgtcccagcaacctactaagacttccgaacaggaaggtgacacacggcggaggggtgcttgaggggagggggagacgggggagctgtgtgtgacgcgcgcctgttaacactgcacaggcattaggttgccctgtagctgctattcaaactcttgatctgttcttccttcctgtcgccagcctctttctttggtccagatagtcctcctactgggaggaatccggcccctttcctcatactccctggtggcgaagtggtccgagtagcctcccgaactgtttgtaaatgcaacctagagggcgatcgagttctctgggagaacttgctccatatacgcgtatacgcggcttcccccacttgtctcctgaggttctattggtccagggaatttctctacaacaccttgtgcagtcatagaaaatatagacggcttgataggagataggctaattacctccccactcctccaagcgaattgtctcacatttatgtctcggtgctgggaaaactgcagtcaaaaccctcaagtaggaatgactgaccaggatgaaaagtttgcactgaaactaaacgtttcccagtgcatgtgcattttaatgcttcagaaaaaattttttcactcttctattttatttttttatttctttatttgtcactctatagtctgatggactataaatgctaaaacctgagagcttcacaaagatatgactttttccatttaattttaaaaggcttataaattattgatatttctcaa

SEQ ID NO: 47435 - DNA, 665 bp, Homo sapiens
tttgaaagaaatctagacatttaaaaaaccccagtggtagaattgtcttgttaaaaagggacatcaagtaaaaggccaggggaacatcaaacaattatgtttcttacctggcaaaaccagtgtctagctaaaataatggcttgcaaatcaatcttgttgtttaaccacttcattatctggttttctctaagcaaagaacattatctgtgttgccaataatagtactggggaaaaacacacattttgaaagtatgaagaaactcattctaccttgaaattctcattcaagaggaaattataggccactgcaggaccagcgattgaaaaacaaaggtgtacaaaaacaaacaactcaggtttcaaaggctaaaaacaaagataacaggaaagaacctaaacttgtgcagcctgtttgcttactgtctgaacaaatgctgggaatgcatgagaaattctaagccctgtgaacaaaagtgtgagcagtaagatgacgggtgatcaattttcttcctttctctatttttcattttttccctatgatgagcatatgccacttttatgttataatgataaaaaagaaagacttaaaaaatgacttttgtttttccaactgtataccagtatctatctacacatagcaactgagcacgctagtcctgtcgtct

SEQ ID NO: 47436 - DNA, 1079 bp, Homo sapiens
tttcgccatgttggctaggctggtctcaaactcctgacctcaggtgacccactcgcctccaactccctaagtgctgggagccactgtgcctggccaagttcgtattatgattcattttataaatgggaaacttaaagacacagctggcaaatgtcaaagctggactttgaactaagatctaacaccaaaaccatgcttgatgcatagtagggccagtgatttatttttttttttaatattaggtaatagcaagtaatatgcccagagacatgatgggctgacaaagtattgacgggtcttgttcttactgtcccttctatgccccagtgctcaacttccccttaacccattccttatccttccccaccaccattccacccccaataaagtcacccaagacaggaaaaattgttaactattttcagaatactttggtaaagttgaggaaggggaaggaaacaaagtcttccagagcagagggggaaaatccctcttttgatgaaacatcctgtgtagcaactgtgaagcctggatttccccaggatgaggttagagtagcaggctgctgcttgtcacatggcctcagttcaaagtcacacctgtgggggcctcccgtaaaatttacctatatatggccctccacaaagccacaaacacagaactcaaaatggcattcaccacttctgagatgctgaacaggaaggaatagcactgtttttacaaattaagtgcacagtatatgtcacaaggaggaaataaaccctatgagtttgaacttgcacatcctctcaatactgaaagattaattttggtggctgaggttaataatacggttattcgtgtttggatatgaatgtaactcgaccgattgggaaagcaggtgctagattgatgtaccatgcctgagacccatgagtcattgtcactgatttacaagctggccttgccatgaaaatggaagccagagccaactctatgtcatacaatttatgccattcactaaaattatagataatttcagcctgtgcatttgcaaaacagtctatgccatttttgctttaaacatcttttgtacttgg

SEQ ID NO: 47437 - DNA, 715 bp, Homo sapiens
ataggtggtcactacctgaaaggtctgctttcatgctggtgtcagatttgcttgttttaaaaataactcagggctgctgatacatgcaattctaagccaagaagagaaccgtaatggtcatcaatttctttctttcttttttgttaccaccaagttaatgcatttaacgttttctaatctacaaagacctataacctctgctccccacgttacttaactagagagctacctatctgctactcatcaaacccagccagagatgccaagttcctgaattttttttctcacatagaaatctagatgaatcccctgaaatggtcattttaaaatcaagtcaaaaggaaaacaacaggaaatactcactagagtaaaagagaaaagtgaatcgaggacagacttgtgtatttacaactctcaaggccaatgaacattggaaaagcaaactaaaatgatagatagcaagctgtggaatttggcttgaccttaaagaggattttaatatgctcttatatcactgtctgctactcaaggtcgataagaaaagcgtggttttcttacggaacagagctgagtcacttatataataccagtgcatttcagttgattgtgatgattttttcaagagatgatgtcacacaaattgagttttgcttgaatcttgcctaaaaatagtttgatttatttactaggtcaaaaagacaaggggatctaacat

SEQ ID NO: 47438 - DNA, 800 bp, Homo sapiens
tagatggcaacctggaggattctatggggaatagttgcaggaggccaggagcaggacagtagcaagaggccattaaaaagatggtagcagttctccaggtaaggttcaaggtggcctgagcttgggaaatggcaatgcagacagtcagtaaggacatgggagtgggaacccatggcaatttagaaggtagaattaaaagtggattctcttttactcctaggatgaagaatctgaatgtaagcatgagaacaaagaagttcacttcaattttctcaagttcctgctgtaacagatggtcagcatagaatgctcagcgaaaaaccacagtagttgccagagaagtcatgtgatgtaatgggaagagaatctcaaatgtcatcagtcgacgtgagtcttcttatctgtgtgaccatggggaagttacttatgcttcctcatgaccagtatcctcactggcaaagcaaggctaaggacaccagcattcctgagttgtgagtcacaagggagagatgatcattggacattttgtaaatttttcattttgtttatcatattattgtttttataggcgagatattgctgtgttggccgggctggagtgcagtggggcaattttagctcactgcagcatccaacttctggttcaagcaatcctctcacttcagccttccaagtagttaggactacaggcatatgctgctgtgctcagctaactttttcattttttgtagagacaggatctcactttggaaggcagctatgctcaccactacactgccaacaccaggatctcactttgt

SEQ ID NO: 47439 - DNA, 1125 bp, Homo sapiens
tctcaattttgagttttaatgctttttaccatcaaaggattgacatatcttcctggaaaagataaaaaagatctttgaagatttgttttcttcaaagttatgacaaccacagcaacgtgcctcagtgtagatactctggttgctaaggaccgcatagatcagggtaaaaagtgggctgatggtacctgtcattttcttttcttttctttttgtcacttggagggaagaagcagcttggtagatgcttgggcttgtgtctgaggcatcacagcagcattgtgaaaaagaatcagtcagcatgatggtatctatctttttggactgacttctggacggatctgccattctaccgctgtactttgctcttcagggaaacatggaagcacattcccatgctaaagaaacttctatgtgatcagttcactatgcagagcactgggagtttccctcctcaacagagattgcagcacacagcctctgccttgctcaacaccacaagattctgtgtcaataatcaaggacaaaatagctctaaaattaaatcttatttccagcctagagaatttttaatctagatttacagacatcataaaaagtaatgattactatgtcaagaaaggtaattttcatgaaggaaatgacttctaatccaaatggtttatttgtaggattaatgtcatatgaacctgttttatacaaagttgtagggagacaaaaaaaagggaagaaattaatttcgagcctaaatataccagtaaataaataagttgacaaaaatgagctaattttaacttcaaatcactcacccaattcgtcttgtacaataacctcagaaacacaaatacaccatgtccggctgcatatgaaagtggcaagagcttgtcatttccatttttaaaaggagaagcaaatgtgtctagcttactcaattttttcctaacttcaactttcatgtttatataaccatcagggagacgtgctgactcacagtcagcctctggggcagcacttcccttttctttagttcttgaagaaacaagtatggtgctcccaggagagtggacaagctaaccatgtgagttttttatacacacaagtaatataatcgtgtacatttatgttaat

SEQ ID NO: 47440 - DNA, 760 bp, Homo sapiens
ttctagaaaaatattatagacactgtatatacaatattttatttaccctcacagaaaacctatggagttcatgttatttatagaaaagtcagctcaggtggagagaagttacataacttgcacagaggcagacagttaattagtgttaaagtttgattagaacccagttctcccggatttttttcatttgacccaattcaggtaaaactacagagaaacaactttctcactgccactactgcccactccaaacttcaggttcatgttgccccttcatttctttcggttaccatgttattagttcgttaattctttaaatcatttcgcaaggatttactgtactgagcacctcttctgtgccaggaatgtgttaggtgcctgccgggaaggatttcaaaattgagggtggagacaggaaaatagacaacatctggttggcagcatgttaagaggtcagtgtaagatgggtgtagcctccgagagatccttaaaacatactgggggtactaaaaacagatacttaaaacaggctggggcaggcaagacttcctgaaagggatgaggcctgcaccaagccagctaggtgaataggtgaaacagcagtggagggccgggcgcggtggctcacgcctgtaatcccagcactttgggaggccgaggcgggcggatcacgaggtcaggagatcgaggccatcccggctaaaacggtgaaaccccgtctctactaaaaatacaaaaaattagccgggcgtagtggcgg

SEQ ID NO: 47441 - DNA, 1650 bp, Homo sapiens
actcaatgaatacttgttgaataaataagggtagatagaactgtacccatccagcaagcaagacgctggttccaacattgctctgttttaatcagagtgatagtggccaaggcagttaatatttttggtcccccattttctcatctatgaaaggagctagtaaaagagttgatgttttaatttaggcttgtcctctatatctctatatctaaattaaatatctgtctcactccatcaccaagccttcccttgagaatccttgtcagtgttgatctgagaagttcctttcagcaacccctcaccagcattcacaggggaacctgctaagataactgacttcctgttactctttcatttcagcctttgtcctatgtctggagacttcttggaagctggagcacacaaatagctacagcaaacttgaggaatgggcatgaatagactggcttcggggaacctgccagcttggccgtgtggccaaggtaataggcaagccaaggcagagctagagctcagagctggaggggaaattaaagcagcaaatgtagaaacattaagcctgaagaggcgacgacgttgaattctaaaatgcaggccaaagctcagactgcaagctgtctggctgctccgggtgtgcccagaagtcaaagtccagcaggggcaaaggtggaggtgtggtcctgcacgtggggtgttggggggatgtggaagaggaggtgctttaagatccagagattccagctgccctggtgcacccttggaagaataaaaggctaggaactggacaagtcaggctcgagtccaagctgcctgaggaatcggggaaagaatggagctcagagtgggaggtcagggcagtatttaaaaatccaggatagcagcaaagctggcggtggcccctgactctggtaagggcagcctgcagcaccatgccaaggggggcctgactgatcatgccctgcatttgcaaacaaggattagtagggtatgagtaggattctgctggtgcctgggaaggcagtgccatctacaactttacaaagttttaacaaaggcctgaaggacacaaccttccccaaagtcctgacgtcgctgtttgctggcaacaaatagagtcaaaagaagagaggcacagaatgtgccaggggtgtgctgcgtacagccccgatgaccacaaggccttcttgggtcaagttctgccatctctggttaagatgggctcaccctctaggaccctgattgagtcctcggaccaccaagagtgccccaccaagagcctccctcttctggtgactcgtgcctgcttcccgtggagagctccagaagggaggaaactgtgaggaggtggagaacgtggcagggatcctaactttcttactgaaggaagttcttcacaagtacccatctgccttcagggaagaaaacataactcattttggtctttcaaattcagttctcaaaaccaaatcctgttgtcagcaatctgtgtcccaacgccttcttcagcaacagcattttccctgtggaattagtttccaatgttctttcttaaataaaccactgaagattaaaaggaatccagatacccaccacattttgtttccttaatgagtaattatcacatttctttggctacttaaatgcattctc

SEQ ID NO: 47442 - DNA, 773 bp, Homo sapiens
aatgaaaaggttaccataaagaaatataaatatttcagtgtctcactctgtagaatccgagttgttggccaggggtgtggcttgaggatctatcctaagcctgccttgaagaagtaaagtgagctgcctaaggtcacgttattggcagagctgagacagagagcaagctcttacagtgttgggcatggagtgagtcagccctgcattgagagaggacgcagcatctgcccttgagaacggactgggaaatggctaaaagaagtcaaggtcacattccggactcctacctacaatcatatttgcactgtcacctggatatgctcactgacttctgccacctgggcagcacccagttcagaactttgcagattgctggaattgctggggagctgccagagggctttcagaactcagcatgagtgcagtgagtgcggcagccagctcccaaaggggatggcctcagcatagtttccagctctcggctctcttaacaggaaggcgttgcggtgtcgcagacacaatctgaagtgggggttcaaacagacacaacttcacatactggttttgcaacttgctggcaaatgagtgaattttactcaatcccaatttttctcatctgtaaaacagccataaaatcgacccccactgcctcttcctcacccctcccacagacaaaggattttttttctctttttttctattcagtcttcactgaactaacatttgcacgccaagcaccattaagtattttgcaaagattgtctcatctaatt

SEQ ID NO: 47443 - DNA, 679 bp, Homo sapiens
ggcattccaagtagagaagaaaatgataaagtagtagaaaaaatatggaaatttggaaaaagttgtcctcaaaccagaatagctactgagactaccaaattgtggctgtaatttagtggataattaacatgaaaaatgttggattagggagatgcatacaattttccttcacagaggtggcttggtgtgatggaaaagataaaaaacaaacaaaaactcgtctagaaattcaatgcttctgttggaatttggttccacctctgaagtgcagggtgacctcgtccatgttgtgtaacttatttactcttctttcctcatatgggaaatgatgatagagtatccatcaacctacccacatcacagggttatctgaggaactgatgatatcactgttgtataaaagctttttgaaagttgtaaagcaccaaagcaacatgtaacatatgaccacaagtaaaccacatgctgttccttcgcgtggaagttggaaagtcaaatgcaaaagtaaaatggaggagatgggttacatcattttaaagaaaaatgcagctgatcccattaaccacagccagatttttaagaccaactttgacattttttgagtgcttaatctttttttttttttttttttgagacggagtcttgctctgttacccaggctggagtggagtggcgtgat

SEQ ID NO: 47444 - DNA, 669 bp, Homo sapiens
acaagatcaaactgaaaaactgaaaattatcaacttttcttggacccatcagagacgtgaggaacaaactctgttcccattatccctgcaaaattctggaatccagaaatgagtccagctgagatctgctcactggaagcagctgcctccggagttcacaaactggtaagaacgcttagatggcaattctgacaaattgctagaggctgagtgtgcatttgcctaggaatgagaaactcttaggagtcatgaccttagggttgaaacacacaaactctctctgagcaggagtactccgggaagccaaaactgaagaagagaccaaaaaaagtacactagaggaatttgaagcctctggcaccttaattacctcagatattaaacacagcccagcacctagcagattagcataaaacctcacactagagatcaatatacctctgtccctattacccagtatgacacatctggctttccacacacacacaaaaaaattgtaaggcaaaccaaatgcaagaaaacgcacaatctagaaagataaagcagcctcaaaaccaggctcagatatgacgcagacattgaaatcaacagacagggaatttaaaatagctatgattaaaatctgagggtactaatgtaaaaaatagataacatgcaagaacagatggg

SEQ ID NO: 47445 - DNA, 942 bp, Homo sapiens
gccataaaagaatagcccaatgtactcctgacatcgtcatctcatcaaaattaattttgtactgcaggaacaatgttaattaccatgacgtttaactggaaaataaacgcgttatttaaaatctaggacatctgttaggagcacaaacttaaaaagtaagcaggctaagggaaatgccaagagtgtgcccagctcttgccaaagagatctttcacctttatgtacaaactcaagttcacgctgatctttgatgcaataaaaaatgtactgtacactgtgagacgaatcaccataaacattgtggactgtcatcctgtggaagtgtgggaggccacctgttctctgtacaaaggacacagacgctggtgctgggacctgaaactcagacgaggaagagaactcaatagggacgctgtcccagaccctgccccaggctgatctttggtgcaataaaaaatgtactgtacatcgtgagacaaattaccataaatattgtggaccgtcatcctgtggaagcatggaaggccacctgttctttgtacaaaggacatagatgctggtgctaggaactgaaactaagaagaggaagataactcaatagggacgctgccccagacaaacgtcaaatcagccaggacagccccagataacacagttctcttattgctcaatctccagggacatttgcccaaaattagagcccacagccaaatacgtggaggctagggaaggacactgcactataggctaaatgactattatctttggccttccaagtcatcagtaactttccaaggagaagaactgcgaaagagcaggaatattactacactattgacagtggtgccgtgaaaagctgcaggctgttaagatagaaagacttgatccaactcagtcatttatcagctgtttgaggacaagtgtcttgtcctctctgaatac

SEQ ID NO: 47446 - DNA, 1003 bp, Homo sapiens
ttattctttctattctttgaaattcaggattagatgtattttaagaacttaaaaactgtttaaaagtgtcaggagtaatcactaataatgcctctttactaccttgttcccaaccaaatcctaattaagtaaagctcttcagtatgtgaacagtacaggcaatttattctatctgcttaatattaagctgtatccaagtatgaatttgatgatgaagaattgaaaggtaaaatcagttcacttcagaaataccttctggtggtagaatgcctgtcactttagtcatttccttaatcatagttggtgcttatgccaaacctttcatttggataactaagggagcttaactcttaaatcctctgtacaccaaaaaaataaataaataaagataaataggtagttccaaagtgcctattactgttatttttcagacaggtaaatagaatcaaaggtcaaattctcatacttctgtctgtggaagaaccgtgaagagaatgaagctcatagatgcccaattttgtgttatcatcacttgcccaatctaacatgtttgacagaaaacccctgcctcatttgaccagaagtagatgggctaatgaatatcgaattcaactggcgatgatactggaggagattctacgtaacagctgcttagatttggcagcactataaacaattttatttttataaacagcaaacggatgctggttctttaaagaagaaaaaatttgctaatctgtctgaaaaagaacatctatggtatgctcctatctacaagtaaataaacaaacctcccaggcagaacccaggtcatccacacatgctaatgtcttctttcattattgatcctcagggacacagcggatgttctacagggttttccaggcccttctccatctttaggatatagctcaggacaccataatcacaataagacttgggtaaatatgtttatactgcagctccccgtttccattaaacaaattacaataacattacagtc

SEQ ID NO: 47447 - DNA, 1024 bp, Homo sapiens
ggatcacctgaggtcaggagttcgagaccagcctggccaacatggtgaaaccccgtttctacaaaaatacaaaaattagctgggtgtggtggcaggcgcctgtaaccccagctactcaggaggctgaggtaagagaatcacttgaacccaggaggcagaggttgcagtgagccgagatcatgccattgcacttcagcctgggcaacaagagcgaaactccatctcaaaaaggaaaaacaaaagaaagaaagaaaggccacaatgcaaaatgcttactgagttcagaccttttctacttcaaatggatgaaccaagtttcagagaaactaagtgacttacccaaagtcaagcaatagtagtttgattattagaagaacaaataactaaccctgtgtaagaaaataattcttttccagggagtcctcagaacgtatgtttaaaaagccagttgtacattaaactccgatagacgtgcacagagaaatttgggcaaagtcctacttatgtaataatgctggtagcagtgactcagacgaacaaagaatgttgtatagaaagttaagccaagccttgggaggctgaggcaagagaatcgcttgaacctgggaggcagaggttgcagtgagccaagatcgtgccactgcactccagcctaggtgacagcgcaagactctgaaaaaaaaaaaaaagaaaagaaaaaagaaagaaaggaaggaaggaagggaggaaaaaggaaaagaaagaaaaagggaaaggaaaggaagggaaaggaaagaaaggaaaggaggaaggaaggaaggaaggaaggaaggaaggaaggaaggaaggaaggaaggaaggaaggaaggaaggaaggaagaaagttaagccaagtcttcaagtcttgctcaaatgctatctctgtcatgagccttttctactctctcagaacacaagtctgcctctgaacttccagagaacttcatttatttctctgttaggatagttgtcacttatttgtttaggcaactcttatgtagcactt

SEQ ID NO: 47448 - DNA, 905 bp, Homo sapiens
tcaccttgagaatgacaagtggccaaaaaagcaaggagaagtgaaccatcattcaaactcatccaaactattgagaagcaactcagaatacacatcctggggatggctgttcatgtacatcagtcatatttgttgagaaaaaaatatattattgatctagtcaagatgaaggacttactctaccctcaagtaaaccttaagaactgccataactttaactacagcctttctctcgccagagttaacgtatacctacacacaatagcggtatttcattattaaccatttgtattgcctttttaatttttataaactgtaaacaatggttttcaaacattaagaacatacaacacctccataagccacagcaatccatcttcaaacaatgtaaatccaacgacacgagtcatacactgggtgagtcagtaaagtcaaggctatgctaagctaatgattcatcattaatctgaatttatattcatgtttctccatgcttgaaggcaaacacaagagattaaattatttttaaaatgcatcttcttgacaaacacaccagactggcaagtaaaaacggtaacttcatttgatgccaagcttccctgaagtaaatcagatatttctgcagaactcagacagagccatgcgtttcaaaaggccctgaaaggtgtgagccacacaagggaacacgaaagagaaacctgaaatgcccaggtcctgaccttcttgcatatcaggggtttatcaggaatgttggaaaataaggaagagagagcatagagcttctgttatcttcctgtgcaatgcaaatcactgtattttccttaacctcagcttcattactatgaaattaaaagtgcaaatcaacctatttgcctaccaggttatggtaaagactaaacacctcc

SEQ ID NO: 47449 - DNA, 1577 bp, Homo sapiens
ctcttgtcctactgggataacgttttaactgtggtacataggttagaagcacactatttgtttacaaggggataaatggttgttgcaattaccgtaaaaagcagcaaacaaatgaccttcaggacttgccaggaaaagcagtgggtctttctatgtgttgaaacaatctgggctccactgatggtaaacacgaggcagagacatggatctggatgtgtcctctggggagggggcagggattgacacagttacagaatttgatccaccccatattcttcccttggagtttaatttccatataactgaaaacatctgaagcaaacagagagaagcactgctggacagacccatatcacaagagtaggcaaaaaaaaaaaaaaaaaaaaggagctcaaacacaacagctaggtgtttgatgtcattcaatgattcagttatgacttaagcgagcttcggaagtcgtgcgtcaaatgataacctgcatgagagaactcagtatagagctggcctcaagcacaaggacatagttctacaactacagaccctaaaaaaaattcatcatggaaaaaaaaataatagaatttttcccctggagaagcttatgtttagatattagatacgtaaaagactgaactatttgtataacctctaagattctttccagctctacaattcactgcatacataaatgggaaatgtttaggcccaggaggcataccaatgtgtacaagtatactgttattcatttgattcttgccccgtatgctttacagagtctaattatctaaatgagatttggttaaataaaaattgatatttctgtatgacaagtatatatttacataaaaggcaatacatatccccacagttttcattaaaatggaaaaataaaacgtattttaaaaagtaattggagaagttttagaaagcacctggttgaggatttctttgttttacaaatgaggaatctcagggaatcttggaggtctgttccttccaggcctcattccagggaggggcagatttggaactagagcccaggcctccaggctctcacgcctctgtggtccgtggtccgtggtccggggcttaggttggccggtaggggtagggtaataaatctcattcgccaaatgaggaaacagcgtcatctagtggaaatttatcagcgtattctagacatgctgttatccctagctctgctgtccctaatttcccaagacaacatttctggaccattttctctcccccatgtttccaaagcccaagaatctcccagtggggccccctcctacaacctcctcaccccacagcatatttcagtctcttctctgccaaactttccaacatagccccaggaatcaatcatttgcctcaagggccaccggggctgttgtcctttgagtgttttttgtttcaagttttcatcaaaataaccctgttaaccacggcttcaggcctttaccaaatggtgtggcaaatcaattccatcatttatgaagatccagatagatactgcttttcattcagccacactgagatgatccttgtttttcccctgctaccatcaagttagg

SEQ ID NO: 47450 - DNA, 859 bp, Homo sapiens
cactcctgctcttgtttctcttattagctatatttattcaattgccaggtcttgcaaaactctactccattttccaggccttggcaatagataatacaagatatgtgtctgggctgacatttttatccaaatgaatgccagatatttcacagagagctaaaagctaaaatcatatgatgtggtgcactggccaatgtggttactgcagtatttcatgtcaaggctagcattccattcatcattcatcaagtgaacacccagtgggataaggaacaaaatggactgtcatgcttctgaagctgccagaccacaaaggacaaccaaacttatacagcttctccttggcacagctcaagagtcaactcatagatatgggtgtgtcctttccaaattctcccagaaaagtagtagcccaggctgaccgcagggaggtgggaatgacctgaagttgggctgcctccccagctttctgttcccatgcagccagctaccctggcaccctgcccttctctgaatcacctctgcagactctactgctcttggaagcccagattatatctccaacatccacactggacctctgtctgttgtcaacagagccagatgaccatggaacccacaagctggagaacttggtctccatacttggctttctgagagagtgttggctctgtggttttaactgcttaacaaataagaagtgaaaactctacacatttagaaaagagggtgggtctgactggactgagattctgggtctgctgagagccctggcttagatgcaagtacactacatggcaaagctgttggacctcaggtggctgtgaaaaggtaggagccgttaccagggaaaactgat

SEQ ID NO: 47451 - DNA, 529 bp, Homo sapiens
aaatctgactctggctctgccactgattaaattctccaatttccagtctgtggtgtcttccagaactaatatcctacaattattcataaatcaagctgcatattgtgatgaaggatgctggcaaaagacaggcccatatgggcgcgtataatccccctaaagtcaattattaatgaagtcttcagctggcagatgctgtaggcaaggactggtctggtgccaacaatgtgatcttctgttcccatttacaaatcaaggctattgtaatcaataaagccttgttaaacattactaagggagtgggcaaatggtgcagagttaataacctcttacacatgctattgtgtttttttcttgatccaaaatgtcctcttctctctctgctgaatcttttttctgctgcaatagatgcttgcactaaacatactctaattcagttacctctaatattaggcattatttatttatcatttatgctacaattcagagaaagccatttcacactgatgcctggaactggccccagttt

SEQ ID NO: 47452 - DNA, 884 bp, Homo sapiens
cacctgccttgggctcccaaagtgctgggattacaggcgtgaaccactgcgcccggccaagaggccagatcttgtagacgttaaggagtagaaacaataggactcacccaccagcagttggtgagaggggtgggtaaaagaaagacaatgacctttagatttctggctgaagtggctgaagtgggaaatcattaaccaagagaagaaacacaggaggtagaaccaactggaggggaaagaagagtttcattttagatggtaagcttctcaccctatggcatatctaggcagagctgccagtaaattattgataagtgaatgtggtgcgggctggacttacagaaaggaaagcaatagcatattatttatcatcacttcaagctatagaaatagaagtgtttacctggaaaagcagtttaaaatctgaggagagcaaattactacgtttttaggtaactaagtcatggggacaaaatatcttaagaatgaactctctaaagaagagactttgactcaatttcaaaatggctggaaggaatccatcctgcagttctccagctggaaccactgaaaaaagacatcataaggctttttgtgtctgggatcatttacaaattgttaaacattgtctcagtagcagaaagtagatctgaaaaagttgacattaagcttcactttgggagagtaagggtagccatactgggctgtgtaaagatctcaagattactctagaaataaccagagtgccttaaactacaatattaagcatacttcatttagctagagatgtcagcacatggtggatatgctgagatggttcaagtaagtgaagagtatggagaatgttagccactcctttaaaatactcaagtcatggggaacca

SEQ ID NO: 47453 - DNA, 690 bp, Homo sapiens
cttgcacccagagatcagatgtctgattttaaagcataaaacaatttgcaaaattgctttagtctatttcttacagaggacctaaattggatggtattttgtgctcataataacctttaaggtcagcatgcattgagacagctgccaatattgcatcagaagtgagtgccaagcttgtttgtccctcccacccactggaagttctcctggagaggtagaggcttatgggtacagaccaatctgcagtgagaaacacctgtgtgccccagctctgaacaaatagggtgaattgacattgacgtcagccactgtgatggcacaacagttaggtgggctaatctgtttgtgcaaatgacctttgctgcagacgaagcccatgccaacactcaagactgggtcaccttaagctcccacattcatgtgaactctctgatggtcttttcagtatcctgcctgcagtgaccttgctggaatccagaaggggtgctgcgctgcaggccagaggcagacctgggagccagactgccaggtgaggcgcctgactctgccatgctcctgctgtgttgcattgaatgagtcacaggactgttctgtgccttggtcccctcatctgtaaaatgggagtagtgatagtatccacctcaggggctgctgtgagggttaaatgggtgagcacaggtcaggctctta

SEQ ID NO: 47454 - DNA, 2028 bp, Homo sapiens
gggttcaagcgattctcctgccgcagcctcccaaatagctggaattacaggcatgcaccaccacacacggctaatttttgtatttttagtggagacggggtttcaccacgttggccaggctggttttgaaccccgacctcaggtgatcttccggcctcaatctcccaaaatgctaggattacaggcgcaagccaccgtgccctgccaaaagttatagttttataaaagttacagtttactcccattatagctatttcatgaattgttttacatagactttggaaggagaaaaaagaatttagatctgcactgtccaattatgatagacattagccacctgtggctattaaaattaaagcctggctctatggctcacttctataaccataaccaaggtaggaggatcccttgagcccaggagtgtgagactgcggtaagcgatgattgtaccactgcactccagcctggacacaagagcaagaccctgtctataaacaaacaaaaaattaaaattaaaatgaattaacctaaaagttcagttccgctagtcacatttcaagtgcttcatagtgacatgtggctggtggtcactgtattgggctgtgtagatatatttccatcaacccaggaagttctattggacagtactgactgaaattctataatttgtatgtatcaaaaccaattaggaaacaatcttaagtgccaaaatgtttcccattgggaattattaaaactataaattacacggactattttacgttttaccttacacacttgaaaaggggaatttcaagctcaccacttcccacccaccagcaatatagacagcaacagtccagaaacaccatgaactttccacaaggtcctcagacatgacaaataaacagaaatctcctgacactgtgtgctcagtgagggttcattacacatcaaaaacaaacatactccgtttttctgactgcttctctatcattggtgttagttaattctctcagaggcagtaaacgtttacgtgtactctatgagccctggagaatgaatccgaagacaagactgtctgatgatcagatttatcacaatgtcattgatcacttattatgtaaactgtatatcacaaggatcaagaacttgggcttgaactgtgctcccactcacttctatggagctgcccaagtgccccagaaatttccagacaccatcccacctactctggagctccgaaccttgggtagcttctccagcttaagttccctttgctatcagctgtacatacagcagccaatttgtgaggaactggggatggcgagggtgagtctccacaaagcccacagtgctcaggccctgaccaggaactaacgcacaggtctactgttttttcagatcctcaaatagaaaaaggtattccacaatatgtcaatttcgatctcaccctttcattgccaaattctcttctcactcccaccccggggaatgaaaccactccagaagtagacacactttggaaggctgtcttgcacttggacctgtagctcttaagcttggaatattaagaacttgctatctttgtccccaagtacagttctgataacttccccaaatctcccacccaatttgaggtatagtcaaacgaagaagaaaaaaacatgcaggttgatatctcaaatttatgacaccaccacagacatcaacctgtagagccagtcagtgcttctttaaacattcagattagtgaccagtcttacttgaagtagtatatcacgttgttccaatacctgaaaagtagtttatcaggttgttccaatacctgaacagttttctatcccattatgattagcagcctaaaggatataaggaagtaactaacttgaagctaaaaaggtagatttgggctgggcacagtggcttacgcctgtaatcccaacacttgggaagactgaggtgggcaatcactttgagctcaggagttcaagaccagcctgggcaacatggcaaaaccacgtctctacaaaaatacaaaaattagcc

SEQ ID NO: 47455 - DNA, 2336 bp, Homo sapiens
tatattttatatttatatatatttttatatataaatatatattttatatatatttttttatatataaatatatattttatatatatttttttatatataaatatatattttatatttatatatattttatatataaaaatatatatatttttatataatataaaatattttttattataataataataaacaccttccccagagacaacctggaaagcctgctccaggtgaggtcaaaggaggacaatgtcctctcgtgcccgaagtgctgccggctgttcagcaggaagacctggagaggcagaccccctgggaaccaacttcccactgcgctactctttcccttctgcctggcacagggagtgccgggggctggtctaggatgattcacctgccttcaggccatccatgttagatattcccataagccactgagctcagacttttgaaagacaatttcagccaggcgcggtggctcacacctatgatcccagcactttgggaggccgaggcgggcagatcacctgaggtcaggagttcgagaccagcctggccaaagtggtgaaaccttgtctctactaaaaatacaaaaattagccaggcgcggtggtgcatgcctgtaatcccacctacgtgagaggctgaggcaggagaattgcttgaacctgggaggtggtggttgcagtgagttgagatggcaccattgcactccagcctgggtgacaagagcaaaactccgtcttgaaaaaaacaaaggaaggaaggaaagaaaagaaaagaaagtttcaaagcccttggtccttgcttcagatctgcttatcttctgggaatttccagcgtcctttgcttgggggtgcctgcagctgactatgactccattaatatagggtggattcacccctgagatgtcccagggccaagcctctcacttcaggctttgttcatgagggtttcagtttgtagtgtggggaagatattttgttcctgggtatctacagcaagccttctgaaatgtgtgtaacagtccagaacagtcactgtcagtctctgctgccaagcttgtcggtgcctcgtgtcagcgctgactcacccaaaggccggtgcaaatcatcatcatcacgactctgaggcttctgccaaacaaatcataggctgcttgctcttcggggaagaatcgtaattctgattgcagctggccattcatcaggtgctgggaatctgcctaatcttgtctgttggcctaggatatgccagctccacgcatctgatgatgactttcccatcccacacctcgtcgcagccctcctccacattcctcagtccagtcttacccttggagcgatcagaacattccaacctcatctcataatggcagttcattccagtgtgactcaacaatttccaacaaagccttgaaaaatactcccggaatattagggattcatggagtcactgaatcataacaaggttaattgccagggttgttgaaatcaccctgtgtagctctctccccactgccagatggacaactgaggcatggagaagcttattggcttgccaaggatcttacagcaaacaactcctaaacagaactagaatgcagaatatacagaacctatagaaatatacaagcatcaaagaagtagaggtattctgaggataatgacaactaattgcaaattctgattaagtattttggagctcctgcctacatataataagcagctggcctctatgtgttcttaattacagctgttggaattggagttatatgtgaaacaagtactctattttaatatttcaagctcagacatagtgaatggcgggagagggtggaaaccccttccctgggggactgaaggtagagtggggccatctggggtggttgggctgctgtgtggggagcagcctctgactctgtgcaatttatgtgacagccccagagcttcgggctctgtgactacacgtgccaattgcctgcaggagcaggtccctgcacagagcataaaatgctctcctgaagcatctttttaaagtgcccacataccaggtcccaaggactgccgctgggaagtaagcagcaggcgctcatgaatttctaatagaggaaaaatgattttcatgcaacatccttgagaaatcaaagcatgtgagaatcatcaagataggtaaaaatttgaatatcagcatatttatctcttcaggggatttttgaacaatttctctgatgtttcaagttcagcaaaatacatacttctgaggtcctctttgcattgattttaggtatcttaggggaaatgtattctcccactaataatctaccagaaagcagctct

SEQ ID NO: 47456 - DNA, 1137 bp, Homo sapiens
gtgttttcttgttttattattttatttatttatttatttttgagatggagtctggctctattgccaaggctgcagtgcagtggcaccatctcggctcactgcaacctctgcctcccaggttcaagagattctcctgcctcagcctcccgagtagctgggattacaggcgtgcaccattacacctggctaaattttgtatttttagtagagaggggatttcatcatgttggccaggctggtctcgaactcctgacctcaagtgatctgcccacctcggcctgccaaagtactaggattacaggcatgagccaccgcgcccagcctatccatgatgttttctggacttacttgttcattgcctgcacacaactagaaggtacactagctaagggcagaaacagtgtctgttctttgctctccgttgtttactctgtgccacagcctagtttggcattgagaaataaaaataaaatcctaagctcccccagttgactgaatgcagcctctcttggccaaagcgatcccagagaaaccttaaaaactgagttcccagccattatgggatgagaggtcaaacacgccatagtatgactcttccttattaatctttaaccagaattctttcctcagtgtaagcagaaaccagctctaaaaaacaagaaatggataatctattcctttatcgcctttagctaaccatctgaaactgcaaccaaattttcctccctctttgcagtttggatgtgacagctcaccagtctcacaacacatcccttcctaaaaactgatcaccatctcgactggttttggctgacttcccgaggatacgtagtgagggttttcatgtcctctgcttcaccttttgacatcagagggccaaaaactcaaccctcggaacatgctaaggctgccattttttgagcacgtgatccagaattcatgtccaccatgtatataaacgcatcataacactgttatataacactactcaggaggctgaggcaggagaatctcttgaacccaggaggcagaggttgcagtgagccgagatggtgccactgcactccagccttggcaatgcagccagactccatctcaaaaataaataaataaatgaaataataaaacaagaaaaca

SEQ ID NO: 47457 - DNA, 1898 bp, Homo sapiens
taaagatgtacaattattatgtatcaattttttaattttttgttaaaaaagggcttaatgactgcaaagcacaaagcaaaagttgaataaacgggagccactgttagcagcaccagcaacattttcctgagtgatgttttggaaattggacatgcagtttgtatggtaaccatatttttcaagccggaaaaaactatgacttatgggatcagataggatatttggaagttggattgctgagaaactgaacatatctattactctactagctagcgcatccatagctcattctattttctaaaaagttatgagccattagctgcaggaaatatttcagctgaatttggcatgtttgtcatttttaacttcactttggcaaacaaggaagagtggaaaacacaaagctggatttcccagagctgtgttaagtcatttgaagcaaacaaaattgcagtttataatttaaccaatgcattaaccaacatttgcaaacattaatccctaagtctgaaggtttactttaaatgcaagacagatttgaagtattaacaaaaaagaaaaaaaatagcaatgttcttaaaaaaaaactttgcatggaatatatatttttataggaagactatattttaaataatctagttatttgtgccttaaaaagaataaattataattcataaggcattagatgactatatatacatcagctacatttaccacttcagatatatttacattctcagtgcaataattgatagctaatcaaatatatctcaaatattttacaaaattctccaagtaaaattaattctacatcaccaaaaaaatgtaatgcatatgccattaaacactttggataagaaaaaagacgctgttaaatctaactccaaaaatatatgggaatttgattttgagtttcatcattcaaatgattgattttattttactaggtattttgaagacatgacaaattatgagaagacaatctaaaacaaagcccacagttttttgcttgtttgtttattttagtaaagctatactttttttttaattccatggatatagtggtaaatttaagcagtgcgtggtggagaaaagggaatatttaacaaagtgatagctcttacaaataatactttgtactagacactgattaggaaatgtttgagaattgcaaaaaaaaactgcacacagggctgtgttaggttggctagaaaaatgacttactttctgcatataggaagagatttgttctaggtatcatacagtccagttacaaggtacatcttctgagaactagaatcttccttctatcatgtttaacaatcctacatcttcccccaactccctctgcttttagaaaactgttacccataattggccaacatattaaacacatttcagtcttctttaagtgcatatactcacctcgtcttttccactatttggcactctgcaatacacttcccctgttgatgggtcgtaagaatctatatatgagctacaaggtaaaaattttccatctatgaagttttccagcatcaaaagtgcgtttgttccagccatagcaaggaaaaattctgcctttcctctttacgactgagcactcaggttgtccccaccactgtctggactcctgagtgagcctcccccttcccagcccccatcttcccctttaccaatcagtgaatgtgggagggcacctgacgctctcagagagcattccagtctccaaactcagaactaagagagtggctgaatgtttcacagacttctagtacattacctgacatggataattgtgtgtaaaagtaacagctacttacttatgtgttcatagccctttaaatcatcagaaggcatctgtgcatgtgattttattgggttcacaccgtaaactg

SEQ ID NO: 47458 - DNA, 960 bp, Homo sapiens
aaaggaacttgaagactaagaagaggactgaggcagcagaacactgtttaaaagacagagaatgaggagcccatagagaagatatagagaggtcagagatagacaggtcagagaaatagacaggttaacaggagaaagcaggtcacagaaaccaagggaggagtttcaaggtggatgtggctaccagcatcagaaccaatgccaaattcaagtaagatagaattgaaagtgtatattgactttggcaaccaagaggtcatttcatgacctcaggaggaacacactcaggagagcagcgtaggcggaagccaggaagcagcctgaagggggaacagaaggtgagaaagtacagtcagcaaacactgttaatcaaagaaaagtaaccacctcttgtattcttgataaacaatgggcatcttggaaactattagcatatttcctctattactagaacactggaagctaataatgataatgataaattttgatttcattgcatgattttttcaaagcaccttcattcattcatttttttattcatgtgttaaatgtattatgtgccaggcactgggctagggccgcagatatagataaagaagagatagtacttgccttcaaggagttcataatctaagtgggataaacagacagcatagaaaaaattataatgctgcatgaaagcacaatgacagaggatacagagaatacagagggacgcgtcagggcatgtgcgcaggtaagcacgccggttaccaatttactgctgctcagttccacattcactctgcattgctggctctgtgacaatggagatttagaggacaaatgacatccttacagtttttattattgtaataataaatcttatatccttttatttattgagtttttaaattgtatttccactttatagtcttctatataggatcttgcccttattaagttagatatattcttagg

SEQ ID NO: 47459 - DNA, 1718 bp, Homo sapiens
aactaagtataaacttcaagatccatctgatcgactcattctttgggcctttttaacatgtgtcttttctaccgtctcctaagtttccactttgaaattcgttgaaaaataaattagcgcaaactgattctgcactaggtatgtatggacatacacaaaaggtttaccatgtaaatctaacacaggtacacgtccgttgaatgtattaagtcaatctgtgttttacaaataagcaacgtttcatggacatttctcaaaggggatctgggagagaggagctagaagcaggcacgttagtgcccaacatgggaggaaacaatggaagaggtgataatgcttacgtgcctaaatatcaccggatctcaacctcaccaatatcctacccatatgacgctatgcagcacctccccctccccaaataaaatcaaccccagagggcagaaatcatgacttaaaaacgacggcatttgaaagcactagaaggcctgttatattccccaactggggctctcccaatcccgacagggcaacactgacgagaaactcacagattgaagtggatgccaacgggctaggatcccagctgtagccgggaaaagaacgtcccggcatgaccctgccacctaccttcatcgtagttatagcctcgaacattccgatgccgggccatgacggcggagagggcgtttgccacagccccttaactccttccaaaacactccgcttagatactgataaggcgccaactgcagcctggagaacccctatgcgccatcttggcttcccgcaggcctctgcgccgagcgcctgcgcaagcgcgacgtcttagctgtgcaccgcgcgacggcaatgcctcagggtcactgtccgcctccctgagggcgcatgcgcactgctgtgcatggcgggacgaggggagggagcgtttgggagtggccccacccaaaggttgggcgacggagggggatggggaaatccgccgcctagaattgactggtttggactaaatgttgcaagcggggaaccttgagctacctacgccagcgttctggattattttccaaatttggttcctgataatctgagaaagctatgcgctcagtaagagcagggaccttgttttatcaaactttgatctttcattaagcacacagtgggcattcaacaaacttgtgtaaacttggaatcagatttagcccaggccggtgcggtggctccttcctgtaatcccagcactttgggaagcctaggagggcggatcgcttgaactcaggtgttcgagaccagcctgagcaacatagcgaggctccgtctctacaaaaaatacaaacactagccggccctgtggtgcagacctgtagtcccagctactgaagaggctgaggtgggaggatcccctgagcccaggcggtcgaggctgcagtgagctgagatcgggcctctccattccagcccgggcgacaaagtgagtgagaccttatctcaaaaaaaaaaagagtccaagctttagagaaggaaataaggctatttttaaacgggtatatattattaaattgagaccctggctatattaggtcaccctgcattcatataatttacgacttcatgtattcactccgttcggcattactatccctagtaaacagcgatttgcccttagctatgtaaacgattttagctatatagacgatatttatcagcatcataaagaaggattc

SEQ ID NO: 47460 - DNA, 990 bp, Homo sapiens
ctatatccacagcacctagaaggcactcatgtatttatcaacaaatgcaggtctttatgttgtctgcaatcttacatgctcctgaggtaacagttcagctgacctgatttagggtcagctaggataaaatgagtaaatattaattaggaataaagtgcatatttctttctttgggagacatagattacccacaccagtggtgaactggtaagccagctctcttgaaattagtcagtcaatcaatcaataaccctgactggtattgtttgccaaattccttggtgcaaatactctccccatatccaatttcagactaccggtatgaagttattggacctgagttgggaagaaatgcacacaatcagcaatcatgagccaatttgaagcagcactagcatacactgcctcacaccccacagatactctgaactattgcatcactcccatgatttgtcataactgtagccacaagagcagcctacgataccttgtgtcttctggaggcatgtaattagagaccccatgaaataaagtcacatacaaatgattcaccaggaaaagccaacatcactgggaatggaatgttaattttttaatctgcataagattgaaattacagttaagatcctgtttgacggaacatggtttcacatttgaactctggagaaaaaataacctggggacatgggttctcattttagaatcttattgataagtgaaatgataacatttactctctaaaccattgtcttgacctgaatgggtagcaaaaacatcaccctaaaaagtcaccacaaaatgaagacctgaaggcttcaaataggaatttttttgccctagggtgtactcctgagattctaccattaggggtgctattctttgatttttctaaatcttatcaggacattaaagccactgtgaaagtgaatattctccatggacagctgccactttaatcctttatcagccaacaccttcactataagtgag

SEQ ID NO: 47461 - DNA, 643 bp, Homo sapiens
ttgcaaattaatgcatatagccaatcctgagaacaactctaagtggcagattcttgttattactcccctcccattttggtgaatctatgagcctagattcattttcagtgaattaatcaaatacaagttaccaaatcacaaccattgttagcaataattattattggtaattcagcaagacggtaaaaactgagattattaagttatgaaactttccattaactgtttttttaaaaagctcctaagaattaggatataaacagtaaattgtttcaaaattttagaagactatataggaatattttgaataaaacattttagcaagtattcttacaaaatctcagtggtttacacatgcacatctgacctaggagatctcaatccaaagttcaatatttcctacacgtgtggtaacactggatcctagagcttgtttgctgaaagttgtgctcttgttgaaagagttcaggtcaggcacccagtctctaacgctgtggaaacactgggttagaaacaggagccctgagcaaaactcttctcttccagctctgctgtgtcaccttcctcttgaaaatggggcatgacgggccaggtgcagtggctcacacttgtaatcccagcactttgggaggccgaggcaggt

SEQ ID NO: 47462 - DNA, 1131 bp, Homo sapiens
gcttattcaagacctcgtatctgtcttctctgcctcctcatccctaaccatgctaggcaaaaaaaaaaaaaaaaaatgtgcattgcataatgaaagtaatggcaaatgaattcgatgttttaaacaatatttttgcgaataggcttaatttgtaaacgtatacaactgcttgaattgttgtttattttataaatttacctacactctgccaccagaattttctaatttcaaagtcataccaaaaggcaacagtagatggcccacctctctcagaaagagacaaggctgtttggcctacctgtggagtagccattcttttattccttaacttttattaaacttgctttcacttaaaaaaaaaagaaagaaagaaagaaaaagaaagatcaaagagccaacattgtgtattaaatggaagagccaaagctttccttgtaagttaacgtgaggtgggaggtgaataagatcaaaaaacatgatgagaaaaataactcagagactttcttagaataattgaagagtgagttaaaagaatcactacaaaaataaatgctaggaatggaaatgagcaaaagtgattccagggtatgcagtctttgatactgataatgaaagtagtgaaagttagaacagggaagttggcaaaccataaaaattgagtcccagagttcccgttaattatggatatcttttttcccctttttgggtgaaagtgggaatggaagatttgggtttatatggacaacatctgtgaggaaacttggttatgcctttctctgactgccaatgggcagcatacagaagggtgagaaagcccaggaattttccattgcctcatctattcttaaaattgttttcattttcactttcaccatttgtattatactccagagtcaccaaataaacataccactcattagaaattaactaaagtaaaagtctaattaaagactaacttctatctggttcatcttctaacatgaagtatttgttataattaaagcagagttgaagaggattgtcttttcttttttatacaagggtaatttttaaccaataaaaataagaatcggcgccatcaagaacttttcgcctgccgatctcaatacacactcaagggatactcacttc

SEQ ID NO: 47463 - DNA, 898 bp, Homo sapiens
taggcattctctcccaatgtttggtagagttagatattaaaggcattttcagtgtaaggcacttactgttttaagctcagtacagtggcttttgttttctgactgtgaaggattacaatggatttgagagatgtgaatcaggatttcgaggaggtgctttattgaagaggctgcagggttcacacagggctggctctctggctgggggcatgtttacctaagactccaaatagacagagtggagatatgaggacctagcgcaaatattgtgcccggctcatttcctggtattgcccacatttacattcaaaagggaggtgtggggagtgaaggctgtgtaggttaagaggcaattctttttattatgcccagtagttgttacattttgtccctcaaaatgagaacgcaggatgcatttctaagggaagaaagcccctaaaggggtttgtctattctcaactttaatgaagtacacgttttaaatattgcctttgtaagcacagcagcattggaatttcttttcagcattttattgaaaagtagggaaatattggagcattccaactggggaaggaaactaagcttctcctttgaagctccagctgcacttaggtctaatgcgaaaggcagtatttgctttagccacttcctgactttctgatgagatgtggaaactagaagtcagcaggattccaaagctgggagtcaaaccctacgtccaatcccttggctcagtccctgtcttccagagatggcatcctgagtaaagacaaacaccgctggtttttctcttcctccagatcaggtagtggaatgacaagtgactgtcattctgctgctatggagaatgtgcactcagaggaagagagcggtaagtcatacattgctggatggcggg

SEQ ID NO: 47464 - DNA, 2153 bp, Homo sapiens
aacaggtgaaaaaatcgttggcatctctttctcaaaagaaaggggaaagctttattttcacaatagatgtttttacaggaatgctaaacgcagcacaacctttgataaggattcttaaatggtctacatttttgttctatttttatgcatctcgaaacaaccctattaatataatttggctcttataaatataacaaattgatcaccttttctcagacataattaagaaggctttgacaggttgaagattcagccccaggttgacactctaaaaggaaataaacacactcagtacacatctgatttaaaagcatttaaataagaatcgggagtaggaaaggcaaagattgaattctctatcagagcaccatgctcaactctccggggacacggagaccagtgaaagaagcgcaaaagtacggtgaggactctcagaaatcgcattcccccgggacacccggcccacgctcgtcggtcactacgctatcagcctccgcgctctcggactccagcagccccgacacgccgcccaggagagggccgggcaggccgagcaccccggcccgcgctcccgccaccagcgcacccatgatgtactcacggagaggggtacgcagaaccgcccgtcccgccggagccgacacccggagcagtgcaaatcaactcccccagcctagcggcgcgtgcgcgaagtgaggcggccacgcagccacctaacccgccagcgacccgtgtcctgaaagcaagccgcggctctgtgccgcagtgcggacagcgcgccgcctgctgacgtcagcgcctgcctacgccgccgttcccatggcgaccgatgcgtcccgcgctctaggcgaagaccgcggccccgtccccgcgcctccaccgccttcttccaggaggaggggccgtgcggcgcctgcccgggggccctcaggccgcaggcgggcgcgagcttcagggaacttagggggctcccgcctccccggccacgcgagcgggaacagtctcctccactcggagcggtaagggacccggaaatgcgcgggtgcccctacagagtcttgagttttccccgccctcacctccgaaaatgctcttttcgccttagaattgtagctagcgcagggaaaaactgactgggcaaaggaaaactggggaggctgtcatggaagccgcccagaataagaaaatgaatgaatgaggcaaagaaacagatttgtcactccccacgcgatcgcgcccacaaaagaaaacatggttttaaggcgtggaaaatgaagttgtactacagacaaaattttaagaaaaaattatccactgttcctttagagctatctccctgtgtgtgaaaaacaaaacaaaagttaaaacgccatccttttctacacctaatgctccctcccacttttctgatttctgccacaggcgccatcttcagctctgagtcaccagggctggaaaaatactagatgcgctactcgtggactcgtgaatacactcgtgaatacaggccatttcctgtacctacagccacccgctgtaagctgttgcttcatttgtacagtaagagtttatggaggccagcttttccattcttactgacattgccacaccttacaaactatatgtcttgtgcttccctaaatcctgtgaggaagcaacgagaaagattactaatccaatgcgtaccgaactgagctgttcaactttccgttctaaacatactctcctagatttctatcttgctgtaagccaccacaatcctcccagtgttttagtaagaacagtagagtatcctaaatgcatcttatgccaaagcatatccattctctctttttaacttcctcagatgggccctttaccagttctctgactccagtttgactcttaaattctccacactgctatcagaatgacctgactaaaaatgtaaatcggataatggcactctcctgctgaaaatttttgaaaggcaatctgtaagagaaaatgattactttgcctaggatacaagattctccatctccctgactagtttcatctctcgttagcttcttgttccaattttatgcaatattgaatcatgtgtaccatgcagttttatgcaacattgaattatgtgtaccatgaaaaacaatccatagcctttcacgccc

SEQ ID NO: 47465 - DNA, 778 bp, Homo sapiens
ttgttcatagtgctttctaaatatctccagaatgcattgatctttattatttcttgatctctgttgcgctttctcaagccttcacgacagtgtatgtcttccctggattactgtgatgatctcctactagactccctgccctcaatcatgcctctgtaatctgtagtgtgcatggttgtcagcaactctgttcatggccaccatacttaaatttttaaatttctcatgtttcagaataaggaaccctttaacttgacatattaggaagacgcttcatgacctaattcctatgtaatctttccaacatcatctctcacggctgtcctgccttatactagatgtgtcaaatgatgcaattacttcatttgtttatctacttagcaaatattgactaagcattcaacattgtcaggcactgtttaagtgttgcaatataatggtaatactttcagtttctagaataagtcctgggccttatctcttatctctgggcctgtgcatatgtttttctctctcccgggaactctcctcttccttgaaagtataaattctgctaagtgcgctactgccttacttctggtaaaccttctctattacctaggctgaattaggtgacttgctgggtcccctcaaaatacccttctctctcatgcatttatcatgctacacctttcacttctctgtctgctccactagagtataaacttcttaaggcaatatgcctttttcatttttgtatttccaagactgtgccttgcatattatagatgttatttat

SEQ ID NO: 47466 - DNA, 741 bp, Homo sapiens
tatttaaccttcttgataagtactgttaacatctttgttttataggtaaactgagacaaaacatgttaagaaaagtgtacatggttacacaacttgtaataatcagagaaggatttagatgttggtaggttagctctttactctgtactagactgccttgagttgttgcaaggagttaataattaatcagattactaatttcagaagtagtccagtggcatgtgcctctataattcctgtgtttggtatgtttgattaacttcccctaaacttttagaactctttttcatgattgctggggagcaccagtgtgggggcagcaaagcttctatctagaagatcagttaagtcaagataaggaattcacagtaggtgtattaggatatatcagggtgtactagtcaatgtcaaccaaatgcagagtgagttgagctgggattactatatcatgctccaacaattcaaagttttcatggggatctctcttttctgaaaccaagtctaaaactctcatacctctcatgtgaatttatgttaaatttcagagcattcaaagattttctcaccctaatgttcccttgaattaactagatcaaactgctgagctcataggaggggcttctgaaatatgtttgcttgtttgcttttgcttttggatagatggataagtggataattgagagaaagaaaaataaagttcatattaataaaattgtaacttgccatatttcattttgttac

SEQ ID NO: 47467 - DNA, 914 bp, Homo sapiens
ggtttaagaagttttttgtctgaatttcctaattctaagtgagagactgaaaatgcaaatgaactatgaccagaccacctatgacaacagaaccctgacccacaatctctgtggccaccagcccaggaagcaaaaccccacttctgtggccttcagcccagagtggtcagggcttggtcaatgactgccagctttccttttttttctttttttttttttttggcttctgcttccaactcaggaccaaggagagaaagccaaatatgttacccttctctaaacaatcacttaggatgccccacttctagttagtgcacttccagcttccctgaagccttcctttttttttttactgtaaaacgttcccattcccatctgtctttgagtctttgtcaaatacaggtgatggtggctgactcacttgctatggcaagctctgaatcaatagcttctgtttgttctcattttggtggtgtttatttagttccacatagctaaaaatggggaaaataaaaatgggaaaaaataaattatccttgtgcatacatgtaaggttatttataccaatttatgcaatttcagaaaatgagaggagaaagcagataccatcaccaaggcaagtgttcaaaagggcaataattacagtgacaagaggaatcccaataacttttattctcagtaaatatggctacacagtcaagagtgttgaggacctgagaatgggaagtcactgctttggctcctgtgattccaccaatacttgcctgaattctcttgaatcaatgaatcaggcgtggaagactagaagcaacaaagagaggagcaggtagtagagggggtaacttttagaaggctgtagagtggtcccttgatatccacagaggattggttccaggaccacccacatataccca

SEQ ID NO: 47468 - DNA, 1490 bp, Homo sapiens
tagaatatgactgatgcaggaaaatgcttactaaatagtttttagtgaaggaaaaagtaggacacacctgctttttacagtatgtacagtagactcatggcatttaacattgtaacctttgattacttaacattgggtggtttgtgatggacctctgtgatctatggtgaataatatgttttcatttggagagagagcatataaaagattacagatcatttcctagtcaatgtttatatatatgtctcatacataacaacttatttgttttataaagctctataaaggcattcctaaattctttgatatgagaatactcaacagatatgagtatttgacatattttgtttttcctacagaacatcatcatccaaatccccttttcccctccctgactccaaatatttattagaacctgcagcataggagtgggtgtgctgggctggatacagaacattaggctgacagattttgactgtcagttaatgtaggagatttctgatttgatctcacaatgtcccagcaccaagttagtgaggatgtggctgcttggggttcgggtaagcgagtgtcctggtagagcatactgttttaaagctcagcaactgtagaatgaaagaatgctccgaagctaagacctcttgactcattatgactaatacatctcagagctgtatcgtaaggcaaatcagttctttataaataattaacttgggtcaacctgaggtcagagataatttgaatgctacatgactaaatgtttcctaccatctagctagtcttgctgactccttgccaaaagctgtgggagcccacctcttgtatcagcgtgatctggatgtgagacatggagtcaaaggtgatcatgttggaaatgtaaggtttaatgactgccctgttggatctaggacttgcatggggcctgtcacccctttgttttggccagtttctcccatttggaaagggtgtatttacccaatgcctgcacccccattgtgtctaggaagtaactaacttgcttttgattttacaggttcataggcagaaaggacttgccttgtctcagatgagactttggacttggacttttgggttaatgctggaatgagctaagattgtgggggactgttggaagggcatgattgtgttttgaaatgtgaggacaagagatttgggaggggccaagtggggaatgacatagtttggctctgtgtccccacccaaatctcaccttgaattttaataatccccatgtgtcaagggcaggagcaggtggaggtaattaaatcatggaggtggtttccactatgctggtctcatgataatgagtgagtctcacaagatctgatggttttataaaggacagtttgcctgcacaagctctcttgtctacagccatgtaagacatgactttactcctccttcaccttctgccatgattgtgaggcctctccaaccatgtggaactgtgagtccatgaaatccccttt

SEQ ID NO: 47469 - DNA, 1146 bp, Homo sapiens
ctctaaaatattttgatctccatgaaaaaagtgttaaagaaaatgaggaattacaattttattatcctaggatttttaaaagtctgtttcattgatcttaaaaagtatatttgtattgttcaaattgtgggctatgagtttgaatcctcatcctgtcatgtactggttgaatgaccttggacaagctatttaagttttctggacttcagtgtcctcacctgtaaaataaaaatgataattgtataccttccccttggggatgttgtgatgagcaaattacttaaccttatgtatgtcatggttgtctagagggaaaaaaacatatatataaaatattggatatgttctatatatgtgtgtgtgtgacagagatacacacacacaaacacacacacacacacacagagatttatgttaaggaattggcacacgttacggaggctggccagtccaaaatctgcagggcggactggcgcctggagacccagggaaaagccagtgttgcagctcaagtccaaaggtcatttgctggcagaattatctcttgctccagggaaggttaatcttttgttctgttaaggccttcaactgattgaataattatggagggcaatttattttgctcacagtccaccaatttaaatgttaatctcaaaaacaccctcaaagtaacaaccagaataatgtgattacatatatgggcaccatgatccagccaagttgatataagacattttcgttgaccaaaaaagccaaactctataaaatatttgaagatatttattctgagccaaatgtgaggaccatgatctgtgacacagcctcaggaattcctgagaatatgtgcccaaggtggttgggttacagcttgattgtatacactttagggagacagaaattacaggcaaaaacataatacatataagattcacattggttcggcctggaaaggcaggacatcgaggggggccggggagtgtgacttccaggtcataggtaaattcaaagatttcctgattggcaatttgttgaaagagttaggttatctaaagcaagcttgtccaacctgcagcctgcaggccacatgcagcccaggacagcttttaatgcggcccaatacaaatttatacacttaaaacattatga

SEQ ID NO: 47470 - DNA, 928 bp, Homo sapiens
cattttgaacattcagaaggaagacctaagtgttgagtaagtgaacagacctttctgctgatgtacttacagagacagaggtccgggccagttccccatcaccccttacccgcaatgttacaggctcttctcagagctttctccatctgggctctttctcggtagcttgttttcacatgtggctgcaagactgaacacagttaatctggtttccctgccttgctgcacagaaggccagtcaacagctctcttttgacttatctttaaacatttttttaaatgttcattattgaggagaaataaaaaggaagcaacagaggcacaaacagagtgaaacgataaggcctaggaaatcttacattgtacttttaatcatggaccacattctttgtttacccaacttgcctttgagaaggagtgtcgcaccctgtgctgggcatctgatcctgcactgctctgtgctctactgggtttatttccacataggttcacatggccttggggcgccatcatggagggtcttgttctcagtggacatggcacaaggcagtatcctcacatagtaaaggttcaatcaatagttgttgagttagtaaatgaatgactcatatggctaattttttaccgatctgatgggtggatgcaatccaacattgccaaagtgaagggttacacagtgggaaggccgtgggggtggatgtatttggcaggcggcagagagaggtacaggacgatcccttacattgtaaatgcaaaacattctcagtggaatttggctttcccacatagtaattatgtgtcatagtgtatacatgctctatagcttatttctcaaaacatatttgtgggtatgtttttgccaatgctattttcataagacatgtctcacagaaatggccaggagcagccagaagcaaaacccaccaag

SEQ ID NO: 47471 - DNA, 1355 bp, Homo sapiens
gaatatagaaaatgtttcttgggctctcctgagagtggggtgcccaggctgaccacaggcacacacacattcttcccatagtacagtactttaaaattaatagcacatgcagaggaaaaactaaaccctttgacgtcactcttgaaatgaggaaacataaacagaaaaggctccactccagtaagctgccagagttgaagccgattggtctctgcttttccttgcctgtggcaactgacagcacctcccagcctagcaggccggcggctgctcacccagccagtcagttggtctgggcactgcagcaggctcggctctgtcccagcacttgtctgggagaaaagtggtgttactcacccagggagagtctctctttctaccttccttctttctcgatctccttgtgtgcttttgtgtttctttatttcttttccttttttttctttttttttttttgttacttaattatattcctaatcctggatgaagttgctggattctgcagcacaagtcttcatgaacaagcagcaccgctcagagatttcacggcattcaaaggtcacagaactgccactatggttaaatgtcttgtttaatggttgaggtatgtacaacaaatttaagcggcaagctcagttttcttgagagaatagagtcacagagagatggcaggatttttatttaaaatgaacctgtacatatatatgttttttgtctgtgattgttactacagcaaccagcttttgaatttccttcctttttctaggcgaactgactaaacattatcacttaccctgaattaaccgtttaagggcagcagggtttcattccaaccagtgtaatgagactccggcattttcactgcactttgagcccacactgaggtggtctttaaaaaaaaaaataaagaatgcaatattttttttctccaacataaatcttggagttgggtaattttcatttttggtgggacaggataggaaaatgctggtaaagggattggtaaggtttgtggaacagggaagaaggaaattagtttttttcttgagtttttcatgttggttgatagcagacttcaagatgaagaaattagtggcaagaagggaagaagctgatagtgagactgaaggtagaaaaaaatcaatagaagatgtccaaaaaatgagctctgaagaaaaatccttcatcaccttgttgcatttttcaaaaaatgttttggattcagaagtccaggagagatgcaagtactaagttacatgaccagaaatttagatattattatttataaaggaaagtaaaacttctttattaccactgcaaatttgctaattatcttttcctacaatagttgaaaa

SEQ ID NO: 47472 - DNA, 649 bp, Homo sapiens
ggtctcaataaattctctttccaaccatctcatggtaatagtatgatattaactatattatatcaaacactgtgatgtaaaataactttgacatgtgtagggacatagtcttacttttagtcatagcatcgacaaaattttaatgcatttcttaacttgactctccttcatggggatatacagggtctctgaagagatctgtgtatacctgatcagagactggccattcctatccatcctgcatgagtaacacaagatatgactcactgctgttcattaacctcatagagttcatttaccttctgcagaagtaaaattgatttgctctttgtaaagctgggtgacagaacttttaggattcctggaagtcacattcaggggtggttcatgggcatggaatctgtgcagttgcacagggtcccatactcagaaaggctcatgtttggttggtttaacgttttgctgtcaccatcttgaaatcattaataacttctgaacaaggggccttgcatttttattttgcagtagaatctgcaaattatgtggccactactgaccacattatagtatcagtgtagcaaatacagttgattgaaaataaaagaactaaaaaatcaaccaagtgccactaacatatttgagagttttt

SEQ ID NO: 47473 - DNA, 727 bp, Homo sapiens
aataaataaatattctctttgtatgatagttcataataatcatatatgttatttttatatttttaattttattttatatttcaccaagtagaatttttaactgctttctggagttgctgcgggaagatcaaagtgtctacgcaaaagtggcctggtgatagggtggggcccagagcccagtgctggtggagacaaaagtgcaaggtacagcattgcaaggtcagcagccgtagactcggatcctcggcaaacgcaggtgtgatcttgggactagctctaggctgaagagctcacatctaattctccagcactatgagccagctagtcttgtaatggcgccctctactgcttacatttgcaagagactgttcctgttgcttgctacctaaaatcctgacaggtgtattgcttttgtagtgtctgtgggaataggtgaggatatccaataaggacacttgaaatatgagtttgaaatttaggaatgatgtctgacatgcgatatagctgttaccaatatacagtcatttgtgaacacagctaagttcaccagggagggtgtgaaactcaaagagtatgaacctcaaagcttacccactacaacatccaagggggatccaactcctcacttaccaatatctgtgcttagatggtgttgggacaatcttggtatccacaggtcccactcctctagaagccagtatcacagtcagcactttagaactgtcag

SEQ ID NO: 47474 - DNA, 1043 bp, Homo sapiens
tagaactctctccctcattcaattcaatgtacctgaaatgagcattagtattagaactcaattcatgagggttatttttactgtagttatatgaaataaatcttggggatttaccttagagattgcataaggtcaatcttgcatccaagtttttactaacattgtttattctaactcctgtttccttttaccctcctgtaaactgccacctcaagatctctcaagcctttatttcctcacatacaactctgggtaaggtaagagaaaacacaagcccagagtggcattttatatgagtcagtaaggtacacccatgtatcaaatggcatgggaaccagggaatcattttgagttactaggttcagtagtgaaactctgtagttttcttggcccttacaaaaccaggtcacagctgcctggcttcctaatttggtttgatgtactgtgaattcccaagggggtgagtcactctcttattcatatggaagtacaggagccattccaaaacaaaaaccagtctgggtttatttatgattttatatgccctttactgccccactatacagatgatccagagttgactttcagctgttaattaccatattggagaggagatacatggcatttttcatcttttgagttacaagacttctttaatgtgaatattccctaagtgcttgcttgcttctgcttttggaatgctttactgaggctggatatatattatgaaacaatgaatgcaaaatcaatcacacatggagaaaatcaaagtagtaaaattaacaacataccttaagaaacagtctatgttaagtcagtgtaatagcatcattatacattactcttgttacctattaagtgctcaagaaaaccataaataccttgctttatagacttgatgaggcagaaaaacctttcctgtgggtcatcaaattaagatgcagtatgactttacgatttgttccatcttagaatttggctgtgttctatctttctgatttcccagagccgtccacttcaggatgtttgggcttctgccagtg

SEQ ID NO: 47475 - DNA, 2299 bp, Homo sapiens
tgctaacttcttagtggagtaatggcatcaaaacttgtaatctgaactaatttaagtataactttattcacatattcttctctttaaggattttcatctcacggattttaattgcagtaataaatggattcagtgtatttttgccccagattatgtactcattctttcagctaagcaatatttattgagaatctatgatgtgatggatattgatcctagtgctggaagcagcaatgaatgaactatacagaaagcctctaccttcaggaagtgagggagaaccttgaagaggtgtctttcaaatattgatcttgccaaagtctgttgtggagtttagtaaactgtaccaaagcagtgtatgactgttagcaaaatacacataatttcattttcacttgcagcttataaaacctgtcagtcatttctccaaaatattggattttctagctctagcttgggatttccattgattgccagtagaatttaaggaaatttcctttctgaggccaaatgcatgtctcagcgctgtccatgtggaaatggtcaatacaatttgaccagtaatagttttttgattgtctatgggaacatctggatctttgacctcacaagtagttaaacaacatgcccttctccctatgcaaaagtgtttgttcgtttgtggctcagaggctctgcgtttgcatgttgggcttcatgttctggaagtcattttctctagcagtgaggttatttaattccaaggactggtttgaatttctttttaaactacaagtgtataggattacatttaattgttggtttatgtacaggagcattgctacactgagctgcaaggagcacattataaagtactcgtttgtcctgagtaaatattcattcagttacaggctggatgagagcccatgcatctctgaatcatgatgtctggagatctggacatcagataggcaaatatctggagatattgctgatattatctattaaccttttgctatctgtagggtcttataaagtagcttgacaattgcagtgtaaatcaggaaaacgaatgcctaaagcttggacacatcgaccagatggctggagtttaacaagtgtgagtacatatttgttggcaacacacagtcagacaaaaaggcgcttgtcctggcagctcacagtgtcgtctgtccaggggcggcagcaacacagactgaggccttgctgcacattgtatcaggctcaggggcaggaacatagggtccttttctgggtcaaatctccctctgaaggtgagagtcaagtcaaggaatgattttcttgaagtgcagcatgctcttccagcagtttctgagagggagatgtccctaaaagggtgaagagagggcatttgttccaggaccctggttcctccaccttccaggatccagaggcctgactgttcatcaccactttcagtgcattctcaacgctcactctctgcatgattcagaaggccacattcttcataatacagtcatgctagacttggaattttgacaagccatgttctcatttctgtgatctatgcttcataaagaccatatggagtatactaaatctaaagaaatctatctgattgtgaacacactgtgtgagacactactaagaagggagtcagagtgaggagggcctctggtggcattttccaacttggctgattgacacaactaaaagtgttagacataattgggagtatgtcattagacactcactaacaaggtggtaccccacttagcagaaccctttttccacctaagggtcctgttcagtgtggtgaggagcgacattggtcagcaaacgtggctgctgcgtgtggtactcatgttacagaaacttcctaaacccttttgggatctctctattgccttgaacagatggcctgtgagctgcggggccttcttccagatccacggcctgcagcatctaggcttgtgcccaatcactaaatggagtcctgcagggcccttcctgatctggcccctgccaacttccccagccttgcgtctctccactctccagttctcctggttatctgaatcccattcccttctagccattcttcatttccttcatttcctcaattgcctttagagttttgcatcaacagtttctcattcttagagcaaacaccctcccagcttatcttgcacctccaaccttcactgaagacttgtttaatactagtttctctctcccctacttaatcagaatacattattcagaaagttttccacaacccatcaggatgtagccagtttggctgatcacctagaag

SEQ ID NO: 47476 - DNA, 1202 bp, Homo sapiens
tagataataagatgaggcatgcatgtaaaattttcagcttaaagcatcttcaaaggaacaatttacccatttttctccaaaccaaataatcccaattctaagtgagactttattgaatttatttctgtttctcagccctaatcatctgcctttgctgatttccattgcccactttcaaatccctactagactttatgaagacctgtatacccaaagcccagtgtaaatatttttaattgaaatgaaggcatgaaatgtgttagaatttaacataaaacctaaaactacataggacattctaattaagacttgactagcaatatctagggacttctatgccggaagcataactagaattaaagtgtttgacttcttctttttaacttttttggtttgctttggttttgtattctatttcaactattctaagtgtgatttttgaccagcatttaatgttgatatagatgtggcttcacatctaagcaaggaaggtgtttttcaagtgctggaagtgagctgccagtatttcccacacatcaggccttgttttttcaacaccttgtggatcgctaattggagtttgcataatctaccgccaaattgcaagcattcctttgagatgagtggaacacacacttcccttccagaatcaatgaaaagagaaggtcaggaagaggaaaagcagcaaacaatgatctaattaatttagaagaaactgaatttctggttcttgatttccttcagaagaaaaaaatgaaatgccacctgaaaggaatgtttgtgattcatgttttaatcccccaaacagttcaattgttagctgctgtcgacgaaaaagagttaagactctgtaaaatatttgaagagagttagtccgagccaaatatgagtgaccaacggcccgtgacacaggcccaggagggcctgagaacatgtgcccaaggtggtcaggctacagcttggttttgagcattttaacataagacatccaacagtacatgaaagatgtacattggttctgtccggaaaggcaagacaactaggagagttggggctgggagtgggggcggcgtgccaggtcattagtggattcaaagattttctgataggcaattggttgaaaaatctaaagacctggaatcaatagaagggagtgcctgggttaagagaaggggttgtggagaccaagattcctttttttt

SEQ ID NO: 47477 - DNA, 603 bp, Homo sapiens
tgttaagaaccatggtaatgaatgaaaaaaatatatgtacatatacgcacaaaaattatgcatgcgcacatgcacatttggtcaacaagaataccgtagagaggatgtgccaggaattatgtggcttggggaacaccctgtgcgtgactttgccacaatccagacttactataaatgagataaaatggaagagggcttcctctccctccttctgttggctgtgctcttttagttctaataaataagaggatcattgcataacatccagcctgttattctaccctgagataaagagagagcagggcagctggagtgaaggccaggtcagagggctccctcccatggtctgttctctgggccggactcactcgctgaactgccaaccaagttcaatatgaaggcactgaaggcacttctacttggcacctctctcatcagactggaagcagtccaggtgtccagggtggactgggaggaaaaacagcatgtgagaaatagaaccaagaatttactttctgttccttcaccctccaaccccacacatacaaatttaatggtgggcttagcaactgtgcaaagtaagcattaagttacatacaacgt

SEQ ID NO: 47478 - DNA, 1033 bp, Homo sapiens
tggcttccctctcatttataactcttattttctttctttctagaatatgtctgtgctggagaatcatcactggcgatctacaattggcatgcttcgagaatcaaggcttcttgctcatttgccaaaggaaatgacgtaagtgctgccgagatgaaacatactgatgtgcatgcagtaaagataagccactttctctagggcaggcttgggaccttttgcgtgaatggcagagagccccccggctgtacttcctgcctgcactgagctgtctatcagaggagatttggtgtcagttacagcaacccagaaaccaaaatctctctgtgtgctttgaaagggccttgcagagtcaatgacctacagtcaggaaaagggataataaacagctctcagttttcacacgcttcagtatcagtgctcgactttgccaaattcccgacctttagtttagcaaaattgtccttccatgtagctccaaatagtaaatatttatcaagaaggaacccaggcattctaaagctagagttcaaaaaagtatattttgtaattgctagtctcagcaaaaatagaagtcagaaattcttttctaaaatgtcttttgctaagtaattgaaatggccctagcatttttttcaccaattaatttaccttacgtctcttgcactttaaacagaaggggagacactcattttctggttcactatttgatagccatggtatgtaggctgagtcccactaaatctgaggccattgtttcattttcctggtggccccaagttagctgctaatactgtcttccaaggccaccattaattctgatctgtttaatgaacacgtgcagaacccaagaaacctaggtgaaaagagtacatagattgctgtacccttcttcaagacaagcacataacttgaggtcaaggaccaagtgctgtctcccaactgaacaagcagtatactctgggttgtggattgattcctggccctctgatttgatctcatgctgtttcctagcacccagaggaatgtgaaattt

SEQ ID NO: 47479 - DNA, 2147 bp, Homo sapiens
aaataaaattagattaaattttaaaaaagaagaggtttaatggactcacagttccacatggctggggaggcctcacaatcatggtggaagccaaaggaggagcaaaggcatgtcttatatggtggcaggcaagagagtaggtgcagggaaactgccctttataaaaccagcagatcacatgagacttactcactgtcacaagaacagcacgggaaaaccccacccccatgactcaattacctctcaccaggtccccccccacgacacttggggatccagcagacaccaccaccacttcatcccacttcaaatgtggtctcccatgctcgagaagcagtactcaccttctggtctgcaaagcgccatcctggcataatttgccttggcatttgtcttttaacgagtattttaaacgatcttttaaacgaatataatatctttggaagcccttatttgcatgtattagttatgatatacctaataaacattccaccactctaatttaccaatctttaccagttataaaagcagaaactataatcatgtctttcaaaataagccttgggctgttttgtagcagtgaaatcgatagttgtacttaacctaaagaacctgtgagaatcccactgcagtgttgaaatttaacaattaagcaatactatccctggctttcatcattgaatttcacaaaatatgttatttgctgggaaaacagttgaatcggcctgatgacgtgaataatctcaggcctgacaaggatatagctgtattataattccttagtgtccttaaatgtaagctacttttgcaattaatactaaatctaacctcgctttttccgtaatttctataatttcatctgaacgtagtaacaggttagcagggggccaccagcctgggcgctctcggtgttatactgtcctctcgtggtaaatatggagaactgcagcctgacggctttttcctctttcagtttcctgttccattattttgccgtgctatacatatccttgtaaactgccttaaattctttctaggacacagcaaaatctaaaataaatagataaacaaatgtataagatgagaactgttgactaggagcttaaaacatgggttggaaaacccatctgcttgggttcaaatcccagctcttaaagcccagcacagtggcacgcacctgtagtcccagcttcttggaaggttgaggcagaagaatggctcaggttcaggggaaaaataaaaaatgaaaattccagctctgccacttaatcagctgtgagaacctgggttatctactggggtggagatagtctctctctatgcctagctcctcatctgtagaatgaagataacaatagcctgcattgcatagtgctgatatacctccatggcaagcactaggaacagaactactactccttctcaaaaacaaacaaaaaacaaaaaaccaaagtgagagctttatcacctaaaaggtcaattacagcttattcttaaatacagtggaacagaagttctctgggacctacagaccacttccccactgtgtccaaattggacacagagtgcagaaaactgaaactgcaacccagctgagctgtgattgtgtcttttttcactggaagaagtaaatcatagaatgttagtgttgtacattggactttggagcacattccgtttggcctcctcattttacagttgaggagtttgaggcccagagaagtgataactcagttctcccgatgcatttccatgatgcgatcactgcttcatgctctgagtccttgtaaacacaggaatttccaggaagaggaaagggcaaagctgtgatcaaccagccatagttttcccagccctagttttccccatgcagctgcagaagtcaccgtggaatgacccacgagcaaggccacaggcacagacacttcgggagctgacaggaatagatctttagagacaggaaggctttcctacccaaccccaccatcaattttttaaaagcaagcatttcccacaaggtaaatataagaactagtctggtcaaaggataacaaggcagtaggtactggaaattccggacaatttgtactactcaagctaactgcaatgcaagacaggctctggaacttaaggcaaagctattatgt

SEQ ID NO: 47480 - DNA, 966 bp, Homo sapiens
aggccgtgaccagagccggatcgcgtccctcgctttggtcacaagcttcctggtgctctccaaacacagcgtggtagccttgctcaccttcctccgaagccgagcccccgggaatcaccagaacatcaagcggagggcgttaggaatcctcaatcaaattccagactgcgccactccttgtgcagatcgctcagacgtctacccagacctcgacccagtttccacccgcgcgcctcggcttgcagccacaggcggtaacgatgccctcagcgaggaataagaggtcaacccggtgcccagccctggagcctcacgctcagccagggtaatgttatgggaagcgcgcccccgtcctcctgcgcccaaccaacccacctgctagtccctaggaccggactgctacttccgcatgacaggactgctacttccgcatcccaggacgaaatcaaactccgcgggccaggacccgtaaccagcctcattgggcaaaactgaagatcgctgcttctgattggtcattgcatgatgtcaggcaattcgggaagcgactgcttttccttctcaagaggcgggtcttccgagagtcagccaataggagctgacgggcagggcaggtcgcgttaggacagcgtcgctcccgcagggcaaggttttaggtacaaactcgtgagctggactcgcagtccggagttcgtaccccacagaactcttcgcagggagtgtcttactcgctacagccggaccctaagcgcatccgccttcccaagttcatctgacacaaaatcgcgatttattttttggtcatttcatttgttcagctaatattaaaatacttgtggaactggcagaagccaagcactacccccgagggttttgcagctttgcagtggctaggattcattctttcgttcactaaatacacctacgtatccaggctaccgaatattgggccggacactctcctgg

SEQ ID NO: 47481 - DNA, 3067 bp, Homo sapiens
tgaaacatgaaatcactaagagaaggtgctccaaggttgtttaccatgagctaccttttttaagtgacaaggtctcgctctgttgcccccgctggagtgcagtgggacgagcacagctcacagcagcctcaaactcccgccgaggggccactttttccctcccatcaaattacctatcctgaattggtcatgatcaaacaaaaatacaaaagccttgtagcagtttttcctacgtaaaggttatttactgcctgaacagtatcctaaccattccaactaaagtcgaactgaaatgagaattcacaagaggaacaagaaattttgttttgctttgtaacaccaaaaaatttaaaagaggctgttgcagtgaggtacaagtctgaagtagctcatctttttcgtcagtgttagccacacttgctttcaacttcagtcttaatttgtttccagttctaaaatgctttttaaaaaagtctgaggtagcaaagtagctgctggtacttcagcttgattctgaagaaataaatcttaaaagcgaatcaagccaactcatgaatttaaaatgaaggcaaagtccaattcgccactcccacccatttctcacaccagctgtccaccaatcgtggctgcaacatttctgacacgactaaatgggctgaatcacttgaaaagactcggcttcgctagtactcatgaagaaccgcactttcagccggatggggcagggccacgctcagaaccaccagctaagacccaatcctctcgctagggaaccgtaactaggcaaccagcaccagtcaacagcgcgcgctcgcttcaaaacagcaggttgccgcgggtaccgaaattaactccagagaaccagggtcagcagcgagaggcagaacagagcactaaaacctagtagcatcacaaaaacgaggcattaactgacgggtggtctgaagccggagggcagttttaaagaccacgcgaaaaggggtagacctactcaacgcactttgctgcgggtcacagttattttctcaaaaccccacaggccacgaagaaaggtggcagtcccagccaatgagaggcggacacaagttgcacctccagcggccgtcggcgccataggcgggggagagaaaaatgaacgagcgcgcgtgcgcggagcgttcagtcgggcgcgcgcagaggtacgggctgaagaaatgggggaagggtggaagaggaagatatgcgcacgcgcacgggaggccgcgcgggctgtgggtctccaggcaggttcgcaaacacgcgcgcgcccgccgttagcactgctcagcgcccccgcccggccttttcggcccgtagtgcctcgaaaacctgagagaagctaacgaaaaaacgcataaataacggcgcaacgtctccttggttctcctttcgccgccaacccgacaccacccacaaaagagtcaaaaatatggcctgtcctcggtcttcactgcccctggagtaacttgaatacattgcgaggcctacctgacacgccgaatcgcggttccgggaatttatctccgttgcaaccacacagcggccatttcccgactcaagaacgcgaggaaaaccatagagctaccttcgacgcgctagcacgtctccgtcacttccgatctggggcgtggcctcgggtgccgctaaatatgcgggcaagccccgcccacccttccgctccggtccggcttcctggctgctattaagatgttgcctgcggccttctgggaagtcgcgtggctggtctcgcgggaagatgtgacggctccgccctctggcccgtagcgtcagccttggccggagaggcggtagagtagggtgggtgttttgtcaggcctgagttagcttcgccatacggcgcttttcgctggtgtctctgcctcgttctgagtagaccccctagacctcaccgccgcccctgcgttttacctcagtaagctcgtctggtctgttctttctgtggggccggctcagaccaggcaaaaaacaaaaagacaatcccacactgaggaaaagaccaggaggcaagacgtggctgtaattgcagacacgctgctccctcagccagcaagcgccacttttcctcttggacgcctaactggagattagaaaatgtggcttttggtttgctattaaattcggcagacgcacttagttgaaaaatggccacgatctaaatccctttcgtggcgtctgatcaaatcggagctcaagccgcagcagccggaaacctcttaggctgctcgtgccaaagaaggccgcccttctggcggcgtgatgacagctttaccacatcggcaacgttggcataggcatgaaaaaataaagagcacgaagcagttgagctttcagcctgtgacgatgatttgtggcagccgaggaacacagcccaacgtagcttggttgtccagaattataagtcagattataaataggcaagccacattcgatttgaatagaatttaaataacagccgtagcacattttgcattaatacttctccgggctgcactttcttagggcctaaaaccgctattgctttgatgtttagagatgttaactaccttgatggatttcagacttgtaattagcaaccagggtgtcagtgagtgaatcgaaactaggattgggccctggttgtgaatttaacactgtgcttagagcattctttcttcacagtccagtttaccagctgaactagaaaaacgacaacattttcatggagtgaatcgtaggttttttattgtacagtctgtccctcaccccattaccacctcaggatgtggacacagaaatccttggcctttttgttgtgccctgatgtcccaagcattcgcaggttctcagaaatatttgttgagtgaatgaactatatttaaaaaaaaaacaactaagggctcaatacacgtctgctattctgcatgtattgggagtcggggcgctcccaatacatgctgttattcatttattcaaaataccccaaattgcaggctaggatattatcttcgacctccctctgcaattctattgcacatgtgttgaaaatgaa

SEQ ID NO: 47482 - DNA, 852 bp, Homo sapiens
ttgccatctgttggggggaaggggaaccaatgcatgttgtactgacaggtaaggaattgtataaattcgcttgtatcctgaaaaacaactcatgaaaatcctcagctagaaaaaaaagtatgtttcttttgctattaaccagcaaatactcgattaatatctgtccttttatcccgaacattaatgattcctttttttcttttccattcttgcctaggcctgtaactttgtcttacctcttcatactatttatttagtttatttggcaacaatatactctaggaaattcttacctcattacaatgctctgtaacatcaggtttctttttttttttttttttttttggcagactctcgctctgtcacccaggctggagtgcagtggcgcaatctgagctcactgcaacctttgcttcctgggttcaagtgagtcttgtgtctcagcctcctgagtagctgggactacaggcacgtgccaccacatccagctaatttttataattttcagtagagacagggtttcaccatgttggccgggctggtcttgaactcctgaccccaggtgatccacccaccttggcctcctaaagtgctgggattacaggcgtgagtcaccgcacctggcctgtaacatcaggtttcttatactgaggaccttgatgatcctggagacaaatccccatggcagtctcctgccttctaccatggatggatatatcaatttgccacagagattcataagacacttgtgaactgaagtcagccaaatatatacaattcctcttccagatatatatataagctggcacaagatagcctgtgagtttgtaaaaagtaaaaaatccttctatg

SEQ ID NO: 47483 - DNA, 2552 bp, Homo sapiens
tccaaaatttagacatccttccaggagaagattctcaaaaaaaaaaaaaaaaagaaaaaacaaattttattttttaaagaattcttttctttttaaatttaagagaagacatttaaaaaaacacaaaatttagacatcttagcagaaatgttggtttcttaaaactactaagataaagctgttgaactaagaaagctttccaaatattaataacattcgttaccatttacaggctgcttgattagtgcctgattaggcacagttacaagcatgttttagatattattctacctaatctttaataaccctatgagataggtgtcactactagccctgatttatggataaagcaagtgaggcacagaaattgtaagtactttgcctgaagcatatgtttaggaggaggcaaaaatgggctctggactggctccagggtccaagttttaactcctacaccgtatggcctccaagacaccacaacacactgcaagctccctcaattctacaaattctttgacacacattccaatttaaaatttcagagctactcctagtacattaaaacctaacttgcccaatttgcctgttagaaagttggttttcaggctgggtgcagtggtgaacgcctgtaatgccagcactttgggaggctgaggtgggtgaatcgcttcagctcaggagtttgagaccagcctgggcaacatggtgaaactccatctttgcaaagacacgaaaattagcggggcatggtggcgcatgcctgtactctcagctacatgggaggctgaggtgggaggatcgcttgagcctggggaagtggaggctgcagtaagccaagatcacacgactgctctccaacctgggcaacagagtgagacactgtctcaaaaaaaaaagaaagaaaagaaaatttggttttcatcagagaccacagtaacaaagatttgtcacatcattatgagtcctgaagcatcgctgtgattctcagaagagatcttcatcagcatcaggataaagaaattaatttttttatcaaatgttaacttaacagagatcaagcattctgaatttggacaccaatactttttgtgagcctaactgtcccaagctttgtgttgatatacctgctatgacttcatacagggatgcctgcttctcttcagtcaacttctaagtctcataaactgtaagtttcagggtcccaataaaagaaaagataatgctaaatgccatagactggtccaggatgaaccatcagtcaaaacccaggatggttttcctttttttgttttaatgttcacactaaaatatcacagtaaagtttgaagataaaatacactaaagagaaactgaaataggaaatttacctactcattaaagtgtatctaatcttggaagaaaccaaatccgggatgctgggaatgactacataggtttcactacaaatgattatgacagtaagtgtcagaagaatggaattcaagaaacaccatttaataccatttaagtcctgaattaaagctctgctttctaaacacatcacctgaaatagtaatggactcattctttaactctgttctcctaaagtaaaaagatatagaccagtaattatattaactctctcatgaagcatctgtagttataatggctcacaataaataaccaagaaatcctcagatggggctggagcattcaatttgctcctcttgataatgcttcaccaaaaaactatgtcactagccacatgactgcaattacctttgacactcaggatttagtgaaatccagtgtcagtggccaacagtcctttttaaacattaacctcttccttcttcaaaatcatatcaaatgaaaacagaagttcctcattcttctctttcctgttgaactttaaattagaataatacaggctatatgtctttccacctattttctccctctagtcaagagagtaaattatgatgtagaagctacttatttttttaagtttttttgtaaagatgcagtcttgctatgttgcccaggctggtttcaaactctttgcctcaagtaatcctcccacctgggcctcccaaagtgctaggattacaggcatgtgtcactgtacccagtttcggtttttgtttttgttttttttgagacagggtctcattctgttgcacaggctggagtgcagtggcatgattatagctcactgcagcctcaatctcccagactcaagcaatcctttcacctcagccttctgagttagctgggaatacatacatgcaccaccatgctgggctattttttaattttgcagagatggagtatcacgatgttgcccacgctggtgttgaactcctgggctcaagaggtcctcctgcctctgcttcccaaagcattggattacaggcgtgagctatggtgccctgcctggaagctaatttaaaacatcctcaatattcatagcaaatattagatgttaagattgaggtatatgctgggcgtggtggctcatgcctgtaatcccagctctttgggaggccgaggcaggtggatcacctgaggtc

SEQ ID NO: 47484 - DNA, 2843 bp, Homo sapiens
tccctgccactcgggaggctgagacaggagaattgcttgaacacaggaggtggaggttgcagtgagccaagatcgtgccactgtacttccagcctgggcaaaagagtgacatacagtagacaaaatggggtgagcatctctgtgatgtgatttgacaaccggctagcagcaaattgggctcagctgatggtgagaggataagaaagtagaaacgacccacacagctggtttttaggagtctcacagtaacactccacagacctaaagaaacaggaggctatgaggggacactccagcctgcaaggaaggcccaggcatcattgcaagtgcatctttgaaatggttacccgtgagttccgggcttgacaaaacaccagtgagtgggaaggaggactcataactgtgagaacacagggggttcagaagcctgggggtggtggagaggatgaaggttcagaaggtgtgaggcttttcttcaggtaggaggatgagctcacacacggcagtccaccctcatcgctggttttgctttctgcattctgagttacctgcagtcaactacagtctgaaaataggtgagtacaacacagtaagatattttgggagcgaccatactcatataacttttattatggtatattgctatattttattattgttattaatctctgtgtctaatttataaattaaactgtatcacaggtatgtatagaaaaaacatagtatatacatataggggttggtaccatctgaagtttcaggcatcgactgaggctcctagaaggacaagcggaagactactgcgtatggaaacatctagcatagggtagggagcaaatcattgtttgctgaatctgaagtctgtgggtacctaggggaatttctgagttcatgatatcgtaggtggtgtggaaacaagtcccagcataaacccacacagctggctgaatgaagttcaagtgaaggtcatgcagcatcaaagtagatgtgtgtcactgaaacttatggcagtggagtgagaataattttgaaattacttagattgtgagaaaatctggctgatgattagaagtgttgatataagaggtcagtttggagttccactcaaaattcatactaattttaatgttatggtattctaaactactagatgggtaaggggaagttataggattctgaacaataccattaagaattaggataggattttctactgtggtgtcacagaagaatcagagctagcaaattcataaaaagaaaatttgattccccaagcccagggtaaaaatccagagtgctgaggttttgaatcctaatatctcagttgccactttgcatctttacagtgctgaatgaaaggtgtgcaccaggaactgtctacccacaaagaacctgtttttctgggccttaaaaaaaaaggcagtgcagagatagtattataaaagagaagcataaaaggaaatttgtgagggtggcttaatgagatgcactgaataggtggagaactagagggaatgtggctaggtacacagtggactttgttaaattagcagcagctccagttcactttccacgatatttcctaatccacagagcagcaggtgggagtgagggacactattagtcaagagctcagtgggagtttaaatcactaaggatttgtgtatgcaagttctccctggcttacacttaatatggtcatgataactgaatttcaactgtgcaaaaggaaagaaaatacttataataattcaaacacggctgtaatgaggatatgccacaaacacgaaatgaacgttttataataagctctggcagttcaaggaaaaatgatggtagaaggtgcttctggaatggtctagctctagaatttgatccaagtaagccactgcagactgtccaagccaatgtcctagccgaaaacaaacaagtcatccctgcataaaggctagtggacaaaggtcgttaatacaaaattcaccgtcattatcactaggcagggtggtgattgatctgatatctccaggcctttgctagattcaaaacaaagtcctgaaccctggaatgtttaaaggcctagacagactacctctccagctatgctgtctcattctctggctggcagggccagagtgtgttgcctccaatcagttatcttatgaggaaccagatttgggcttctgccatctggcttagcacccatggactaagaggtcttgaatcagcacctagaaataatttccttcaagttctacagaacagctcaacagaaaaagagaactgtttcagtggaaaaagtaaataccaaagtttctaagactattacggatgtaaaaaattgttggatgtattcttctcaactttttatctagggtgtgacacctgttgatgtaatgaagatttaggaagcctcaacaaggcatacctcagaatactgccagttcagttccagaccaccccaataaagcaaatattgcaataaagcaagtcacacacattttttggtttcacagtgcatacaaaagttgtgttttcgttacgctgtagtctattaagtgtgcaacattatgtcccaaaacagtgtacataacttcattaaaaactacttgattgctaaaaaatgcgaagaatcattggagcctttagtgagttgtaatctttttggtggtggagggtcttgcttccatgttgatggctgctgactgataaggatagtagtcactgaaggctggggtgctgcggcaatttcttccctttttttttttttttgaaagggtctcactctgttgcccaggctgcagtgcagtagcacaaccacaggtcactgcagtcttgacctctca

SEQ ID NO: 47485 - DNA, 1653 bp, Homo sapiens
aaagaaaagaaaagaaaattattaagaataaaatggatggctatcctaagttactgtccaagacatccaaggaaaagtaccacaaatcaagaatgtttccaaaaataccccatgagaacaattcaacaaatctacattaattttaaaagttaccaacttttcagaggcaaaatgatttgctgctaaaaatttaaagtcctgagttttcatccagagcaacacactctggttcaatgatgtaattcacaggcaaataaaagaatcacattaagtcaccctccagtcatagcatcatttgatttctgaggtcatttggttctcagacaggagccaggtctgatagtaaataaaaatcaactacagtagtaagattctacttattagaacttccctgtgtactgtctcataaaaatgaagtaatatgcttttggatttaatgtagacagtttcaattatatttaagaaaagcaaagtaagattaattcgagaaacaggaaaaagaaaacgagtcctcagacactggattctatttaacactcttcactttatcattgcttaaatatttgctttctactttgtcatgctacctctctgcatcacagaagaaaatttgatacctcagtgacagaataatttaagagcaagctaaaaattaatcagcacataaaagcaagaaaactcataacccatctgtttaagaacagcttatatattttggggaaggggaagcaagacttaggatgctggaaaatgtaaaacacaggccttaaagctcctttttcaaaaatgtctgatgttgctgtctctggctgataattacagccctgggagggcagctgtgagacaatgctgacaatgatgcagtacacaggctctcaagaagctggtaagctgctgctacctttcatactgtgaaagaacaacacaagggtcagacttcccttttctgtaacctgtgcatttcaactgccatacacgaattcagttatcatcaacagttatacaacctcatgatctcctccctgctccctagcttcaccctccacattcgccctcaatgtttgctgtgctcctctttactcttgacattttagtatagaaagggaagtgacattttgaccctctgcctagaaaaggttgcactcttgagtcactttaactcatcctttaaagcagaaactcacttcattaaaataagcaaaaattatctgaggcacctaaggaaggtggggagatgttcgtttaaaccttgataactcagtatttcctcctcttgatgaggacagagtgactggtcactgctgaagtgagcatgggaaaaattaaacatctctaggccaagaaagtagcttaagtcaaaaaaggcaactgatctgaaatacaccgaatctacaaaaactgtttcccatttcatgcatacacaaccctacagagggtataaacactaccagcaaaccgtgctaggaggtcacaagcactccctggagcatgcacgagcagcacagtttataaaacgttctataggcagtgtgggagacaagggctggatctggctccgaccaaagggtggagctaatgcataccttttggtcttctggaatttccattcttttgctgttcgtcttcctcattaatggtgaataaaccaagagg

SEQ ID NO: 47486 - DNA, 1822 bp, Homo sapiens
gcctctggagaaaaaaaaatcacgagggagaaaaatcggcttcatactatggagagatgggcggggttgggaagccttgctgctggtcttgggaagccttgctgctggtcttggggacgtgatcccctgtccctaagtgtgcccctggaggttgtgggggaggggtatcctcaacacagaggcctgaccaccaaatcccgggctgcagagccaacaatcctcctttgggctcctgcacagactaaaaacaaaaaactctgagaactccgacaagtcaacgaaagtctgatcccgtcaagcccgcactcgcaaacccccaccgtgctgcactgggccccggccctcccgagctcggtcccctcggacgacggtcgtcgccactgcgggcaccagattggggggcgggccgctcaccccgcggtcctgccccacaccgaccccgctgaggagcccccggcacccggggcgaccagggaaggcgggaggaggtgcccagaaactgctcgtcctgccagtcgcacctggccgacgactctctggccactggtttggtctgggggatacgatttcccattcaactgaattagacccgaggccgcggcggggagggcagcggccggggtctctccgtttcctcccccggctcgcctccacctgttgcgggaaagtcgcggtggagcgcccgagggcggccgcaaccccggccggggccgagccgggctggccgagccgcggcggcgaagggcgggggaaggcgctctcggagcagggtgcgcggcgcgcagggccggttgttccgggccgcggccgcgcgggcggggagggggctgccggcgccgggtgatttcggtgccagcccgccggccccgctcgccgtcccctgcccgacgggacccccactatccccgctgtgcggtcacctgtttcgcttcgcactgcgccgtcgccgcccctgtggccgtcgccgccagctcctagctccgccatggtgctccgatgacgcgcccggagagccgctccgccctttcctcggcttggctcccgccggcccccgcctcccaggccagcggcccagacaggtgagcgcagtccggggatggcggagggcggggacagagagcgcggcagtcggctgcggcctgggcctggcgcgccccctcgcgggcaggtgcggcgtggcagccgctccgaccgccgctgccgagtctcggctggaagagcggcgggcggaaccagtacctcagtccggagcttccggtcgccgcggccgaccagctgagggctcccggagatatggagcggggtcagcgaggcctggtggcgcctcctggagtctgggacgagcggcggtccgaggagcagcccaggtggggcgagggtacggagacgctatttccctccgaactctgaagtagccaggtcagtgtcggctccgcgagggctggagttcacggtgacagccggcagagcatctgatgccacgtggagaggcgaagtacatgggtcggattccacgctgggagccggcctggatctgcgctttaggaagccactgcgggcgaccctatcttgtcgccaggacttcgcatctgatgagcctcagggcacacaagttagagaggcttgtgccggctgatgtggcttttctttttcttagtttccgtttagtaaacgaccttgtgacttctggcttgctcaggaagaccagaaaaaaaggcaataggtaacgaatttttctttttttaaagaaacagattattggccgaggaaaaaccaatttcgctctaaaggataagcaacaaaatactgaggggggaaaaag

SEQ ID NO: 47487 - DNA, 914 bp, Homo sapiens
gtctttctaggtttatcctgcagaccttatcactgcatagcagtagttcacgctaacatacaactgcacatgtctgctctcagaaagcctttcacctggccaaagacaaggcaaccatgctccccaaagacgctcgcccacctttactacaaaattggtatgatttctcttcatttgtagcttttccccaagtgataattttgtatgatttaaataagctcaaatggtcttttcgaaaatgcatcgaagcctaccacccccttttgttgtctcggggcctagaatagaattaatgagagaatttaagttgtactaatagctaagtgggagttatagtggatcaaaatttggaaatttttaatttttaaacatcgtaaattagacaattcaagtaatgtcaacaacaaattatgcaatatttgatttgtcagataaccatctgccaattgtgtttaattatcccccactgagcaagtgccagaaaaacaggttgagtcatgtgttcttatctgctcctctttttactccacaaatacatgacacataatattttaaacaaagcaatttacgaagctggataatgaagatgagagccaacctgaacactggcttaagtaaaatcaatgagagtatttgctctaaaactcatacctcacatatctgcattctaaagtttttttaaaaaattgctttgaaatatctattgtagaatttctttgctgctgcaactacccagggaggtggtacagcttagtggttaattaaactctaatgtcacatttcattcattcactcattcatttaacagatccacactgaggacctactatgggccaggcactgttctaggcacttagaatacagcagaggagaaaacatatagaaatacctgggcttatgtttttgcagtagaa

SEQ ID NO: 47488 - DNA, 868 bp, Homo sapiens
ttgtatcctttccactacctatgcattagggaaaccctatcatagaataagagcttacagggtgattattagttgtttccaaataccagtgttataaagatattacagtatattgttaatatccatggaacatccatttgcttttttttagcagacatctggtagccactgtcctcttagaattttgtttttttccttcttttactatgtatttcaaatttattgccaactgttctcagatttttcttcttaaaatctcacaaatccattttacctccttattctcaccggagttgcctcagaatctctgtagaagtagcacagaagaaaagcacttctctgcaaaaaaaaagttcagaggcttttctcctctcttgttgctccattccccaatttattctccactaaattgacagtgaactttccaaagtccaaagttccacatgaactttccatgtcagtgccactgcatctattttattggcagcttgttactttccggatgaaatccaaactccttagcacagcataaatgcctgctatggtctgaatgtttgcgtacccccctcttcagcgccctcaaaatctgtatgttgaaaccgaatcacaatgtattaagagttaggccctttagaaggtgattaggtcatgaggctagagctctcatgaatgggattagtccccttatgaaagaggcttgaaggagcctggttgagccttcagccatgtgagcacccacagaaggtaccatctagaggaagtaggccctcaccagacactgaatctgctggtgccttgatcttggatttctcagcctctggaactgtgagcaaagcatttctattgggtataaattacccagcctaag

SEQ ID NO: 47489 - DNA, 1094 bp, Homo sapiens
tgaacgcagagcaaattttgttgcatgaagtccaggagggaagataccataaaaaggtatgtggtggctgtcttaaccagagtacagagggagtgaaattaaaatagcagactgcagcctcagctggtaatttggaaagttgcttctaaatcctgttggcctcaggtgaacttctaaatatatatatatatatatgacccaggagctgcagctgttacctgtacactacttgcatacaatgcagccttatcctcagagcctgcagctgagctgctttccaagaccatgtccaggagcaggaggtgggaggcaagtgcagagctgaggcagtatgcaaacccacccctgaacacagcaactggcaaatactaacaagacagcactggtaaaacccatcttctatcagtccttttctgggaacagctaagtaaaaattgtggactggttttgtaggaaaggaggggagcatttccagaatgcttggttcctgaaaggttgccagtgctgccagggaacgttccatttcagtgatgtaaataaagcccaagccctgagatggaaggtggaaggaggcctccctccccacctacctgtaggacacaccacaaggaggcgctgatgagctgtaaagccaacaggtagtttaaaggctcctgggatctgtctgggaatcagggaaaacagcaaggccaaacgcagcgctagctataattagccccaacaggcctcaaaccaacactcaacctaatttaatcagcacaagcaccattttctaggaacgggttagcctcagatcccaggccccagttagggctagaataggagctggaagttaatactgtattgactgaaggtggcaggagttatactgtagtaggcactgtcagctccctcagcaactgtcattccatccttctcctctgctgacaaaaaaataaattttgcccaggttcaggtggcaatgtttatgaatggtgaaactgattagtctaaattggccacggtaagtccatttgccttgctggggatgggtgtaagcatggtcatgtgatacaacttatggtataaaggagagggcttggccctcctccccg

SEQ ID NO: 47490 - DNA, 851 bp, Homo sapiens
atgaaacaccaaacaaggagatataataagtttcttttttctctttgggaagtatgaaaagacagaaagcaaaagatttatctattcatgattctttttctttgcaccaagttgggtccagtttcttgatttccatgtaaaatatcaagttgtaattaccaactttccggagctcaaaggaagattcaaactggtgtccagctgccaggaggaggaccgcataattaattcctgactgtagtgttggctcagattcaaatgcctttttgaacctataaaaaaccacaaatgtacaagttaactttctcaatcatgaaaccctgggtgtgtaatagcttctgtttgtataactccaatgcctgagcaagtaaaaatattgcactggccttcaccccagaatctggtgtgctattaggacttaacgcttcagaaactgcttatctttgtccacagctctgttgctttcccccgcttagctcaccctcaacctacctagtaaccctagtctttaaaaaaatcctctcttcaaccatctaccagaaatatgtgaatgtgaaaatttagttacaagggcatttgttacaagatgaaaaattactctaaatatccaataatattatacagtatgatatggaataacatatattccaaatgttagaaagctatgtagtcatttatgttgtagaagcatgttaaaagtcagaagaaaactagtgtttccaagtaaaatgtagtcgtctacttggaagccatcattcagggtgtgtgtgtgtgtgtgtgtgtgtgtgtgtgtgtgtacaataaacatttaaaaatgagaaccccgcacatattttttaaagtagttttta

SEQ ID NO: 47491 - DNA, 1503 bp, Homo sapiens
ctccggtttcttcgcctcagcttccatccatcatagcaccatggaattaagaactccctttactctgttctcccacatgttgattttaacacacatgattgtctatactgtgcaaagtactgagaaggggtcaaagaaatcagcatcagcccttcatgggctgataaccttcaagtgcaatggctggacatgtgagcagcagaagtgcaaagtcaaatgaaatagatgtaaatgttctttgggagcagaggacaaggagtggctgattcttacaggagtaatggagaaggccattcagggcaacagcttcacagtaagccttgagaagtggtagaatttcaggatgcagggcctgggaagaagggacattcctggctgctttgcaattgcataatataggagtttctttttaccagaaaaaattgctccactacctaagaatggacatgtacaccaccacccaccgaatgagaaatggcttatcgctctgcccagctggtctttccacaggaagtttacagggagaaaaataaattgcacaatcattttttgggaacacttttcagtaaaaacttttcttattagggagaaagaaatttcattttacttgtgtctttatgcattctaccatgcccgactaaatgcatcctctcctgtaacgtatcgcttggatcccctacttccctggtccaaggggagtttcggtacctcttcctggcaaagctctctctacttgagaccttatagctgcggacctgcttgtctgtgtcctccaagggacctgactgttttaacagaaatacccggcagaggaggcatttgatggtaaggagacagcttctaattcacattgctaaaatgagagacaaacaaacaaacagaagacaacctgtggaaaaggcttctgaataataaaaagagtcttccaactggcactcagcccaagagtccacagatcatcaccacagcaacagacagtatttggaggcaatgaggagcacaaaatgcagatctggcaaaggcattagcaaaattattcatttcaaggagactatataagctcctgaatttgtagcattcgcttctatatgtatattagccatcagaaacagaaagagctaatgagctgaagtgctggtgagaacagtcagggtaccacatacagctagctctacttggaacagacggctgatggcctaaggaacctgtagccacgtcagctccaaagcagggaccggttcagtcatcagtgcagccaatgttcatgaaatccctactaagtgccaagggatactaagtgctaaggtccaagggatacaaaagtcatccaaacacacacacgcgtgcacacacacacacacacacacacacccatgcacactaggttcctgccctcagaaagcttatgatctagcaagagaagagacaatcaaataaacgtacaaaaacaaatgcacactgtggtaagtgtgttgacgacatgacacagggcattttgaacag

SEQ ID NO: 47492 - DNA, 1386 bp, Homo sapiens
caatgtcttagccaacctcctccacacttccttctcctcctgaagaatcctccatgatttgtgctctcaaagaaccttacataaacctctagtataacaattagcaccagcctaggcaacatggcaaaaccccatctctacaaaaaaagaattaaaaaattagccagcatggtggcacacacctgtgatcccagctactcagaaggctgaagtgggaggatcgcctgagcccaaggaggttacggctgcagtgagctgtgatcgcaccactgcactccagcctgggtgacagagtgactcagtctcaaattttttaaaaaacaacaacaacaaacaattagcacaatatatataatacgttcataggctggtctcccttaccagactgtgagccgctccaggaaagggatgacatcattgaattgtattctacaaacatcattaagtgtcatctacaggtcacacactgatacagaagacctggggcatgtcaagaaccataaaatgtgatctttgtcattaactcacacttaagcagaaaaagcagacatcaaaaccaataactaaaacaccactggggggaaagtgtgatattcattcaatcaatcaatctgtatcaagtgccaagcactccattaggtactagaggtgcagggttaacaagacagaaaaagagacatggaactatattctaatgattctttaaaaaaccagaaactgctccttgtttgtcagatgtttctaacaaaaggtttttcattattgtgtaaattggacttgactttttcagttgttccttcttagtcatatcacgtatgatgcaagacctatggagcaacagctttctttatatctcccaaagaatcaagcatgatttgaatactgaatccttaaagcaaatcaaaatttatttaacagccttcagaggtcatttcaagagggaatagatagggctgctaacagaaatatgaattaaaaaaaaattcagatcttagagaataaaaatagaaggataaatagttccaagattattcataccttaaaagaaaaagaatgctaaggtcaagcttataagcaactaggcaatgtgctggattcaggaagaaatttacctggtgaccacatattaggtatagattatggctcaaaagttgggtaatactttttgctgtggctaaatgggacaatgacaagtcttgaaaaaataattctcatagactaaatattaagtcattagaagcttgtaacctagtccaggtctcaaattaggctttcggcacgtagaccaggtaactgaaaactgaaagcagatgagagtctcgaattctcctgtcatagcctttttcttcttctatgctctcagaaaacctcctcatattaaatgtg

SEQ ID NO: 47493 - DNA, 2522 bp, Homo sapiens
cctcatctaaaacggtcacaggtatatgcagaaagaaaacagggaccaaacctcacagaagcgaaaccgagacactgaaaggagaaagactgactggggcaaatatctcacactgctggagaacagttcaagtcgatcgcatggacccagggctccagcgctgggcggtgggtggatccataggtctatcgcacaagtacacacagactcttgcacaagcacacacgctctctccggagcggcgagcgacaggagcagtcacgcagcggcgctcgctgcccccaaagtggggcaagaagtaaatgcttcccgcccagaaaaatgaaatgccccgaagaccgccagattaaacgcgggtcccgaccgcgcgggatgggaaaggggtcacacacgcacctgcattgtaaaagcggtccagcacggtggtttctccaaagtcgagtttcccaaaatgcagggtttccagggtggcgcccactgtctcgcacgcctcccgcaagctctgcagggcctcgctctcggccaccaccagttgcccttggctcgcttcgttgatcacatatgccaccgtggtccgtcggctgcccccgccaacagagctgccccggcctcgggtggcactgctcgaggaggtggccgccggacaaccgatgccaggggcagcggcgctctccacgttccagaagctgcccggcggcggcggtggcagctggtgctcctcgccctcgcccaccgccgccgctcctcccctcctgcagatgccgccctcggggatggtgcagaagcccgagggggcgaagggtggcacagagaaagtgatgccctcgtccgcctccgtgctcatctctccgggccgggcagcaacggcggcggcgtcccccgcccagccgcaccgcctggccagccacagctcggggctgctccgcgcccgccgggctaagcagctgccatcgcgcgccgcgccctcgccgccgcgccgccgcctcctctccggcgccctctcccccgagggcacgccgctgcccggcggcggctcgctcctcctcggcgcctccgtggccgcgccgctcgccctctgcagagtttagagtacaaggggtggggaagccgggtgagcgggaagggacggagcttccttttcttggccggctgacaagtcggctcgcaaacctgcgccgcggtgcagctcaagggcgccgcgctcggggtgcagcccgccctcgccacccgccgcgccgcgccgcgccgcgccgcgcagctccttccgtcccggccgctctgggaggggccaggaagggcgccccctgggtgcggagctacctggcgcgcaccttacgagcgggctggctccccaggcggcgtcccggaacagcagcagcggcagccgaaaggaccctcctccctcttaggcggcagctcgccttcatcgggtggatttcctcctccttgcctggcctcgtttctctttcgatcgcctccgccgcgtggtcccggcgccagcctcgtcgttccttgcagacgctctccctctccaccaccagcttctggccacccactcgtagcggcaccgagggtcagggccagcccccaaggagggcgctgctaggaagctcgagcccggactgaactgaccgcgctgcggccctgggaccccagccctcctctgagtgctgcgcgtggcatagggtcccagtcttcacccacccggcccccacctacgaagacctggagcgcaagcgattacggggtggcgcagaaagtccctcgaggcaatactcggtcttcggagtccgcccctgaagcatttccagtgttccccgcgactagggcgcccccctccgggccttggcggcctggtggactgggaccgtgcgcggcgctggcaggataggctccgggagacccacgttgcgcgaggcaggaggttgtacatagcgccctggagccagggcctgcactggaggttgcttcattagtgactgtggcactccagaagtggctggctaaattgatcaggttctcccatgtacttttccttttaaaatttccagtggctcattccgttatcagtaatgagtaattgattagtgccaactgccgaaggacttagtattctcatttaggatcttaattcccccacaagcgccagatacttaagatagaagatggagtctctacccgactccacaaattatcaacaagatgaaacaggggaataacgtgacctattctattttttaaactgcatcacgcgaggccgggagggaaatacccagattgtttaagagcaatcaaaaaaagtacctgcttatttggggagcaaagaacagatgtgtaagttcccagagaaccccagaatgctgtaattgttaggaaagccagtgcaagttacaactgagtaaagaaacaggttttgtacttcccatctccaggaactgagactagtgagtcctgtgaaaaaggcagaagaaaatgtaaattacttttttttttttttgagacggagtttcgctcttcttgcc

SEQ ID NO: 47494 - DNA, 1268 bp, Homo sapiens
agttggtttggagttggtgtttcatcttttccagttacagtgtgaaagtagcccaccagcccacgctcttattcctaaagaccgcagtgactccacggacttaagttctcattgcttccagtttccttgggcaacgcagcacgcaattttggacgcgctgcgtggtttcagagtcggctgtaacttttctcactttataatcatcaggaaaagttcctgatgccagtcttccaaacgctcaatgaaataaaaaccagatagcaccgcagaggaggctgagatgcaacgacaaaagctgtcgtaattattaataatacctaaccctggatcactcccctgatagatctgtatctttgcagcaggcgcaattcagtttggattcacccaaaacaaaaatggtctccgtcggagtcaacgccctttcctgtgcggaccaatcagaatctcaaacacagggcacggggcccacacttccgtccggtctgcctggtctctctaaccgcgccagtgtgcctccgactcggaacggcttccgcggccggggcagcgagggccgggggcggcgggcgggatgagtgcggtgtgcggtggagcggcgcggatgctgcggacgccgggacgccacggctacgccgccgagttctccccgtacctgccgggccgcctggcctgcgccaccgcgcagcactacggcatcgcgggtgaggcggcgccgcgcagctggggccggggggcggaggcggaggcgggggccagccgggctccagttcctcgcgctcgagggaaagcccctctgagcgtagacggttccgcgggtccacgccagggggcagaagaggcgctggtcggcgcttctcctttctttgccgagtgcgaggagttggtctgaagcaggagtcgatcttccagttgtgtgcaagtgcatatacgtgtagcctagtagcccgtgtccttgttccttgagaccgcgctgcctccgccacgtgtcacacgcccaggcacacgtccccgtagggagagccgggggagcctgcgcggtcccttggatcggtccgctcggcacagcagtacggggaagacggtctgagccagaaccgacccagggctcgcgagttggcccacaattcccagtctgcattcgagcactgagctgcgacctgcgggctggccttcctaaggacgatgctcctgaatggacgcctggagtcccacgggtgacaccatgaaatatatcaagttcagttcttacctgtagttgtctaacgagg

SEQ ID NO: 47495 - DNA, 384 bp, Homo sapiens
aacctgggtgacagagcaagacaccgtctcaaaaaaaaagaaaaaaaaattagccagggactacgtgcctgtagtcccagctactcaggaggctgagtcaggaaaattgctgaacctgggaggcggaggttgaagagagctgagattgccccattgcactccaggctgggtgacagagccaaaaaacaaatatctttcaacagtgacaaagcagagcttagtgaagagagatagtgcttttaggggattagtgagatcctctagctggatcatccagaggaaaagatttatgtatgtatgtatgcgtgtttgatgtgatatgtgtgtgtcatgtggtatgtggtctgtgtgtagtgtgtgtgtatgtggtatgtggtatgtgag

SEQ ID NO: 47496 - DNA, 1219 bp, Homo sapiens
caaggggagtaataagacagtagacattttccagaatgagactagttatttgctgaagagggtgggattttagtccaaaaccttggaagccgtggctgtgtgtctactgtcagggtttgccaccgacttcctgcttggtctcctctctagtgttacctcctctatctaactttcatattacagccagagtaatgtttctaaaactgaaatctggccctggctaaaatctgatcaataatttattcaatcgcaatccttcaacacatatttaacaagcaccaattatgtgttggtttcaggtcttgaggattcagcagagaccaagataaaaagcactggcgaaaactgaggtggaaattaaagaaaaaaaattaaaaagaaaaagaaataagctttcctgtattaggctgacttatcccaggggcagcaacaggcacagcccagacccaggaaaagcctcgataaacactatctgggaagccagggctcaaaggaatgtgctctggagactctcccagcactccctcaaccttgggaggagaaaaacaaattttcctttctcttatggtatgagtttatagattcctgttctctgtaactagtaacttcaaatattctgttttatctaagtggtacagtgaaggtcctgagctgtctgagcaggcctgaactacagctccctgggcaccatagcaaaggttatgagataagcctgtgcaaggcactagagcaaagtctagataacagccatctgggctgcatagcaaaggtcatgtgtaattctgggttatgtacctgtcacaatttgattaactgcctttgttctgccctgtatccttgctttcatgccactatgctttgtgccactgtaagcttgtttcaggctagcccaccctcttttagaagtgtgtatacaagtcaagtctgtctttgttctgggcccagtctctggatgatcatccactgggtctgattgcactcaataaaatcatcctgctcttccccgtggtctctctagtcctcctgattcccgcaagaaaaccacaattacttttgcacaaacctaatactacacatatgtgtgtatgtaaacttatatattttttaagtttaaaaaatgaattaaaaattacatgaatctatatgtaaatatatataatattatatatgtgtgaatatatgagagatatatatttaattttctttcctatttcttacc

SEQ ID NO: 47497 - DNA, 1906 bp, Homo sapiens
ctttggcagatactatacacacacacacacacacacacacattgtgagctttgctggtctgctaaaatgctagtgtacgaaagacagttctcaatgtcctgtcttccagagttttccatgaaagagaaattaattactttgtttaaaagttatgattactctatgtggttgagactatcctaagtaaagtggaggcagagaagtatgaatgtagaatctaggtaataatgggatgagttattatttagcaaggaagagaaagagtagactttcttataggagagcatcttgttaaagaagtagtaaagaaaaaacctgatatgatatttaaggtttatagaaggcttgcagaaagagaattttatttgccttggattaatacctaaaggtaaatgaatctgaaaagaagcaacacaatgtgctaaaagttttggcaaagttggctcaattttgacaggtttgtttgtaagatttttttaaaaaagaaaacacatgaataccgtgttaatgcaagactataaattttttcctctgttaaaatgtgataagttggacttgcagtcctcagtctgtgcttattaagaggtagtaaattatcctttacctttgtgttatttcaaatggcagagattacatatctcatcaaaataactttctatgctttatgctgactttggtttgttttttgtttgtttgttttttaaagacaggttctcgctctgtcaccaaggctggagtgcagtgacatgatcatagctcactgtaactgtgaacccctggcctcaagcaatcctcctgccttcgcctcccaaagtgtctagattacaggcatgagtcatttgtacctggcctgttcttgattattaaacaaacaagtaagcaagcaagcaaagaataaaagttacttctgagtaagctaagttttcctacgatggtgttaccttctgttgggtttatttttaaatgctacatgagcctcttattaataaggggccaaaccacctactatggctatacgctgatcactagcacctgtgtaatgctctgaactagaaaccatccacttgtgttgtttcagttttgccttcccaagatcagatcttagattcataaaatttttttcttaaaaacgttttgcactaaacaaactatgtggttcctctgaggttcttcccagattaaaaattgattttttaaattaaactttataaaaagaggggggctaaaaataattagttttggggtggtctatttttcttaactcgttcaacgctatcatgacagcttcatggaaaaggttaaataaatgaggctcagctgttcctaggttagttctgtgctggtaaagtcctactgataagtgtgtttcagagcttgttacaacttggcaggatggattggaaagccctggatatttgttaacaattctaactgtttatagactattcttatcttcaggggaaatattgatcaaatcctcagaaggcaattatgtattataccctagtagaaaattttactttccttcattctgattttgttagttattatactaactgcagccagtctgtcttcttataaaccagtggtctcagcccttctcttatacttgcctgaagcctctgctataagctacaactctagaaatggatctttatcaaaaaaggatagtttcagaaatttagtggaaaggactctaccagaaacttctacacttattgttacttccaagactggactcacgcagacatggcttctgagtgggcattacttagactactgtcagactgtccagaaaagacatgaactcttgaaactagacttctccccaatatccagtgaggcaagacttaattaagacaaatgatgggccgggcatggtggctcatgcctgtaatcccagcac

SEQ ID NO: 47498 - DNA, 528 bp, Homo sapiens
ctttacatttcaatttttcggggggaatgtcgttcaaatatagtttacaaatgaaatataaaggataaaagaatggataaacaaagaagtccccaaggtgtaacagtgaatattgctttaagaaaatacaaaaacaattttaaataagatccttcaaacacgagtcatcctgttctcagggagctttagaatttccacattgctgaatgccaaattccacaagtcatggaatttccacacatctctcttcacttctctgacttcttctgtctaacatgggctgatatatttcagccactacacagtagctggagtgtggtgttagagcttcaatttcaaccgctctgtgagccccttcataaaccttttgctcctacacacgagagagaaaataatcagttggtaaatggctgccattaagtcacagctgcatttttgtttaaattaacaagttgtacatggtcacagcagtagatgggttgtggggtttcttcccagacacatccttcttttctagagtcctaggcc

SEQ ID NO: 47499 - DNA, 1260 bp, Homo sapiens
aaaaaacaaaaataaaaaagaaaattgcatatgtatttgaatctcgaacctttataaatgtagggagtgttagattcttagcagaataaagatggaaacatacaaattactttcctctgtttattggaagggcttttcttaatctgacttttgtttgtttgtttggttggttggttttgggtttttttttgagacaggatctcattatgttgcccaggctgggctcaaactcctgtactcaagtgattctccttcagcttcctgagtagctgagattacaggtgcatgccaccacatccaggctagtctgactttttattgacagtgtagcccttggaggttctaagacttttgtaggggtattagttctaactccctgccttgtgctggcctaaaaccttgtcttttgtcctgggagtggctgttaccacttagggtctagttaccacatccagcaaatgccttcagggcagctggggcagtcactgtgttggtcttctggttcccctttgatttccgtttactttgttttggcccccaaggattccctttatttttatttttgcccctctgtggagtttggagaatgtgttttatccagaatttctaagtgttttagaagaagagagtttcctactcccaggctatttaatttggaaccataagtttttaaagcactttccaactatattggaataatgggatagttaactttaaataaacatgtcccttttgtagtgaggcacatatttcaggcattgtcctatcagtgagtcagctgcggacatcacagggctcctggcttatgatctgtgatgctagattttgcaattgattgcaaaatcagttttgcaatcagttgcaagtttcttgacccattcactggattgtgattgtgttacaagaccaagtcaagattatttgacctcatagcactttactctttaacagctctctccttgaaatattaccttcccgcactattcatgaacatatcagcccacagatttcctcctacctctttggctattccttctcagtctccttttaagatttttcttactcaggcatctttgggtgaaagtccctcaatatctggtcttactcaaaactgcctctcactcactactctctccctaggcaatcctatcaatgtccactgtactgtatgcatgaaatgactcacaaatttttgtctctaataaagactttactttgagtcttggatctgaagagatatgtcccctggatctcttaaaa

SEQ ID NO: 47500 - DNA, 4248 bp, Homo sapiens
agtctgtgtgaattatgaatcagaataaaatgaaaaagaaaatttaataccctattcaataaatataattaaaaagtattatcctgtgtattttgaatctctgaaataactatagaatccaaagaaatagtgaaaaatttaaacagtactcagagctttatcctaaagtcagataattagtaggaagcatagctgataaactgtacaaggtcagtgaagagccttccagttggtgtgaagtccagcctagctcttcagctattactcagagtgggacactcatctggatgaagaaagccagtggcacaccctgattcacttaaaaatatatactacttttatgtgtaaaagtgcatgaagagtgaaatactactgattaagtggcacacacagattttattttcacttaagaagtattaatgaaagcccatgaatgtaacacaatacattcctaaacacctggatttcctggagactgactatatcaccatattcacttgtctgcttccctgttcttaccaggtcctctcatctaagatgaacttcaactatagagtcaagcccagcaacagtaagaataaggctgggaagctaagcaagagccagagcattgttggtttcttcctactttggagattttgtgttttaaattaactttaaaagaacagggaacacaacaaaatctagagaaatgcactgaaaaatctagagaaatgtgttagaaatgcactttaaaaagagggctcactgaaactaatgaaaagcaaggccggggtgcttgtctcttctaggggagtcaggaaaggcttcacaaaagtgaccccagttttagaacgagaggtacagagacaaattcaaaagtttctgcagaatatagaaggctgcagttgatcttcccacgggaggcagacaggcaatcctcctcccagagcaagctacaaggacgtgcaaattgtgcactcacaggggtcacacggtgcactcatagggccccgtattcagaaggaagggcctggcacttgctttaacgctatgcctgcgctagcgttatcctctttctctgctgacatccagtcagaggcctactaactcttccttctaaatgttctgctaactgtcctcttctccacttaaactacttatcgactccaacttaagcagcagcctcctaatgggccttgtgtttaccctcaaactattttataagatgactggtctttctaaatggcatgtctgatcctgcataaaatcatttccctttgtaattgataatccaatgatgtcagcattagtaaataatgactgacttcagcaaggcatagtgggtgtattattttgttggctcaacacctgtacttcaggcacgccattccgcttcttctggtaacccaacccaaccctctacgagaatgtccttcccatgcaagctggcacctgaacctagctgggcaaatcagagcctttccctggcattttgttagaatggaggaggctgcaagatgtcaaaactcagaagctgtcagcatccatgattcctgccaagtgtggaaagctgtcaatacccagacagaaataagaaatggagagtcctagcagtttgggttcctggttctagcctcttgagacccagctggcatctataattttctgtttaactctggtttttctgagacaataaattcctctttttgcttaagttaataaagctaggtttcttgctggtacacataatatggcaattcattatttggttcctacttctccacctaacctatctcctccccttgtaagctctcacacacactttacaatagaacgcttaatattccacgaattcaacatgctatcacacctctgcacctcagtctctgcacctctggttccaacactggggtcacctttgtgaagtcttcactgacttccctaaaagagacaagcaccccgccttgctttccactagtctgtgcctaagtgcaagctcttaccgcaaagtactgcaactgcccatgtggatgactgactagagcctagaagagcagttaagaacttggactctggagccaaattgagcagctccccactgagtggctatgacctctctgccagttgggcaggcctctccgtaactcaatttctcgtccataaagagagagacaaataacgcctactccagaagattgttgtgaacacagaaccaaaacgtggacctttcaaagtccctatgaatcataaatcataataaaaaaaagaaaactgaattgaaaaggtttactgttttctctggagctcgtaatcacaattactctgcacttcagaaaagccaccctcaacatttgttttctaggaaatgtcaataagcaggtggaaataaaatgctccgaagaacaaacccgtacgaagagacctactgccaaatctgctagtgagtgccggcaatccaccacttccagactgagacctaagacggactgccacttacttctcagctgccacttacttctcagctggcgacataatgcatactttcctaccctaagcactttgagtccccccccccacccccgctaagaaagaagtatttaagccacgaactgagaccacgatgccacatgctgatcaggacactcacagtcatgcgtcacttaacgatggagatccgttctgagaaatggagaaatgtccccttaggcaatttcttcgggcagtagaaacccagacaaacccagatgacacagcctactgctcttaggtcatgaacctgtacagcctgtcactgcactgaacactgcaggcaaccgtagcatactagtgagtatctgcgtatctaaccataaaaaaaggtacagtaagaagacgatattataatctttgagaccacgctgtcccacattgaccagcaacgtccttctgcagcgcataatcgtatttaaaagtggattacaagagtcggaaaaacaagcggcgtgatttgttgtggcggcaaccagggaagaggcaggagaaaggcaaccgacgagttcaaaccacggagccccagtctcgcgaccccacctcgcgtccccgtcgcccgctcagggcccgacgcaggggtcccgggctagggcgacctcggagaagcggggcggggcttcccggctggggcggatccctccctccctctcgtcccgacccggccgcagccctgccgcgaacgacggtacctgaggacggccccagatccgcggtgcccatctcagccctgctcacaccctgcatgacaaggggtaggagaaagaggagagccatgctgctaccgacggtcgctggctccaaccccgagcgcctgcgggaccagcccagcactgccctccagccccggccttacgtcacttccgtcaccggggtctgtgccggcgtcggcaggaggcgggaccagggcgtgggcggggtcaagtccgggaagccgcaggaggcggactcaggcgcagcacccagcagtgagcacggcgtcgtgcggtcgggacctggacttctgggtgtgggaggaatttgagtgcaaaggttaaggtctttcaacctggcaccccattctgcaattcttcttccagtttttttcggtttcctggggttgtgcaagtttgcattaggccacagccgagccacaatccttattttactaactcttggacttcacctggttgtcttggagcctgacatttttagaagagaatgagacttcaaaagccatttccagtccctgctttttcatttgaggaacctgagacttagctagtgaaatggtttgtgcagattcccacagcccaaatcaaatcggcttgaccaagaactactttgttcttggagaaaaaaactatttgcattaccttctcagcaattcagtgtcaaatcagtttatcaggcagcctctcatgaagaggtctgctctcttacctctctgggtttgtctgttattttgcatctctcctattccactgcagccacattgctaagtccttcagcgcttgtgctcaaacatgcgaatgtctaatgatctcacctgtttcaattctctgagtatcatgaacttttgttaaaaattttaaattgcaacacaccttctcctcctccttaccccgccctactgttttttcatggcacttttcaccttgctgtacactataatatacaccttgatatttgttttcttctccttctaaaatgtaagctccgtagagctgacatctttacttggcactcaattagtatttg

SEQ ID NO: 47501 - DNA, 875 bp, Homo sapiens
acaatgtagggagtacttttaaacaaccattgtattattggattcccacaagtgtaagcagtaggcagcacaccaatgttatttattatcattttgtagatgtggtcacagagaggcagaccaactaactgatcttcccaaagtcccaagccaggtgactcagttggcctgtcctgcaggcaggattcggccaggtctctgagtctccttctactggtgcacatttcctgttagtattttcctcagggaaatccctttggctctgactcctgaaaagaaagcttgtcttctaaagttgccaaataatctggtctgccttcaattgaagggactttgaatcgtgggaagaggaaaggggagagctgtgctaaaaagatgagtcattgcttcaagattgaggaagcaaggttttatatctcggggacttttcaggaggaggatcagtgtttcttgatggtgaaaacaaggaagtggaggaagggaagaaagcacacccaagtatttattttcccttctgtctttgaatgcacattcttcctattatattttctatttgccacatctcttactcattttaacaactttttgttaagaatacctattggttaaaaattattttttatttcttaacattgcagtttgctttctatactatgtccttaattgactacctctgtataagtagctggtacacatgtattttttttcaggaatcctttcttacttatattcagatgtggcttaattggacaaaccccactgaggttcatcacttttcttttccttttctgcttgactgtcctctttctcctccagccatccatccacctgcgagaaagggctataaaaggcgtccttacttccttaagaggaag

SEQ ID NO: 47502 - DNA, 1912 bp, Homo sapiens
agttaattcacaaaaagttcccttaggtccctttgcagtcacctacctccacccaccacctagtaaacgcttatctgttttccatctgtacagattagccttttcctgaatgccatagaaatggaatcattcaggacttagccttttgtctccgtccccttcccttgggatactgcttttgagatgcatctgtgttgttgcgtgcatcaacacttagttcttttttattctagagcaggcttccattttatggatgtacaacattttgaaaagatcgatctgttcaccagttggtggtcatttgggttgtttccagttgttggtgattatgaataaagctgctgtaaacattcacttttagacttttctgtatgtggacacatgttttagtttatgtgggccaaatacctaggggtgggactgctgggtcatgtgccacgaatttgtttaactttataagaaactgccaaactattttccaaagtggctaaaccattttgaattcctgccagcagtaaatgagaattccacttgctctgtgcccttgtagtaaaatattttcaggtttttaaaagttttacttttttctaataggtatatgagcttatattttattggaaagcatctgtcctttgcccaacttaatcagtgttgatatatttcaatctctcacacttccttatagattaacagagactggtggatcagtcccctcaaattctgatgattagaaggggcctcttggaattcctgagtggcaattctaactgtgggttctttggagttcaggcagacctttggggttgacaagtattaggagtgtgctgtatatcaggagggcatgtttgtgcactggggtggggaagtgggtgagggaagcctgccattggtatgtttcttttaagagcagaagaacctgggaaattcccaaggaaagctttgttcccagatgactaagcaagatgggctgctggtgagcttaaactaggagacagcctggggcagtactcaggaatccagtcctgaaataacaggggcctgaactagattgtaatgttggtaaaggctgggtgtgataaaataaaaaaaaatgtataaagagggtggaaatgataaaaggattatcaaaattagtagctgaatattattgacatgagggtaaataaggagttgacatgcttgaagtttcacatttagacaataaggagaaggatcccaacagtacagtgaaacatttttcaagtccctgtcttgctaaatccaatggtcatgcacttccccagctgcattttacttgacctatcagcatattgacataggctaactgacacacaagaaggtcccttcttctttcctctctgaatcttagggtactgttatacttcctcttgattcctttgttttactggctgctctttctcattctcctttgctgattcctccttattctcctttgctggttcctcctcatcttctccacatccgaatatttaaatctctagcccaaacctttttcttagaccccagacttgcatatttacctagctactcaacacttccccttgagtgtctaataaacatctcaaacttcaacatatccacgaccaaactctggatctccataaccccaagcctgcttctttcagtcttcctctcttcttccaaatgctcaggcgcaaaaccttgagatcacctttgatgtccctctttcttttctgccccacattatctccatcagcgtatgtttctggcttcacctacaaaatatgcctggaatctgaccatttctttccaattctactgcaccgtagtggaccaaatcatcattatctcctaactggattcttgctgaaactctctgtttttactcttgtcctcttagatccatcctaatggcaggagccagagtaat

SEQ ID NO: 47503 - DNA, 1488 bp, Homo sapiens
ctcaggtgatccgctcgcctcggcctcccaaaatgctgggactacaggcgtaagccaccgcatccggccagcacaacatttttgaataacttaaagtatggtttcaaacagaaatttctgggtattgagaaaaactggcatgtttctgaattgttgttcagctgtactttttgtttcgaatagaaatgcttcagattggcagcctgttcttattatagagactagcgtatgcaacatgacttatttccttcactttgtctctaaagtgaaccctttaacccttatactagatgtttctttatcaaaaactggataatggctttattctctattattttatacaaggatatatttagggataacttttcaaaaacatcagccatagttatcaagaaagagaggcgacaaaggctcttattcaagttccattaactttgacattccagaagatatgaactttagattttggaaagatgccccaaataaatgttctatctgccactgaaaaagtctttactattgactcattatccctaggacatgagttgcttttctggttatgatttttcaaaaccagaaaagaatgttccttaacctagtctttctcttagtactcctgtactgcctattagaaatggctgatcaggatgtgggacacacattgcgttatattcacttttagtgttcattgctaactggcaatgaaagagttctgtatctagccagagacagcaatgcgggactgtgcttatttgtacagtgtctatggtacattagtcaaatatttgagggtttttatagagaattatgttggcttcctggaagttctttttgcttgtagattatcctgactggctgtgacaattgctattgctctgtgtttgctagaatttaccagctcgttggatcccacaagggagcaaaatagaaaaaaaaaaagattaaagcaaaatggaatgtaccagctctgtgctgggaatacctgtgtgttgaaatgaggacataccagaatcaactttgcctttgttcacagtccagatgaggagtcaccactggccttattagagataagattcagataagagctctgcctttttttttttttttttttttgtcatgtgcttctaaggaaatcataaagctttaagcatagggattgtgattgaaaaatataattagaacaagaatcaaagaaatacaaaaacttaaatataattaccattctcatccctatttcacagatactggtgctccattcattcttcatttcttccttagaaaaatacttgtttagctttactctaaatcgcaatacgtcttgccccaaattctcccatgctatgcacagattcagggctttgaggattctacccaattcatgaggtcagaattcctaatatttttcttgctactttcagattcttgaatattaaaattcttgccactttttctaaggcttcctcaagtcttagttctaaggtaattccc

SEQ ID NO: 47504 - DNA, 1022 bp, Homo sapiens
ttctgcaagagctaccattcacagagtacatcggatgacccaggcacatgctttactgaatttaattctcactatagtcttttaggtgtatattataatccttactttacatatgaagaaaccgaagctatgttaaacaacttgctcacacctaataagtgcttgacacaagattgaaacccaggtctgttagatctctaagtttgtggccttaaccaatattttatattgtaattatgctatatgtgtagaattactcatataaaatggtaagaaattgggaggaactacattgtagagccagaagtctgactgggatggcaagctacaatcaggatgatctttggcacatatgggcttgccttgaaatttctagattccattttgtcagaagctggataaagactggactttggtcacccaaccctgctgaagactcagattattcctgacttggacattaaagggaaacttagttccatgggcaagggtgtctaggacactcaggtaaccacatgaacaggagcttacctttgacttcagggccttcaatgagtcataggttaggaaatccttatctaagccatgctagttcccagtttttcttggcttctgggaagccctgtttcaaatgaaatactcaattccaatattttcctgaatgttattatgttcttctttccctctaagtcagtagacttcaaactgtgttccacatagttctttgagttccacaggccctcttttagggtgccccattgcttgaggagaagatggaagggatggagctgtgggcaggcatcctgccccttagtccaagcagcttcaaggccacaggcatgaaaggacattagctcagctctaccactgcctagtgatttgatttctttatgccccagtgtcctcatctataaaaaggtactaatagtcctctcttgtaggtttcagtcatgacaaaaggactaaatgcatgtatgacactcagaaccctgcctgacaaaaagcaagcacccaggagttgt

SEQ ID NO: 47505 - DNA, 836 bp, Homo sapiens
agcggaattctaacccaggtatgcctaaattcaaaatgtgaggtttttctgcattatagtgaatgacggatatcaaggcttttctgatgactttgaaaaatagttggataggccagacacagtggctcacacctgtaatcccagcactttgggagccccaggcaggtggatcccaaggtcacgagtttgagaccagcctggtcaacatggtgaaaacccatctgtatcaaaaacacaaaaaatgagccgggcgtggtggtgggcctgttgtcccagctacttgggaggttgaggcaggagaatcacttgaacccaggagatggaggctgcattgagccgagactgcaccactgcactccatccaacctgggcggcagatgaaagagttaaactctgtctcaaaaaaaaaaatagagaacagaacattctccagttatggcctcattgttttgtttgttcttggcaaagtttccactgacataactcagtaaacttttacatctgagttcaatggagtgtttttaaatggttgtggacaagaggttcgttcattgttgatgtagaattgagtacagaatatactttgcttaaattactttcactattttttctcataatattcttgaaagtcatctattaatgcagttcttacataaaaggaagagataactaaaaaggatatagagccaggaagtaaattgtttccccaaacacttcaaacaatttaaatgttcaaatatagagttatttgtgaatttgcaaagtagcaaatcaaatgggtaattctcaaagccttgtgtttgaagtgatgagaagcaaagccttttcaagtttat

SEQ ID NO: 47506 - DNA, 771 bp, Homo sapiens
atttctcacattatcacatttcacttgtgataattgctgattgattagtcagcaattattgtgacaacagccaattctaaaatcttggttgtttaacgaacaaacaaacatttatttcttgtttgtgttacatgaagacagcaggttaaccgcaggtttgactgggaggggtggggcttgcctgagtctagccgggcttgcctgactttggctcggctccacatcttatgtcattccagggctcaggctgaggcagcagttcctgtttgaggttaactagtctcatggccaagggaagaagctcaggaaggacagagccacatcacatacacttaaaacttctgctcggaggtggcatatgttaagtccactaggattctgttggccagagtgagtcctgtggccaagctcatagttgttaggatagggcagtatactatacccacaggagagtgtgctcagagtcaggagggagccaacaattgcgaacaagtaatggagtctatcacagttggtagcctgcctacagttgtgtttctctccaattcagcctccatactaactcacaaacaggtcaggtgatacttagcagccttagaattaaatccaatctcctaaccatggcttcaaagctcatgttagtctggctcctttatacctactgctactttcatccctctccattccccatctgaaaccctaccctctaggcacaggaaacctgtattagttccccagaataagccataagtcatatttctctattgttag

SEQ ID NO: 47507 - DNA, 2575 bp, Homo sapiens
acaaggaaatatttcaaatctagtgtctctcactcatagtataatgagaaaattctagaaagcagatctttgaggggaagacggggtggaaaacagacaatgagtggaggctgagatacccagctcctctatcgggtatgtctctagctgcttgcttcttgcttctcctttccttgtgtccgcaaacaccaccccagagtgacgtaaccaaggttgatgaggtcaggatgtgatgtgtttgtggttttaactggagttgtggaatctgaggatgctgcgtatggagatagccttgcagaggacttctgcaatagcaataactccaagggtggagaagtattctgtgtagtagatgcatgaaatcactgttattggcattggcctctccataggactttttgttttgttttttgttttcttgagacaaggtcttactctgtcacccaggctggggtgcagtggcatgattgtggctcactgcaacctctgcctcccaggctcaggtgatcctcccacttcagcctcctgagtagctgggactacaggcatgcatcatgatacttgactaatgttttgtattttttgtacagatggggttttgctatgttgcccgggctggtctcaaactcctgggctcaagcgatccacctgccttggcctctcaaaatgctgggattgcaggcatgagccgccatggctggtctccaaaagactttttaatggacactttcctatatttttctcttcacctgcttttatttcagctatattgatatctaaatggtgattaaaacacaatcatttaaaacacaatgtgctatttctgccacaatgtatttgaatttgtattctcagtatgtatttaaaattattatccttttatttaacataatttattcaattagacttgtaaataacattttatggtgttttaaatgaatatattggtctatttctgtgaggcatttggaatatctataaagtgtgatgttagacagaaaagccagcactaaataaacattcacattcacattgcttctctatcatgtccgagaaatttaatctcaaattagcccctatggagtaaaagtctgtgtaaacagatggactttgcaccttgccgcaaaggtcagctgacgacagcactgtgagtttggcagcaaatcccttagtcagagaaggaccttcccataagaaaaacttcgtctttatttcagttctcgtgacatgaatgagacttggcttccatcacaaacttggcagtcagcgaggcttccagaggattctattagcaatgatgatgatgatggttgagatggtgcaaagccctttatacttttctgaggctctttcacatgccttgtgaaaaattctcaccatttaaccttaaaacaccatcagataagaaatgtatatatgcaaagtatttttttttccaggaaaagaaaatagatgtaattcaatctgggttcttaaatttttcagatctaaatgaactttaaaatatgcttggatatatctctgaggaatataaccttaacatttttcagtgttcaacctagactaataataatatcagcaactctggtttggggatcacagaactcacaaaccattcacatctggcacatttcatacccctttcctgattctactgtaagaacagtcaacaggaaatatgttcaccgtaaatgactgtgaggcagtgatgcatgctgcagcttcattcttctgggagagtctgagtttccaccataagaaaagtcagagatgtagttatttcctgtcttcctcttcactgaatccttggacagtacccattttatgttcttaagtgaaaatgctttcttcactgtgtgtctgaaagtgtacgaagtatgtttctgaacagagtgcctattggatcttctctacaatcatagtagagctcaaaagaactttgttcagggtccagctaattttctttttctttttctttttttcctgccccacagctattgttggagtgtcatatgggcatctctctcatctcccagatcgatggcatcgtctaggacttcccacatagacaagataaacgaaaggcttccatggacaggtatgtaactgtggagacagcagcgctgcagaagaggcctcctgatcagaaagaatgtctgtcccacagttgactctctggctctgcagtcacctttgacatgacttgctgaataggagtttgttttccaatttccatggttcagccataggccatgcaaagtaaatactagtaaatgagcaacagtaggttcaaaggaacataagactagagtccctcctccttttgaagacagtttgggtagcattcacatgtgaatcaatctgtttggggtctttgaagtgactttgattaagagttgtggcccaatagtagtgaaacgggcagggccgtcaaaagaattggcagttccaatatggacactcagcctgtgctccacagccagagagagccccaggtgatacccatacacagagcggttttagccttggaaaaacaagtcagaaactcactatgcagggaggtttgcatggaaag

SEQ ID NO: 47508 - DNA, 935 bp, Homo sapiens
accctttctttaacacaataggcagtagcaagacagcaaacgccacttcaagactgaatttctgaaactggccctttagctgagagtggccatccttgccggggcgggcgatttactagtttactaacattgttaccaggcagcagccctggcagcattttactaaatcctcaacaagaaaactcgcaactcgtctgaagtttcagtttgtttgttgttactggagttatatcagggagttcttttctatgccagactggagttcagatttaaatcttgcccaactcaaaagcaagcgcacaggaaacacgaacctcgccgccgtgagagcagcctgagtgagccagcactcaccaaggaaagggctgcaggttcgcttgagagtgaggatcagccgaattcctcacgctgctcactgagacttcccctcactgagacttcacgctcctcactgtcggctatcggccgacagaagatctcacatccaagtcacaaagactcagaaccttcttcaacaagaaacgtcacttacaacgtgtttgcttctccatctctaagctcaaagtgccccgtttctctacagcaaattagactttttgcctactttggtgctgagaagcccaaactaccaaccaaagctttggttttctctgagggctgtcggtacagacgagaggccgggattgttctctagcaacccctgccggttgacaataaatgccagaaactgacccagaggcattagttcatccccacgttggagggaagtaaaaaatgtcaggctgagggagagcaggtagcacctgaacgggtaggtgatttcgtgtcagttcatcttacatcagcaagaaaagtagggtcggatttgatttatatcaatatttggagtgatgaaaataatagtctatcaattgggggaaatctatactgtattc

SEQ ID NO: 47509 - DNA, 1127 bp, Homo sapiens
tgcataaaaggaggcctttatgtttcaatcagttaatacctttatgattttattaaaaattcttattcttttagctgatgaaattgaccacattcaccaagctgtcgaggggcaggcattggtagtttttaaaggctcgtcaggtgccttgccacctcccagcaatgttctggttcctgactccacctgattcccagaaccctagtgataagaatgctgtatgattaaccagggggttgtggaaaacaatcctctatgctccattcacactgtacctgggaaagactttaaacagttaaggtaacaaaacctagagatctagacaacagtgtgtgacacagaatcctggaatccttgggaattttctttgttttgactattccaatctctaacaggccgattgaattctgttaaaaaaaaaaaactttgtggtaaaagtcttcaacatatcacaaaagatttttgatcctcagtcaattacccatttatttgaaaacagtcaatacaattgaattccagtgaaataaaaggagttggatagtcccttggaggttgtgacaatagagggttaaatttttactctggggctcaaagtccagaataccatctgcttagtccacctctttctgttcctatttttaatgcattgttctttctgaacatgaataacatttctgtgctaataaatctgcattgctgcaggtaaatgattattagttcatcaaaagggagaaaaagcaccttagcaaagaagagagttttatttcatccaggttattcattattgatcagaaaacaagagctatcccattaattctgtgaaattccaactgatctctttgtttcaccgccaaagactgagagggagaagggcctttcctttcaaccttaatctcagtctcaagtcaatttgtttttaaattttaggaaaagccttttcagtcattaattgatctagtgaattggcggggggtggggtggggctctgtttccacctcattactcaacatctttgtttttctatgtgttttctttcattaaacataactgtgaaaagaattgactggttttgaccaatgtggtatgctataaagaatattaaaatataccttcattatttggtttag

SEQ ID NO: 47510 - DNA, 1350 bp, Homo sapiens
gaaatggctctaatttgtagtaccctgggagcctgtgaaaatttctataatgatacccacctagtctctatgagtgaatcacacgccagaaacatctgccctgtgattctatggagatttctgacatctataaatttgaaggagtatgtttgagaagaaaagcagaagtttcctgctacttaagtctagaatgaaacaggattcataatctctatatttcggagctaatcaagtggcaatgtcaatgggggaaatccaggtcaactttaattcccatcatgactaagtggcagaaagactcagaatacaatgacctagaactgacctcagggagaaatcacagtcaaatcaagatcgctaatttccaggattcttggtaaggatgactcagcaattcataaatctcaacatttacaataaacacaaacctacgtcacatgtcttttactctcaaataggtagtacagtaccaagctgcttctcaggactacatatagtgtttatatattctttaaaaagataagttcagatagagacatagtttaccaagtataaaggaaatgtatataaccgtcttaaatgtattagacattaaaaatctagtatgctcattacccaccttgaatttcttagctctggaagatagcatattcttcaaaagctatcagtttcattacctaagaaatagagacaatattgattttcttcaaatgtgttcaacccttttgttcaaaaagtagtcatgttttcatttgaaagagaaatcctagaaactgtgtggtctgattgcttatccgttggtgtattctcatagcatctctggcttccctgttgatttataatacagcatcattcaaggtaaaaaagaaattgctacactgtgagtcaattcattgcaaataaggaatacaagtttcagctctgatgttgattgtatgatttagagcaaataatttatctcttttggccttaggtttgtttggttggttggttgtttttgtttgttagttctttgagacagggtctcacccagtcacccaatttggagtgcagtggcgcaatcacggctcactgcagccttgacctcctggcccaagtgatctgccacctcagcctcccaagtagctgggagtacagatgcatgccaacgtgcctggctattttttttttatagagacagtgttttgccatcttgcccatgctggtctcaaactgctggggtcaagtgatccacccaccttggactctcaaagtcctaggattacaggtgtgagccataatgcccagcccaggccttagtgttttgtttttgtttttgttttttataaagtaaagcttcacaagaagggc

SEQ ID NO: 47511 - DNA, 952 bp, Homo sapiens
gtatgtacttctgcagctatgttaccattccaagaaagtacaatgtagactccaatttgatgatggattcagaaataagttttcaaactctcaaatctaaatatgatggatgtatacattctctgattccaaaataacactatttggtctgttttcacaatttgaattctattcctgttggaacgcctggctcaaaagccagagtgccttctccatcttgattctctcttcattctctcctctttgagtcaatttgcagttttattccagaatgaacctcctgggttgtctgggagtatcaacaaaggcatattataacacaatacattcctagttttatttggcagcaccagccctgagacaggccttcatttgtgatggtcagaatgcctacgaaacaaggaaatatttatatgtgcaaaatttggaaggtacagggaggcaagttgcatcagtgggagatcaaaggtcaatgctggatgggatgttttgttcccagcctccatcggttgaacttaggtgggaacagatcaaaggctcatgggaaatgggcatggaactccccaccgtccgatgccaagtggtgaccagaacagatgggagcagaatgataagcacagcatcccacatcaatggatacttatttggaagtaactgaagtggaaaggtcaggataaaatgtcagcatctctgtgtgggtgaaaatatgtctgagaaactaacttcgctccaagaaatatgaaggcaaaggggaatgccttggaatcaaagagaagacactttcagtgcctttatcccagctgaatgtactcttagactccctaaacctgattaaagttttctcttacccttagtatgcaatccttgctttacccttgttgctatttggtcaaaaagttggagaagttgctgctagtgaaatgtttatggaagaaaatgttttggtaatgaa

SEQ ID NO: 47512 - DNA, 771 bp, Homo sapiens
ccttgtcttggccctgccactaaccagccatgttaaaatactgaatgaacttcttggacctctgtttcctgttctgcaaaaggagggatttagtatagcttaaggccaactatcactggctccatctccacgacttcctagtgaagtgaacaaaaggttcccataccttaggagtgcccagcctgcccagagagtggctgtgactccttgtggaaattgtcagcaatgacagctgttgatgacaagaggtgtagtagtcacctttgtcaaagcccagtcatggttcagcaggcagaagtctgcatgccttcaaaccagctttagtttcagctcaaggcagcaaacaaggcaatttcttcctaggaatgctgcctggccctgtccatcctgcccagggaaactttgcaggccttgccacttctcagggtgaggcagttgagagtttatcaccataagccattgttttcacagcagtgagagctctggactttcccaggaattccactggaatgtaaacagtcttcagatcccaggcagaaaccagcggatatcctgagctgtccaaagtcccatgttggatcccaaagatttgatttctttttttttttaaatcttaaaatgtatttttgctcattagatacatttctttttctatctctaaatatttaacacccctgatatcagttaatattaatgatctggaatgaaagaataaatcaactgaataataattctgtaatgaaagtgtcatgcaaacaaatctccatgttt

SEQ ID NO: 47513 - DNA, 1026 bp, Homo sapiens
ccgggagtggaggctgaggcgggaggatcacttgaacccaggaagtcaaggctgcaatgagtcatgatcaccccgctgcactccaggctactttatttttatttttaatgaacagggatctttttaaaatggaagtggttggtccttgatgtctggcttcccttgctaataaataaacccagagaactatttgcaatggtgtagcatttagaatcaacaggcttcaaaacagagagggtctattctgttttgttttgaagtcaccctttgcaaaaaacatatggtaatctcgggcagcccatgaagcaatcggcaagatctgaaggatgagaacagtgtgttctttgaaatccctctgacaagcagacagtccctccttccctcaaaccatcctcaaagggaagtgtgtcggcttgggcagtaatgagacggtgtgggaattcccctgtccccttggttcactttacagacaaagttcattagggttaaagatgggtcattcccatccacagattccttcacttgaaatcaagacttcttgggaaatataaatttggagaacaggtaacagtgaactatagttccccccaaaacaaattttttaaaaatcaggtggtattaaaaattgctgtttcatgacattaccaatagatggcagcacgggattcatcttcgcccataagcagcttcacccctgcttttcctggcgaatgttcactgacaactcggcctcaggactttgacgctcttggtgtcatcagagagcaatttgaggtgtgcaataaaatctttgggttccccgccccgccttctgtaggtgacctcaaaccacaatcaccaatcgactgcggtgctgtgacctggaaaaacagcaaggaaactaaaaacaaaacaaaacaaaacaaaacaaaaacccatcctgtgagctctgcaaaggagaacaagatcatggcacacaggcaattagcaaactaaattgaagatgagttctgttagaagagtcaaaaaacaaagagaacaattttt

SEQ ID NO: 47514 - DNA, 1884 bp, Homo sapiens
ctggctttttgttctactcttccataagcatattcatagtgataatgttgtatgtcctgagtttcagtttggaaaatatagtccctggttaaatcaatgggcatcggataaaaactttaatgtctaaaggggctgggtaggtagaatcaatgagtgaagcaagccaggaataacaaaggattaaaatgtggattttacaggagatgtatacattttttaaaagttaataataacattaaaaaaggaaagtgacattgtgcgggaagaagaaattaggtcttctatggactgaattttatcccttcaaaattcatatattgaagtcctagctcccaatgtgactatatttggagacaggtctttaggaggtagttaaggttaaacgagggcataagggtggggccctaatcctgtatgactggtggccttatgaccttattatggaaggaagaggtctctctctctctccctctctttctctctctctctgtgtgaacgtgcaccaaagaaaggcatgtgaccatgttgcaagacgacaaatgtgtgcaagccagaaagacagccttcaccagggaaccgaattagccagcaccttgatttttgacttcccagcctccagaactgtgagaaatagatttctgttgtttaagccacccaggctacgatcttttgttacagcagcctgagcagactaacgcgaaggcttaggcctggatgtgctcagggccctccagggggcaacttcaggttgaatgaagccctgcagattgaaggaagcacaaactcattggggttaatatctgatgtcatttaagtatcagtcctcatcagggctctgaagtcctggggcaacctgtaacaggatattcattcattaaacaaatgtttcaggagtacaagattgaaactagtttgactgtgagtcaagtgggccaaagaacagctacttggagagcatagaaagaaaagtgagcaattccagaagaatgggtgatctccagaatttcagaatgagcatctaagcactcccacacccatgggcctgggaagagattgacatcagcagggcagggaccatagcatgggctttcaatttcaccttctcatcctgctccaagtcattttctctcctgttctagtacaattcaaatattatttgatttaagcctcatggttttcagaatttctttcatttttttcaataattattttttaagtacacatctaggtacattggtgaagaaaacaaatgaaaattcttgtgttcatggcactttagttaggtagataataaagtaagtagaaaatgtgagatggcagaaggccataatatgcattggtagtattgtttgagaatattcaattctgctaaagaagaaatcaactgaaataagtgaaactcatgtttaagtataggaagatcagttagcagcatgagagacaggttagaaagatcaagtgggtcatacgtatacacacaggaagaggaaggaagggcagcgccaggatacctgagattcataacactgtaatatatgtgagacactcgatattcatgagttctttatttggctactcatttgtgaaatttattctgaccttgagtgacctttgcccccaaaaaccaaatagaatcttgctgctcagcaggttaattggcaagcaccagccacgcccatgtgctggagcctcataccgtttccacctgctgagactccatgctgaaaagttcaatgctaggccgggcaccgtggctcacgcctgtaatcccagcactttgggaggccgaggtgggcagatcacctgaggtcaggagctcgagaccagcctggccaacatggtgaaaccctgtctctactaaaaatacaaaaataagctgggcat

SEQ ID NO: 47515 - DNA, 3505 bp, Homo sapiens
ctgggagaagtatctagtgactgcctgtcctaggacccctcagatagtgacagatctggaggacagttgtctgggataggagagtaagactgagaaggctgtgccagcgtccaggagacagttaacctcctggccctcaatggtcaagcatatctgggacactgtgagggtgatgggctggcgtttgccccggggaaccctcagtcctgctgctggatcatctggttagtggcttctgactcagaagacctttgtcccctggggcagtgggccttccagtgattcccttgacataaagggcatggaagagggggcggcttatttctatctggacaacctttttttttttctttttttttttttttttttgagacggagtctcgctctgtcgcccaggctggagtgcagtggcgggatctcggctcactgtaagctccgcctcccgggttcacgccattctcctgcctcagcctcccaagtagctgggactacaggcgcccgccactacgcccggctaattttttgtatttttagtacagacggggtttcaccgttttagccgagatggtctcgatctcctgacctcgtgatccgcccgcctcggcctcccaaagtgctgggattacaggcgtgagccaccacgcccggcctggacaaccttttttaaagtgtccttgtagaccgcactggaagcaagccctattaggcatttgatttgtctgggcactagggatttaaaggtgtctaaaaagggcgaactttagcaacattgaaagtgagcttaatagttctgttttaaaagtgcttactcattttctcatgtaagctttcactttcttaagttttctttaactgtcaggaaataaatgagacagcattctgagaaggatctagaggtgccaccacgaacattctgaaggaggctgatagagcggacaacccaccaagtctgggagttgacttgacagccctgcccacgagaagctggctaagacagcacagtagaaatgtggcctgaagattggggcacaaacacagcacaaatctatcataaccgagtcttaaatttgctttacatgtgaaaaccatatactcacacaccaacaagaactcaccccagctggcctaagctaaggaatctacagtccttggaaaaagaacaagtcagaagaaagaacttcaggatccttccagctgtttcccatgatttatcattcttacagtgtagccgcttcaaaatacttttttaacttcatgctatgaattccaaacacatttaaggttaacctctgtctttggtgtgatataagaccacttatgccactctgctttttcttggttggcttttacatttcctttcatgcatgccctgttttccagtaaagtaaccctatcccagggcctttgactagctctacttttgaatcaactaatatttgctgtttccacgtggcaggtgtgaccttaggccaggtgctatgagttaaacaaagatgaatgagacttggaccctgcccttaaatattcaaaccagctaagggttggtggttaaactctggactcagacagacctggggtggaattccggcttctctacctaccagcttgggcaagttatttacattcttctaaattcccccctttttttcccccacaactgggcatgatattatctacctcataggcttgccatgaggattaattaaataataaagtgcagtgccacatagtaagcaaataatttagccttctcattattcctattatcattatttccatggggaagaggatgtttggacttttccttctgaaccctccctcccttttttcattcaacctcttaactgcacagaactcttctgttttcttttaagagaagagggaaagccattctgatgaagatctgagatgtgaatataaccttgactgcagatggacggagacaataggaaattatgtcatacctctatttaatccacgttggtcctggtttcatcttctcatttctgacctttgagaaacatttgttgtagaaaaggacaaataacatgattacgtcgctgatgattagtctctaggcattcactcaataaatatttattctgtagtttctgggtgccaggccctgattcagtgctagaaacagagtggtggacatggcagccacagcctctaacctcatggaacacatagcccagcagatggcaagcacgtgcccaagggaaagaggaaagtcctggaggtgaatgtgggggagctttgcctaatccatcaggcacaccatgaccttctatcatagtggaagtcccatgtgcatggtgagtcacctgtgcatggtggcaactctttatttgcccaaactggaaactcagggtgaaataaacagctgaaagattgcagatctatacaagggattaaatagtagaatattgaagtccattgatatcatcgattttaaattgaaaaagaattacaaaagaatgtgggttaagagatggtttaaacctctccaagctattttaccgctagaaatgttaacacaaaaaaatataataatctgataatggaggataatcgctgatatttcctgtgccttcctccaatcctcaggatgacactggaaagtaaactatgaatttggattcaaaataatgtggtatggttggagagcatcaacttcatcaactggatacaatggctggagatgctctgaattttcagttagcagggctcagctggtctccatgaaaatggtagttccattggtcacagtgtctacagtgatttcatgtaaaaattgcatcccattgcctagccatctggcaaggatctgattgctgtcccttgagattcaggaagttatgatggtaaactcacagctgaacatggctggagtagagatgggggactgaggcctggtattacacccatcttccaaatggaatgagtccggtgctgggtcaggtcccagttgacactcagagagcatggcaggctggtcagcgatgcgacagctcacgagagtgaaaccgcaccacacagaagtaacagggactctttgagctcatttcccttccttccattgtgcaaggaacttggcaggcaccgctgtgtgggccacagtggacactcagcaaaacagcacgcgtttggcttctaaaactcactctgccagctcctgacttatgagggtggtggcaaaagacctgctctctctcagcttctgtatccatatccctaaaatgagggggttgtgttgtacgatgctgaggaatgttaggatcagataagatgatgagaaactctgttcctcctctgtgttcccagacaccttaaccagaaaccaggcagtcatgggagatgcctcactccttgtttctcccctcctattatttctacctcctaaacccatcccttcctcttcttcccaattgtccccccttatgtcaggctgtcctgttgtctcacctggataaacagattcccagtgtctcacttcaccctc

SEQ ID NO: 47516 - DNA, 1261 bp, Homo sapiens
cattatcctgcaatcatagtgaggatttccattggaaaaattaataataatagttagagtctcacttctcccttcttaggggaaaatgacatattaggcatattcatatagggtattgcatttttcatatttgctagcaaggaatgtcaagagaggcaactggtgctatcagataacattgaaatgcctcaccctcacatttcctcacctgtcctgtgacccacctagcctgcataaacccagtgaagagagaaggatcaaagttgagcaaattctcttccatttttgttgagtcaatcacttaactatcacaggaacaggcaggcatgtttaaggacaccctgcccatctgtatctcttgtgctgtcaagatgaacgggcaaagtgttagttcatgtaatgtgcaagaagacatgcagcccgggtgaataacttctgatcagcatgtagtataagagaaaagtctgtccagcatggcactgagctgcattccagccccatgacatggcatcagatttggcaactgggtcagcaattgtgctccagttgttgcttctattatctacagggttttgcaagcctggaacttccacccaccgaaagcagactgctggagcttatctggcgtttgttagtgcagagctcattgtgttgtcatgcattgtctagtttaggcttgattccactgtcacataatccaagggaaaatgaagagctctgtggactgatctccatttaatttcaatttttctattgttagtgctctgcctgctagggaattccagaaagtgttgcttcataattacaaggtaggtcatagcaaagaaatgaatggtgtagctgtcagtcataagggaagtctggggaaaacagccctggttgctggcaactgactagatgcgtttgctttgtgctgacattaaaatctcatttggaagcaacgtgggaggtcagtgagtctaactgctcctgctctctcagagcagcagcactggaatatggtctttttttttttttcttgctctgtcacccaggctagagtgcagtggcaaaatctcagcttactgcaaccttcacctcccaggttccagtaattatcatgcctcagcctcctgagtagctgggaccacaggtgtgtgccaccatacccagctaatttttgcatttttagtaaagatgggggttttgccattttggccaggctagtctcgaactcctggcctgaagtcatccacccagctcagcctcccaaagtgctggg

SEQ ID NO: 47517 - DNA, 693 bp, Homo sapiens
accatcaatgataagacacattatttcaggtactgttcaaaaagaaaaaaaaaacactgctaatcataattataagatgtcattgattgtgaaatactccctaatttcaattcaagaagcagtagaaaaaaatttttgttttagaattcatgcaatgtagtattttcatttcccatcactgcctagaacccacaaagaaacactctgcctgggccatgtgtatatctgtgttaagggatggaatgggaagtggctcacaaaaaggatatttcataatagatcggaactggctttgaagaaactttctgagtcagaaaacaaataaaacatcaatggcagatatcctgcatcaagaggacagtatgcttctggagctgccggtacactctataaaaatgactgcagtcaggtccagtaaaagtccacttatttggcttctactctttgccattcattgttaggtggagggctaccagcaaaatcacatctattctctctagatattcacatactggtaggagaggtagacaaacagaatgcagaggacggtttcaatgtagaaatatgcaaagtctagaaatagtacaagaaaaatgaggcattaggggaggagagggagtaagaagtgtggctaaagaaggctccttgagaaggcaacgcctgagcagttttgaaagataactaagagctgaa

SEQ ID NO: 47518 - DNA, 341 bp, Homo sapiens
tatcaatggaactgaatgctcaagttagagcataaataatttttgtacataatttatatgtttctgtaaagcaaaaggaattatgtttgcatcagaagcttttctcacgttattgccaaactccctcttttttctgtctgatgtaaggtcacgctgttgcacaattgggaacactggggtaataacgggagacagaaaggacagggaactgtgcatttcagtttgttcaaatacattggtaactcatctctgtctcctccacacttcctcctggctctatgggtcatggtagaggaacaattacgtggaagaaatcaaatatgaatgactgctttccccct

SEQ ID NO: 47519 - DNA, 1025 bp, Homo sapiens
ggggaaaaatgatttacaaggcaggagcgagacatttcctctacatgacaccatggctccaaaagcattgggcagattttctacaaaggataaggaaagaactaaacatgttctatttcaaaatattacagactgattattggatgcaagatggattgcacctcagaaagagcacatcctttcgtcaacgcatactggccatagagtctcataaaacattttcaaatagctgagggcaagcccggagatgagaagtcccttcatgctgggtttccaggcagaggtcactttgccagtgagcttgtatgctgctcagctgacgcaggagttaagtaaaagcctccagcagcacagaaatgtgggtctttccctcagtgattcatcactatcagcaatcagacaaactgtctcataaggtctgagcataaattacttcatctccaccaatttaggtttaaagatcattaaactctgaatgcacttggaaaacaccttgttcatttgttacttactattaactctagaatattttatatggttgaccacaagaagacagtgatgataaaatactgcaattacccaaccataactttaagagaaatcctctcatgttcagaactcggtataattcattaataatatccatcaatatctatgaatataagaaaacagaggcacttacccaaatgagtaatttttttaaaagccaccatctacaatatcgtatttcattgaatcctcacaaaaattttgtgatatatggctgagactttaaacccattttgggataagaaactgagatccagaagggttagggcacttgcttaacggtacaccacttgttagtagcagagctgggatttgcaccagggttgttccaaattctagtccagtttcttcctaatatactaggctgtttaactcagatgatggccaggcttactaagaccattatgctcaaaaattttaaataaatataagaatctaggtaacagacaagttcttcctgtgcagttggaaaagta

SEQ ID NO: 47520 - DNA, 2337 bp, Homo sapiens
tttcttgcaattaagtgacgaagactttcaaaccacaaactttacaaatatcttcccccatattaggtctattgtgagtgaaacaactgaagtttagcacctggttcacatcaccagaatgaaattattagtcctgtttactaacagagtgctggtagaaagtcagttagtatttcccaatgggctggtgaagcattgctgtatctaagcaagaaaaggtatagacttcatgtcacatgtgcatggtttttgttagaactgcttgcgatgggttatccaagtggaaaggataaccgtgtccaaagacattgaatcccagctctaactttctcaggctttctaagtctccattcaaatctccctgaatattcaccagttctagaaaacaaaggaagtaaaaaataaaagcaaggggcagggcgagaagcaaaacagtgagagtccaagaagtcagcagaaaaacatacttttgtaaattggaccggttagcaacaaaatcatctgattcaatgtaggtaaggttggcactgcatcaaggtatgggagttccctccttgccctggtttgacccttccttccaggatggacctctgggactcgctctttccatccagttgctcctccagagcctcttgggttcagctttggtccctgcaggtgaaaagccctttttcttttgtttctagactgttcacttcttgcttcaaactgtggtgcactgctcttacaaggttctacttcgctttcttctcaggctattgcactgtttggggctcctaaaagtccacctgtatccctgtcccattaatctttatacagggtagtttacctgaagcatgtttaacaacatgtagtaacatgcaaggatattgaaacatggttttatttctcccatgtttggaatgaaatagctgctgaataaatattttgtgagtgactcataacctgggaacatggaagttgtagaatgaatgatcaagcccctcccaatcaaagaattgatgtcaccatcacccacttcacaaatgtgtcacagctaccaaaatgctttaaacatttgtaacaggaataacatttttgaggcattaagtaaatatttatttgtttctggtgattccttttccctaattgtcttatatgtcattacctattgaactaatgggcagaatccagtgagaatgagagccattactgttcttcgtgtaaaaatgggtcttagaaaattacaggtagactaaagcctgcaagcatacaccactgttctgcagaggccatgctttactcagaaaaaaaaaaaaaaaagatttaaaaagacacttgtgtggtctgaggagctgaatgctgggggccgatcaaggggtaggtatggacagcactggccacagaagggttcccccacgacagccccacggcagccttcctgggctgtggaaaggagccgaatgagagggaggaagatggggaagggccatcatagggcagtcagagaggtctgggggtaatctgtgagcacagtgtaagccaggaaaacagccagtctttcacagacttccagtcatctagaactggagaaccagcctggggcaactcccacggtctcacgtgctgcaatatagaaataagacagcaacaggaggatggggtgggggcaggagggaggatgtaggtgcaagtaggaccgtccgagtagatggggacagggtgcagagtccaggcctacacgtacagtgtaagcaggcccctgacatcagccaggaactccagctcagcacctgaggtgcatggggctaatcactcctctgcgtacagcagagctcagagagcaggctcctcaggagaagccatgagtctgcagagggcaacacaaggtcagagcccctcctctctctgccagcccacaattctctcacctaggaatagaaggaggaagagaggaactcttgggaggggagaaactgccctggaagagggtttcaactttcaatggactgaatatttacccccaaagaactattttagcccagaaagactggaaattgtcaagaaaattgtcaagaatggaaattgtcaagacactgctgtcaatgaaaacaggggctccgggcaagatgagctcagtgaaggaaaataaagatgcacttctttattttttatttatgcacatgtgattcatatgtgtgaattttgaccccactacaaatacatcaattagtttcctatcaatatgttaagagaaaaaaatgcttcccactccccaaattaaaagcaatgattaccagattgtgtcttaaatctagaaaacgtccccattcaatatatgtgctctttattatgggc

SEQ ID NO: 47521 - DNA, 2265 bp, Homo sapiens
caaatgtcctcatcctgcttctagcaagaccccagagcaagctgatgcaagtgctcattggtcacctgcatgttgcaatttgatatttacagttagcacccctacctcgaactcttcctcataacctatatatggctgtttaaattaccattttagtccttaaagtcaagcagtatctgtatacgcaaaattatattcctaaaatcatcgtacgtacgttaccattaacaatagcttaaggttattacgtgagttatagtttacactgagattcacagaattatttaacctggatggcaggttggacgtattttgcacccattttgcagatgaggaaatagaggcacctttgttcaacagtctttctcaacaaagattaacccagatctttagacttgtggacctgcaccaccagcccattcaaatatctgcttgcctgctgccattcctaggataactgatttggactttgctacttatctatagattctttctgctttaaaagtgtagcatagctctagatccactgtttgcccaaaaacttcccttatctaccttgcccacactaaactcccctttctctgaatgcccacaacacatcctcttgacattgctattttgtaatccatcatgttcttccttgaaacaactcttaaactcttacttacctttccaaatgcttacatcttgttgcccccaactagatagagctcctcaaggatcttttcctgtccatttgccccatactcccttgcagacttggcacacaagttctcatatatttctggttttattgattaactaaaacacttcaatttctctccctaaacctctgggaaaagggaagaactccccaaagcggacaaccacactgacaaagccaatgttctgcttcacaattcggcatgtgaccgtccctgccaagaccccagaaattaatttattatttaaccaaagccagtgattattgcataatttcatccttccaatcaagaatgctgctctttatttaatgactgagacctacttacttagcttccaaatatggtagtaattacttgatatacagattaatgcattcccaggctagtgccttgcacagaactatcaaatataattggggtttctaaccttgtgacacagccctacaaattgccttctttatttccttttcttaaaaagtacgttcagtctactctggactttcccatctgtcgtcaggtgacttcctgctctgttagctgaccgtgagtcacgtcgttgctgcacagcacgttcagtgaggctgcctctgcgtgtgaggcgaccaggagaggaaaggacagacttgagctatcagacctctctcctggtgggatattgtttgtttcccctaccctgttcatttaaaacctctcagttataagctttgctcctcagtttatgcctctgtgatgatgcttcaagagacagggaaaccagtttcctacattccaaaataaaaatgacattttaaaaagtctatccttttaggcaatgaatcatttatccgggcaacccctttcgtcaagggtcttcttcctttcagccacatttcggggatgtcttctgtaaggcaaacggttgtgaccaagtgcgtactctggaatccaaatgatgcaagtagagttgaaaaggaatttcaaaattacaggaaaggagctatgagggtagagaggatgggtttaaaatacaaataaggaaactttgtggattggggaagtcattggagcaaaataatggggaagttggaggctcaagaataaacaacgtctagaaagttagaggagtctggagggcacttttgccttctgcaaatatcttgtatattattttgctacgtgggggcttaaattcattctcattaaaagaagataaaggaacagtaacactagcctgtctcatctgatgtttttaggtttgtttgtttttattattattatttctttttagagacagggtcttgctctgttgcccaggctggcatgcagtggcatgatcatagctcactgcagccttgaaattctggactcaagcaatcctcccacctcagcctcccaaagtgctgggataataggcatgagccgccatgcctagcctgtttttagttattatttattttttcttttttgggacagggtttcactatttggcccaagcaggcttaacacacttccacttaatatgctaataaagtaatcagtatttggataaaaagttggctaaacatagaaataataatctaaa

SEQ ID NO: 47522 - DNA, 1452 bp, Homo sapiens
agacatctattagctgaataataactagcatgtgtatagccaacttctttatgccaatctttctggattggtgatattatggatttgtgttggagaaataaatgtatccattaacattttagatcagcacttttaagccccaaataaaaaaggatatgcattgattagggttgtatctttacaacattcaatgaagttattcttggcatcctgttttggagaaattggatctgcacttgtaggtatgtttacatgtcttctttaaatagaagatttcaggttttttttttcttctcataaggcctagtgatatatgggtgctcttcaaatgttcattttataacagtttaaaaatctcagtaatgtagagtgggaatctagtactattgaattaaattggaaagctctgcatttttattaaggaaaagcttcaccaattatttagaatgaattgctccaagattctccattggctttcatttaggaagaccctgtcatagggtttggacatcgtagttgtttctggattactatggaaatatgatggtcattctctaaggctgaacctattattcctagaaaggaggtgagtaataacatcttcaactaaaatcaatgtggaatcataaggaaaaatcttgtgaatctttcaattaagaagaaatcaccttttaaggtaacatattctgtagacaatttttctgccttcttcaatatgaccttagagggctagttccagtgactaaacccccaaccaggcaaagctaaaattctgtcttgactcaaaagcagaattccactacctgagtcacctacaaaacttcaacagcaccctggattttcctgaaagcatccccagccaaggattgagcaggtttaggcatgttctcttatgaaaccagctgatgacacagttacagggactatggctcaaaagttatgggctgggttagtgccaaccctggtatagtgccctccattaagtactgagaatgctcatctctaaatatcaagacactgtttgagatgaaatatctatgtggactgctcatggcaaacacaccacttttagatctatcctttcacgatatgaagtgtatttcatccacgttggcttaattccatccaattcccatgaagtacatgttcattttcagctgcatttgctcatttgcttttaatacttcttctctctggctcgcttctaggtagagaatcatttctttttttatatactttaagatttagggtacatgtgcaccacgtgcaggttagttgcatatgtatacatgtgccatgttggtgtgctgcacccattaactcatcatttaacattaggtatatgtccaaatgctatccttcccccctcccccaaccccacaacaggccctggtgtgtgatgttccccttcttgtgtccatgtgttctcattgttcaattcccacctatgag

SEQ ID NO: 47523 - DNA, 4097 bp, Homo sapiens
tacagcccaacacagcgctgatttagaaggtggaaaggacagtaaagaccgcctggtggtgggagtggcaattcacaagcccagcagtagaatcatggaaagtggagttcgaacataatccagggctatagaccactcctgcatctgactgctattaccttgtcacaaatcctggcaggcaagatgacaaagcagttacatcaggacagttggcagtggcaggtatgaacgtggcccctcaggcttgtcactcctctttactgcactcccagttcatgacaccagacagcaagacatgagccagataggggcagtggaagctgcaggaggattgaagtcatggagccagagatgagaggaaacaggccaactctgtttacaaaggagcaccagcaggagagtggtgtgaggattaacattccatgcagggtctttcagatacatgatcttcttctgccagctcaactgaaacccaggaggtttcctgaaggtgaaaccaagacccttctacctctgaagccgcattctgtctaaggtccgtgtttggctgttttgagaggctgggagacaggacaccaaaagagtacctgtctcacaggatctttcctgagaggaatggtctagtaagactggtcattatgggctttggagtaacacaggcttaatgccactggcgactctgccccttttggttgtggaaactgggcaaatgcctcaagcttcttaaccttcatataaaaagcatatataagcatatagcaagtacttgataaatgtcattttagaccctgtcatttctgctagccctggactccagcaaggtccatttacaatggatagctgactatccattgtttgaatgttgatagcacatttgtgaacaagaagagaggacaaataacaagaggtttggaactggaagaaattccagccatcggttttaaaagacgaggaccagtcttcagagaggccactagtgacactctgctccaaacttctttttgccaaaaaagtgccaccctccatccagcccccacccccatctctgcaagtccttactggcgagaggaggatacttttctaattaaaaacctgtgatatatggcctgacaagtattcttaaatgtaattaaggggaccatagtacagaatatttccatccggttctagtttagccaatctagtaaatgatccaaagggtcccgtgcttagagggcagtaagacagtaaaaacgccctaagactcctccctgcacagcacctgcacccccactgcccagggggctgcatccatctccacatgactcaccctccctgtgcaacgcatgggggtagggagggaagcgccagtattatcagccatcagcaccctggggtgaactgattatcaggacaactaaaaacacacctaataaagccttggagacacatggcaagcaccgtgatggactagaagcgatttctaagctgaaatgctgctttgaatgcaatgtcagctggatgcttggtgagcagaaatagacaaggggaaatggagcaagcgcggcataggggtgagtgttgttctgattcctaagtttacctaagactggggccacggggtcgggtgtcccctgggacctacgtctcatgcagcctggggtccagagctggcaggaacaatggagatggggaccaaaggctgtcaccgctgctttttctcgaaatgcccgcccgggtcctgtctggggctcccgcctacgcgctcatcacgtgcacagcccaaacttttcagagccggcccgaggcctgcgggcccgggcgccagggtggtttttagggttttctttctttcttatttcccttcttcttctccacagttgatgattttctgcagaaaaacaactgcgaaaaagaacctatttcatttccagttcccatcaccgcgatttccacatggatgtgacgtgaccccagcttccgaaatgcccaggtgactcacgcggggacaccccggggcggggcgagggagtttctccgggcgcctgcagggaccgggcggggcggggcagcggggcggggcagggaaagggggcggggcggggcccgcaggcccggtcgggcggaggccgcgcgcgcccctcgccccctgcgccctctggcggccggctggacgcacttcgcagcccgacccagagagtcacgtgactttggaaagtcccgtggaaatccccgggcctacaacccgcatacaactgaaacggggcaaagcagactgcgcagtctgcagtcttcgtggcgggccaagcgagcttggagcccgcgggggcggagcggtgagagcggccgccaagagagatcacacccccagccgaccctgccagcgagcgagcccgaccccaggcgtccatggagcgtcgcctccgcccggtccctgccccgacccccgcctgcggcgcgctcctgccttgaccaggacttgggactttgcgaaaggatcgcggggcccggagaggtaaccgccgcgcctcccggagaggtaaccgccgcgcctcccggagaggtaaccgccgcgcctccccgtgccgtctgcctcgggctcaccgcagtcaagggctgcgggtgcatgttgggcagcgacccccgggctggcaccgtctacctggcgttggttttgcagcgctcctggactgggagtttgttggacgtttctgtctgggttttgaagtgctgggagttgaggtcactgctgcagaggttggagtgacagccctggatacctccagccagctgttcctttcagataatgcacggaacttaagctgcagctgactggtgaagaggcgcccctcgggccctccgatcgggtggtcgttggcgctttgctcctttcgtgtcttttttggagccaagcgttgcatgctcatggccacgtagaccttgcagaagcgctgcggctttttcccaaattgtgcaggaccagcccgacggggcgtagggtaccgcagtggccgccagcccggcggaggtggggggcttcagtcccagagacagcttcccagacgctcacgggtccttgcagggggctggggtcctggcgcggggttcagcttttccagtagcagcagtgtaagagaagtatgcatgtagacgtgggtcgctggcccctgctccagcccctaccccacggttagactgtctttgtcagctggagtcgtcccacatcctgccacctggcctctcagaaaagcagtggcattaagtaaggaaggagcttaactctttttgagcccgctttgttttcggttctcctcgcctcagatcttcttgccttggaaagccagtctggtcaagtgtctcagggtagcattttggcagaaccattgttaattaaagggacttctggaccgcaaccttaatgtaccagattattgagcagccaatgaatgcttcattctcattgtttaaggtgctgctttgatttttttttcaattctttgtactatttttgattttttggagaggcacatccccaaatttggatgaggtatttgttgataaataattcatcaatttccacaatgcagacaaaaatgtctgcccagagtggaaaaataaaacaagggggagaagagtttgagtaacggagaagttctgtggaatcctagtgacaaaagttgagaaactacctttaaataagacagtgaggtaacaaatgttaaaaaaaaaaaagttaagggtaatattgcattgtttgccacttataacgtatctgaaacatttgttctttaatcttaagcgtagagtggtccaagacctggaaatctgggcagtgggttttgatttctaaggaggcagttttacaggctgtgcaaggctaaccctaccaatgagatcacactggcgtatccgatattgacatttgcatgtcttgcctatggtttacagctctcactattttagatctttggtgaaaaatctttagattcagaagagaaaaataaaagagtcaggcaagcaaaaagagataacacctcatttgtttaaaatcttcctactgcccatctctttccatctgattgtggcaggcactgtagccacaggtttggtgttgtggg

SEQ ID NO: 47524 - DNA, 4151 bp, Homo sapiens
cccgtaatggaaatgttaaaagcctttaagttcaaaaggaaagaatggtgtgaaaactggtagtacatttgtttcccactgtcattagaaaatgcttgtgatgttcttacacttcttgaattggtagcattttatgggttaaccagtgaatggctgttgaagacatgaagaacttcttttgtctcctcctcctctctgacctaggttctattgcctatgccctgcaaggtgaaatagacagatagctgagatttttagcatgaattttagacttcaccttcattatttttaggggttcttagtcactgaattccttcctgtctgtgctgttctgccaatggcctttaccactagtagctatttcctattccaagctttactgttttgttttttaatcatttcccttgggtaagaatatgtgcatcaacaggaatgtcagagcatactgtttcatgcaggcacaaaattctgctctatggatgtgcataattatgacaataaggaagttgactgtacaagctcaattaaatgctcatagtctacataagagcaggaatctcaggtccttatatctgtgacagtcccaaaccatcctaatagaaataatatgtccaagggcagaaaatccttgttgacaaggattacgataagaacactaacttaattaacttcattcaaaagccaagtacattaactttggctttttttgacttgggtaacttagagtgattggtggacatgggtttttaaattttgattctgggggctcttgtacattaccccaacgtcttgcctagatttatgaaacactgattcttagaaacatagatagaaagaaaactggggatagctactatctgcattgttcttggcattaaattaagtgatacttagaggtaggtaattatgtgaagtcatcatcacggggtttatgtgcctgacaatttgtggttttaatcatctcccatttgttaccaaaaagagatggagtcaactttgggggagttggaaacaaagattctgctgaattaaaaatgtggtagaaagaggaacaccttattaagagaattaactgacttttagctttatttccttaagaaaggaaatgctctatttccactagaaaaaaaaaaggaatataaataggaaacacttattttgtaaacatgtcatttaaatcaacaaggagccacactacaaataaaactacaaaagcaggtgcattttggtaacattttctgggaaatcatttttagactcagagtccttttgtttcttcactttcaagaaaactccttaagattctaaaaaaggaagaaaagatatttagggagggaggaaaacaaatgactttttctttgattttaattagcaccttttaaaaaaaaattaatccttcccctgataggagggttcttcaaaggcaatatctgtttggggagggggtgattcacaagtttgcatttgaggatatgagactgcggtgaatgaggaagggagtaggtggcataaaattgaaacttcatgtgaaaaattccagcgtctattggctgcagcgatttcacttgtataatgagtagccctattccagctcaccctgaccacacccacttggaaagtccagggtgcacttcgcagtttaaatgtctacacaccagaacaaaaagtacaatagctgttgctcaattgctagtcaaataacttagcactggggaattccagatgttacttagggaattttatactggtgcatctcaataaagaactgaaagtaagcacaagaagaaaaaaagccttatctttgctctagattttgcaaaggggaaatttcaacagaacgcaatcattgctacacgtctgccaagacacaaggcttgggcgatcttttttgttcatttgtttgaatacttagctagtttttctaaatgtatacattgaaggaatactggctgtggaagtatatttgagggttttttggtttctttacagtttgactgtaattacaatttgataaaatttcaaatagctctattgccctacttatagagtaatgtaagaaacaatgtaacttttcattataaaaattattttgcacttgccaaaggagattaaggagttaactttttttgttttaaacattcccccaaaatatttatcgtttgggggttgaaaaaaatgcagcccattgaattgtgagttttaaactggaaaggtcacagattaatggcatacaattaaacctgtttttttgtttgtttttcttctcaaaatgttagccctaaacactgaattattttcaaatttagacacccaggtgctttttaacttttgtactttacagttactaacaagcaggtttgcataaggcatttttgagagccggactagcaggccataggtaattccgtgttgtcaatacgactttccacaccaggagaggaaactcccagggcccaaaggctaaagtggaatggtcaagtcatttgccattgagtcatagccagaccatccctatctagcaagccatgcctgcttcctggtttgtgcatgttgccctgtgtgctcctccttagaactagagagcagcaatgccagtgccttcaccagcaaatcaagggatggtaggaagggatagggctttagagatcatcacttactgccctcatttcacaagaggaaaaatgcccagtgaacttaaggaatttcctccaggtcacctaaactagttaggagcagacttaagctagaaccaaggtcccctggctcctttgcagttggtgtcattcattaaaaagaagaataaaaagaactctttttttcttaaagctgtcatcatcttgtgaaatatcagtttgcccttgactaggaaattacatcaaattaaaccattcagtcccctagaatagcagtagggctggtttattctgaaaacctttgctgggtcttacatgcagataacttgactttccttctcttctcctcctttctgtcctcaggtgacggcaattgcctcatgcatgccacttctcagtacatgtggggcgttcaggacacagacttggtactgaggaaggcgctgttcagcacgctcaaggaaacagacacacgcaactttaaattccgctggcaactggagtctctcaaatctcaggaatttgttgaaacggggctttgctatgatactcgggtaggtttttccccctaattatctactaacagagctccatggtgggcatagggtacccctgggcgagtccctgccctctggtagcatctgatggactaggtcacatgaatttggctaagcgaagcatactcaatggaaaacaccagaaacctccagtgggactcacccaaggcttttgccctgcttttggttagcagattcccagctgtggatccgttcctgtagcagcgagtcttttgatcatggccttttccactggtgttttgttgtttttcagtttgattgcccttagctttgctgagccagccagtaagattaagacacgtgcctcaccatcctcagtcacaagtttggaatttttgtgaacatttggataaggggctgcaatatgatacctcatcagggatttttttttaaagcaggtgctgtccccgtcctccccaacttttgagtttgccttgtagtggaaaaaagtaaaggaagaaaaccgaaatggggaaaaaagggtgatcatttgaatgatggtttcatgaaaggggaaaaaataagctgagttatataaatgaataattgtagagtgatgtcagaatgactttttagtacagggagtacaggatacattcaagcttttttttcaccccgctccccttagaactggaatgatgaatgggacaatcttatcaaaatggcttccacagacacacccatggcccgaagtggacttcagtacaactcactggaagaaatacacatatttgtcctttgcaacatcctcagaaggccaatcattgtcatttcaggtgagatgcctgcagatcacggatctgtacttaaatgctttcagccttatgccttggctcctggagaaaaccacactgccaaagttcaggtaacagagttcaatggaatttgatgaaagtcacctaagggcctcattttcctttctctttctttgaacagacaa

SEQ ID NO: 47525 - DNA, 897 bp, Homo sapiens
gtttcctctttagtgaaacagagatttaataagcctcccctcctatctcaaagagttattttaagattcaaaactagaatgggaaaatatatataaagatatttttgtaaatcataaatgttataaaggtcagaacccaagaaggcttacctggaaagtttgcaggatcttggcaagggagacatgaggacaggaaaagaagccagaattactggggactaacctttctgtagaactgggacctgagatggatagctagattttcaagttatagtgtcaaaagggatatagtaagcttgacacggtatcagtatctaagaggtccaatctggggcaaaacagactgtccagccaatggtgaattttggaatcaggcattcggcagggttgactgagatctagttgtttggattgatatctcaacagcagatcaaagtccagacagtaatatcccccacatagtagcttggcatggagtaggcaatcaatatatttttattgacttgacctactgataaacagaataaaggaacacatatctggcaataagatatcatgttgtcaagaccccagagaacctgagtgcagttcatgagctggctccaggcccagatagggatttcagtgttaaccagggcaagctgcctagtgacatggacagagcaagctcagtgaaggccaggaggaagagaaaggatacagctcaaggggctcaaagacgttgaagctcaccccagacgcaatggccttggatccagcacaaattcaaaattgtacctatgagtagggttacagcatctgatgtacttcaaggcttggtcaggctagctgcgtcaggaccaggatggagctaagaatgaaggtggcgggtgcccaaagcttaacagaaagtgaaaa

SEQ ID NO: 47526 - DNA, 1221 bp, Homo sapiens
ttagatccttgtctcagaaatgtaagcacagggcaagaaagtcagcacagtgccctggagtcctatctgatctccgggttttgggggcaccttccagaaggtacaggtgccacaaatacccctgcaagactcagtggaaaaactctcaccactattcttatgcccaaggggccacgctgtgagtgtctgcatctcctcaaccacacaggtcttctcattgcatgcctagataaggcagttacattgaaactattgcatcaccttgctgcagtcatgtatgattaactagatatgctggaaagagagaggaaggaggctggttaccgagtttaaggagtgtcatttatggtaaaacacatttttcctataataaaatcaatcataggtggtggcaattgctacaacatgctttagtattggtttgatttctccatttctagatagtgtttcccattaggttgttttttttttttttttttaatcagcctcaaagaaaccttaaaataaagttgtgactgagggcgggtgaaggggacatggagtatgatagtcacttttgttccagtgttaattttcaaaaactccggatgtctaatattgaaagccagtccagagcgctcagtgttaaagaactcgctccctacccgcccccccgccaccccaactgcggggctgaatcacacgaggaaggaaagtctggctcactgctttattaattcactactgtgatttctttctctgttactaaaggggactgggcggggggtggtaaattgagtgggcagccaggaaatgtgatatttttcttggttccttgtgattggaggaaattctgtcttctccttttggttcaaaagttttagcaacataacctttggttttgttttgtttttctgtgaagtaatttgacttttcagtggaagctaccccaagcccacctctctggggttgtaaaacccgctcgctttgatacaatttcattaaatgaagtcatccagatggtgagcccatataaaaccctgaccttcaaaggtctctgcctgtctctaggtccttgggtaatttgaagtgtcacttcttggccatgtctgctcagacctgtcaccttaaatctcctctttgaactttatcttacttttctccttaatcttcttttgatgggaggtgaacattaataggaatgatcttcaatgccggttctctgaagacccgtagtaattg

SEQ ID NO: 47527 - DNA, 2770 bp, Homo sapiens
ttaaagacatttgtagaattccaaagaaaaaaagggttgctatcagttaactcctgcaaataagaacctaagttaaatctcagctcagcactgaatataagctcacaaagcttctttgaagataattagtttgcctgtttttgaaacttcttcattccatgcaaatggtttttcaggagaatgtatctgtgttttagaatgccgaagttgtttataccttgtctgctagtcctaacccatgctgtgatgactcactcacccccaggttgagaggaaagattgggctgctctgttaccaaagtaaacactagggcctaagtagtgcctttttcattgatcacctgctaacggacaggctatgcaaacacgctcccttggtgagaacatgtagagctgtctttttttccaaatgcatcccttggattacagagctacatattctgaaaattcttctaatgtcttcttagaacaaaaaaactgttgagtggaagaacatgaacaaccaggcatgtttgatacataagctccttagtaccaaacaagctgaaactgggatgactcagacaatggcgtagaagcaggttctcttcttgacatggctttcctttaacagctcagctttgctatagtccaaggatagcaccactctacccaagagtgaaagagacaactcactcagagattcccagcgagcccctctagggcaattaggctaataattagccagttgcaactagaagcttattgttagtctttgcaatcaggaagcatgaaggttgcattctgaactgagaaacttcaacatagtactttttttaaaaaaaatgtatcgtagtttcatttaaggcactgtgtatttgcagcagaaaaagacaaacatcatttgacttagcttagaatttgtgatgtttctgaatgttgaatttacccttcaaagtcataaattggagaatgcagggaaaggtctattcacccttgtacttaaatccctgacattgatggaaaaagatgcctctgtgtttctgagcccaataaaagacaattttggagaggtaaatgtggggatatatggagtggggggaagaggaacaaggcttgactgacttctttaaacacccctggcagtaattttcatccctcctggggtttgtctttggattagagactgttccaccgtggtgtctggatgccctaatctcatagccagttctcctgggaggatggtgcagctgtgccctgttgcacaagggcacccagcccagggtgctcttggtgggaggaggctgtgtcagcccagaggaagggtcacctctccctaaattacagtagctccctaaatcactccagagtgagagcccctaggtgtcctgcatgactcatatactgttctgagacaaaggcggttgtctttgtttgggatctgccaggaattcatgtaatcatgttgatgtctccagtcatgatgtgtcccacttcttatcacctacacatcttcagaagaggatattattccaatgacaattctatcaacatgaaatcgatcatgcagatgccagtgtcctttgtgtccatttctcacagtcttctacatctgcgctgaaatcagtttttctttagtgttgttattgttgttttttcattgggaaaggattaagcattgaggtgttgcttgactttggaaattgggtggggtggcatttggaaatgcaaattttcactgaagcatttcaactcgatagaaaggatagaatagggaaacagagggtatccacatggaacttgctttcaaagtctcacttggcaatttacttttattgatgaaattcagagtttatgtttcaaatctaagtatttcctcttgaaagtaacttaatcaaaagcagttgataatagcaggttaattaccttgagtctttgcactggaaaaactggctgggtcaccccattacacaaccatctattatgattatatgatgactcattatcacgaagacaatcttgtgccatttaaatcagcaggattccatttcttcaccagagaactatctctaaatacacacacgcatgctcacacacttctgagtttccctttgtttatttttgcagccaacaaagtatgttttcgaggttaacaacgaagcacaggatagtacaagtggaagatcattaacatgactggataggaacctcttttaatttccctttcttggctttttccacaccctaggtggattacactcaccctgacacacctagaaaatacacccagataccagaattgcaaaattcaggaagaatgcactgcacactgtatccaggcaagccaagctcacctaaaaatggtctcaaaaagcaaagggctctgaccatcgactgatggggttgcaagcccagcctgtctgcaggaatttttaaatctgaaaccacactacagaaattattttatatattacttatttttaaaactcaactgtaaaaataagtgttgcaggaagagtgaggaagagggaatttaaaagaggaagttgggactgaatctattcgttccaacctccctaagcaatccacttattgatcagtgcttccaactcaaggaatatttaaaattttttaattaaagaaaaaattctatcaatcagagaatcttgaaggtagggggatcatttacaatcattttacaggtgaggatattgagaccagcagggagatgacctgcccaagcctgcacagatagcaaggaccaaagttgggatgagactcaaatatgccc

SEQ ID NO: 47528 - DNA, 3285 bp, Homo sapiens
acttaattaactttgcaaaggtagcaggaataactaaactgagttgttaaagctattaccatttacgaaaatcagtcatgctgcatcataaacagatttttcgagatccacttagaaaatcgagcttttccaaggaccaatttctatgtcaaactgaattataaactatacactggttagtgttttctttacaatgaaaaaaattaacatttagacttctaattaaaaattcaaccaaactaagaaaaaaaacctgcttattgccttccatatacaaagcactgtatcagtctaaggtggaacaccacaccctaaaaaggtgagctcatcctgcaagtcaagaaaaataaaaatggcattgtgcatgtttcacaagagggctgtggtcacagccagagccctgcaggtcaaatcatgtcccgtcagtagcactgatcatagttctgccaatatccccgccaccagtcaaaggcacgctagtcttactttatatgtggaggattactgcatatactttgggtctgcattagtctttggagtagggtataattatcaaagtatgtttaaaaacacacacgcagatctgttaggtcccctagaagagactgagttcagatgcattttaactagaagatagaggtacattatttcaaaaaacaattaattcgctttaaaaacctaaaacactggagatgatacaaacctgagctggcacagtgtatgggttttcagagaagaaaacacacaaactgcaaagaaagctggaattttctgcagtgtttacattttattacctggctaatggggaccatgcttccttttgtggggaagtgacgtccaaaggattacacaaaagaaagggcaccaagttgctgatatagtcccccggaaacacaaataaacaggattgggttggaagccctgggccacttcaaagaaaaaaatcaagtcaatggtaatagtaagaaatgaaaacaggcagggtagcttgctgtctgtgtttaaaactattaaacccggtaggtaaagcccatttggctttaaggttttattaggctctcacagaccccatctccacccccacacacattgctaatcacagtagaccccagctgtgattcccatccacccccaggaaaggagagggggcttcccactgtgaaagaaaatgccttctcagacaagaactatgctccagtcctgactttcagcaaggcaagcagggagcttcctccatgctgggaaaatggcatacagtacttcacctgctaggtacattaaatttgtcaactctgcttcacgtcgcgagtgtagggaatgtgtttgctttttagatttcaaatcggattaaaataattaagttttctaaacaacaatgccatgcttaaaccaaaggacacgccctagaacaagagctaacaagaactagcctgaccggtaaagtagactgaaatatctattgaaaacgttaactgctaaaactgcctgaaagggcttttttaaatgagaaagttttttcagctatatcaagttgaacgaatccactgatattagggaaggcacgttatttcaatatttatattttaatcataagaagaaacgagaaggaagagaaatgggaagaaatttcaggtctccaagaaactttgttcattatatttactcatctaaacttgcaatgcttgaaataatctttcgtacgtaaccgacaaaacccaggaaaaaaactatacagtttgaactacggccttttttttttttctgtttctgagcttggtgttggccacccaaagctactgctgctgcatttggttcaggtcggatgcatgagcccgagctcgtcctaaacaggcattctgaaaagcactggctcccccgaccctgtgagggcccatcacgcgcggcggcttttgcaggccgcggccccgagggcttcctggaggcggcgacggcggcggcggcgggcactcaccgtactccatgaggctctgacagccctcctcgtaggacccgctgccgccgccctcttgggagcatttccaccacagcgaggacgtctggccgtggtcgctagactgcaaccagccgcggccggccagcgcgatgatgtcgaaggcgatggcgctgagtaggagcaggggcaggatccagcggcagcgctcgcaggccaggccgcagcggatcatgttgacgggcggcgcggggccgagcggagcggagcggagcgggtcggaggagcgcgcgggacgggcgacagcagagagtggcctgcgagcgcgggcgccgccacaaaagcgaagaggccgcggggaggcggctcccgaggacgccgctccgggcggccccacctagattccggtgactcagagcgcgcccgccccgacctgccctgccgggccggggcgggcggggccgctggtaaacaggctgggttctggtgacaccgggcggcggcggaaggcggcccgagggtcccgcgcgtcccacaaccctccagtcccgctctcctggcctctccaggcgcgtgttttgtcttcctggcgcaccaacatatacacttgtttatctgcacagcgccagcctaatatctgacccctgatgtcgcatcgtggggcggtggtcagcagtgccatatctgagttttcagcagtgtgagatgggtgttctaattgcacctgtggataaaggctgcactcctttggacgcgtgcacccaaacccagaagcccgtccctgacccctgctgacacaggtgatcccttcctcctaggctccgcctttgcaccttggaccgtggctccccgggtactcttatctctttgcatgctgttctttcctgctgggttgccagattttggaaagcggaggcgatgctgaatttatctgtgtatccttagtgtccggcaccgtgtttggatctcaaggggagctcagtgaatttgatgaatgaacatgtaatttaacaaatgctcgcttcctttcggaaaggcttcatctggcttccccagataatttcatgtcgcctctgctgcagtccacttcctatcacgaatctctacctatttaaactgcactctctctactcttcatttactattttgaggtttttccaaataaaaatcatacgtcagcatgcaacctgcatttaggatccccccttcggtgtcctgggctagctcccgtcgcagttctgactcctaagatgtgacaggaagggtggggtggcagccaggtgtgccgctgaggacaaaggagttctcagtgtcaggcacctcggtggccttgg

SEQ ID NO: 47529 - DNA, 1115 bp, Homo sapiens
taggggtttttagaaggggctttggattcaggacgtgtttggagtctaactcttgttggtctgggaagtaacccagcctctctgggcctggtttccttgggcatatcaagctctaccccagccccaccgcagcccaccgcccgccgcgtgttgaaagcttgactggagtttccctgcaggcaggggcacagtgtgtgcaacgctgcatcgcccgagcctggcacagggagtggcccaaaaaagctgttagtgactgaacgcaagaattttccggttagcagacgacgggatgcagcgggcgcggcgcctgcaccacgctgggggtcccggtgtccgggctgggccgctccgactccgcccgcggccaccgtcggctcagggggtgcgaagaccgcggcgaggcccctccccgcctgcctcccgccgcccgccgcggaccaggcgctccctcccggcggctggcgagccagctccggacatccgtccccacctttccgctaagcgcggcgcccgcggggcctgcctcggcggtcaggtcagcggcctccagcctcactctccggccccagcccgcagccgccgccgagcggagcgcacctgacccaggcgggcggggcggggcggcgggcggggcgcggggctgacgtggcccgcggcatggagcgggcgtgattcatcagcatccgcgccggggcggcatgggggcgcgcgcggcggccgcctaggcgcccagggccaggcagcggcggcttccccggcccggctcgcccgcgcttctctccctgtgggcggcggcccggcgcctggaaggtcaagatggaagaaatcctgaggaagctgcagaaggaggcgtccgggagcaagtacaaagccatcaaggagagctgcacctgggccctgggtaagcgtccggcacctgctcgccgcggcgggagggccgcgcggccggggctgaacccgcgcctccgcgcgtggggctttcgcggagcgtcggtcatgggtgccgttctggcgattgcgagagtcgcctcgggaaattgatgtgggatttgagagtcttggctcgggcgtggacatcagccgcctcccctccggtctctttcactctccgaaac

SEQ ID NO: 47530 - DNA, 560 bp, Homo sapiens
tgttggccaggggtggcagatctcactggctttaattgtgtatctatggtcagctggtgcaaagtctggggccagatggttcatgatgaccttaactgggaaggctagacaaataggtctctcttttcatggtctctcatgtagactagactccagcagaccagccccagcttgttcacgtggcattcttagggttccaaagagcaacaacagggcaaaccccaaatcacaagtactttttaattctgttcttacatgatgtttgcttgtgttccactggccaaagcaactcacacatccaagcccagggccagtacaggaaaggattactcaagagcatggataccaggaggtctgtaaaccaattagagctactgtggcaatttgtccctcacctcactgagggacaaatgactcatctgatcttcctacatgtggggcacagctcagatgaaactgtgagccattcctagactgggttctggtgtctttacagtgagcatgttctgtaccattcaagaaaactgtcatgttacagaaaaagaaattaccggaaactt

SEQ ID NO: 47531 - DNA, 1157 bp, Homo sapiens
ctccgtagaacttggttatcacttgtctacatatgtagaaacttctcctctctggttagcttgacatgtgagtaacatagtgccaaaagaaaatcctcaggttgcttgaatctgtctatatagtatagtcctgataacacttttagaaacactgatgcggaaatagagacaaagtgattcccctttattttttgcatatataaaacttctggcaaggcaccatggctcatacctgtaatctcagaacttttggggccaaggtgagaggactgcttgagtccagaaatttgagagcagcctgggcagcatgacaaaactctgtctcttcaaaaaatatgaaaattagccagatgcggtggcacacgcctgtagtcccagctactcgggacgctgaagtgggaggatgggttaagcccaggaggtcaaggctgcagtgagctgtgattttgtcactgcactccagcctgggtgacagagggagacgctgtctcatttaaaaaaaaaaaaaaaaaattaaggcagacgacctttgccttgtattttaggttaattatttattcctccacagacaaaaatatttttaaattttctgttcaaacttccaatttcatagatgcctatacttttccaaagtaaattttatatcaatcatttttcttttttcatcatcattcttggttggtttttaaaaaatcactcgtttatcttcctctttccgtccatattgccaatggatttactcaaactctttgttgctttccttctagattatcatggccaaagtttaagaaaaacaaagaccagatctgtgacccttagatgaaccctgggtctccgtggaagtctgatccaggcagggtgattagtcacagtactgcttgcagtctactgattagtttttctgtcaccctaatcaaatataagcttatttaattcttataacagcatcttgagatagtataatgaccagtttactaaaattcaaatgcatttgctaatctggaaattgaatgtaggggggaaaagctaccttttttgtagtcatctggtttacttgaatcatctctgaccattagttttctggggatttttctctattattggcccagagggtgaaacgtataacacaacaacaaacttccctacagccaacaaac

SEQ ID NO: 47532 - DNA, 597 bp, Homo sapiens
tctaccaaaaaaaaattttaattaaaaaaaaataaaaacaagaaatagagccagtgattctaatatgaagccaagattgaaagcaattactctaggtaatatgagtgagccacaaaatacaggtgagtttcaacgcggacagatttttgttaacaggtttagagaaaatgagatctgtatatacagttttgggccttcacttataagccaacattctctgtaaattgtttcctgacgccattaaccaaacatgcagctgcagccaattcaactcacaaagcaggatttgcaggcagaacataggtaacaacagtgtaaacagtacatccttgtttaaatgttgacacaactggcaaacacaagtaatctggttgttagcactccaagaaaaagtggagttgaagaaaattcgcaaatagaggaattaaaccgttaaccactaaaaagtagtttgggaaaaaataactttagcaagaaaaagttaagaatgggaaatagaattagtgaatagaatgtggacatttcactaaatgcaacagtggaccagaaaatatctttatcattttataaaaaggaaatgaagtctgctttccaccc

SEQ ID NO: 47533 - DNA, 2535 bp, Homo sapiens
accccagcacactcagcttttttttttttttttttttttttggaaggcagctatgctctccactctactatcaacgctattttattgtatttttgtagagacgggttttcgccatgttgcccagtctggtctcgaactcctgggctcaagcgatcacccctgtcttggcctcccaaaatgaagggattacaggcgtgagccaccgtgcctggccttgaaaggcaatttcgtcttcttggaagtctccttgcgagggagggagcctcccctttggcctcagcaccctggctagggggtgctggctccatggcattgccaatggtcccggctgcctcttctgttcacaggggcctactccccttcacccttgggggatgtcaccattgcttttcacgtggccaccctcctgtccgttggctttcgcgtggggagtgcctgctgcctctgcggcggtcacgtcgccccggagagcctcggagctctggctgcccacgatgggagtcctctggggggcgccggagccgtgccgggtccccgccgcaggggacagtaacgcggagtcggcctggccggcggaaagggggtgctggggaacagagccgcaccccactcggctcgggaaagccctggtaaccaaaattcttgaaaagcactagtgtctggcctcggcactaactctccccgagtctcgttaagcctgcggggatgactcagagggtctggggtcctgtcggggaaaagttcagaaaccagaacagttccagattctctccatgtgtctgtggtcccaccacctcctccgcaagggaccctgaaagctgtctgggacctaggacaacttcttgggatgagtacggccattcgccctggctgagccccaggagtgcgggcaggggccgcgggggtcgggtcgccagccgccacctcctgcctttctctgcctgcggtgcgctgggacaccctcgaggcggctcagcgcccgcggttcccagcgcgggcggggccgcggcagaggttcccaaaccggttgcacagaaacagcgccaccccctactgcccgcggggccacctgtgtgtgcctttccttcaaaaacaaaggcggggcgggggcggaagtgcctcaaaagaaggcgggccgaagcgaggtgcggctccctgtcgccgcggaggggcgggggcaggacgcgcaactccggccggagctgtccggggtcgtgagccggccccgccttggtggcggcgccccctcgcggtccagaggcagacgcatcgggtgggctcgggtctccagcccggccgggaggagggaccgggtctgcggagcggggactcggggcctcggcggggcgcgcacacgcaggcggggcggcccggggtgcggggcctctgcgcggctgaccaggctcccagagcgtcagcgccgcccatggccgagccgctccagccagaccccggggcggccgaggacgcggcggcccaagctgtggagacgccgggctggaaggccccggaggacgccggcccccaggtaggcgccgactcgggagcggaggggctgggcccgccttccggctgatttgcagtgaggccagcgggtcccatagagttaagtaaaaagtacagttttttaaatggtcccagtccctacccactatgctacgcaaacgagaaaccccggtcatttagctctaccctccccgctacccccagtgcaggtcccatctcaatttcttgtctttgcggggtggtggggcggggaggaactggttacgtcccagaacgcgcggtggaaccctccgaaccgagggggtgtaatagatgcttgtctgaaagtgtgaatcgagtccccagcgtgtggggttggggccgctgcggtccctaatcgcaaggaggggaacctcgtggaggggaacctcccagacctaaggagcggggacctcaggccggaccccggggcggtgcagcccctagacaggacggctccaggtcgacccgagatcatggcaccggtatttttgcatctcactcctaccctcttagaattgcttctcgaagttttctctgttccactttagcccggaagttatgagatccgacactatggaccagccaagtgggtcagcacgtccgtggagtctatggactgggattcagccatccagacgggctttacgaaactgaacagctacattcaaggcaaaaacgagaaaggtaaaagcagttttccttgtaattatgcatattgtgaaagagtccccgggcttattattgagttttagcttattaaagaaatatcctttataatggaaaaataagcaagtcatcaaagacttgtcttgttttcagacaagactcctcaggaccagggttacactgggtattacttttcaacctctgttctctgattttgctggatgaactggggtttggtgtaactcgtgataagtccttttctatggctaacacctcaagataatttggtgactggtaggatcagagacgtcaggaggcaagaaggtaccaagattagaagca

SEQ ID NO: 47534 - DNA, 547 bp, Homo sapiens
ctcttttcccactttttgttttaatcttttgactgtcttttcttccacttccccacagcagcctcctgactggatccttcctcaccagtctattatatgtctgcctatattctaatccagatcttatcaagttgcacatttcagctcaacatccttggaaataacctcaaaaggccttaggctaatgcacagggttcttccttctagttctgactcaccttcctgacctcattttatgcctcactatgaaaacacttggtatttttagatttatggtctctttcctatcactcccctttctttgttcagcaaaaccatcctccattcaggcccaactcagatgattctccttaccccagatttaatcaggtcctcaacgctcccacaacactttgatcctgtccctgtttaaaacccttctcagaggccgggcgtggtggcttatgcctataatcccattgctttgggaggccaaggcaggtggatcactcgagctcaggagtttgagaccagcctaggtaacacagtaagaccctgtctctacagg

SEQ ID NO: 47535 - DNA, 825 bp, Homo sapiens
actgtgattctcctaaggaatatacagtcacccccacaggaaaagcaagagttcaatcaagattcttcagaaatagtaggatggcagaaagcagatcgcattgaggttgtttccaactgacagaccaagcagtaatttgtttctctccccactgatagtaaaaataaagtggaaataatttagggctggggcttctgtgattatctggaacttaaagtatgagggtatgagagccatcagatctacccctgtggagctttttaagatgcggtccataacagaagcgggccccaaggagtagagtagccacatggaaggtgccatgtttcagggatgagtctcgattcttctctccctgtatttcatccatgcctgtaagaagttctcacgtctctccacatgccacgtcatctgaaccgccaggcgataggttattcgtattttattccaaagtccataggacacgatgtggacttgtttttccacgtgcccttgtagatggtgccatccagtgtctgtgatgttccacctcctctgttgggttgtcacctcccccagagaccttctggtctcactgcttttctgtttgtatccagcaaaacactcaacaattctgtataagaacacctatctcattattcaaaaaaaatgcatgtataaacaaaaagaaatatttcaaatatttactttacaattgttttattcaaaggaaattaaatacaaatgtatatttttcattaaaaatggggatttaaaaatagttttataattagtgttatgttgctttatcttatctttgcataaattatgtattattaaaggttt

SEQ ID NO: 47536 - DNA, 533 bp, Homo sapiens
acttccaaaccagagtccttataagtgtaaaatactgggaaaaaaggcaagatcaaccagaagtcctgaaaggacagaacaaataaatatgtaatccaatatttttgctaaataaaactgtatacaaatgttaactcctcattctatccagtaatcctccaactagcctatctataaaaccacagtccttgtctaattatcttttttgttttaaaaaaactagctcttagatacggttgtctcagttgacctccagttctaatccaggtcatgtcatcgaccgtaatgatattgactgtctcgtgtctggcaacagtcacaacccagatgatgcggggaaagctattttcttccctccagcattagtgacgttccatgtcacatgtaaaagaaatgaacgtggattccagagattttaatcactgatttaaaaaatactaaaattacaaaagatatgatttatctagctggccagaacattctagtaagatcaaagaaacaactgagttattggcttccatactggttggttc

SEQ ID NO: 47537 - DNA, 2336 bp, Homo sapiens
catactctatagcacagttattagggctactctaaagatcaaatgaaccaatatacataaagtacttagctcaagaaataactcaggtaaaacatggttgtggcaggaacagtaaaaattattctaacgaggccccaaactttgaactgtcactgtctcttgtaaacctgggccacatgctagcgctcatctcacataccatcttttctgcagctactaaattttacaatcttatgaatctgaacaggataactcattttcaaaaggaccccaccttctccgtaagttgctaaatgagaaaataaacattgagaactagatatcaagttaaaaacagaaatgtccattgtgctttctgcttagtatttgacaaaagcagtatgtgaatttggcacctagtatttcatgtaaactcttgttgagcaaatgttttgcatggtgcatacaactatcaatcttaatacacaaaatccacaaagacctgacttaaccctcatttgtgtttcagaagaatctagcattgggccaaactcaccatatgtccccccaaagtgtagccagagttcatcacagtgttttgtgctgatgtccatttattttaaagactgagttaccatacttcagagttagaaactattgaaaatggaaacttttcctattcgacaatttcaaatcaaatccaagtaatggcattcgtgtctgcaccatcaatcgcaccatcggccccactgcacagctaccaactggctcctatgaaaaagtctcttcccctcgtgttcctcactctcgccagggccacttttaatctgttcatccaaaggcagcctttagcaaggagctgcagaaaatcagcccaccgtgctgctctttgtagctttctccaaagctcctcttaccaatgcccctacccatgttcatttatccagtataagtcactggtccaaacactaaactaaactaaaataaaataaaccaccgactatgtaaaaacaaagccaagtagttataaaaattattattttcaagagaatgaagaagcacctacattaaagaaatgtaagtcaatggtaagtacacaataaagccacatcacaaaagttctgtaccttacaacaatcactgatcagtctagacagtttgtgctcgagctcttaaatacacaacaaagagtgccagggagtttcaggggattatctccaccagaaatatgtgatacattacacagaggctcccttacctcagctgcatatttatccaaagaatcaaaaaatcatacacttgatatcaagggaaacataaattaagtacaagaatttcccccctcttcaaaggacttcttttgaaaagcacagaagaagtgaattcacttaaaaccccaatcataaataaataagacatgctaagatcacataatactgtcctagagttacaaaagtctgaggtatttaaacaacctggtatagagtagagtttaactcatgcctattacgctgtttcacactctaatttcttcacacaaaagaacgaaggacctaaaacacacacatggacacacacacacacacacacacacagacacacagggacatatacacatatggaaacatatgcacacaataggtagtagagagaaaaggaactacttacttttcttcttaaaaagtttaattaaagacttaatctttgcattaatgaagaccaccatttccagggcacctacatagagcttagaaatgtaaatcacattaaaagctcagcccagtaggcaggtggcaagcttcgtccttctgctacagattctaactttttcttcccccggtctcatatccttagacatctgcccaggctgatgtaactgaggttgagtttattgtcaggcagttacaaaccattaacagtccttgaacctgaaaaactcctactgaaacctaatctttaaggctgagagcagccagtgacatcgtgcgctgaaagaaagagaaagccaatcacggttcttatttgcatgacagccacatcaggctttctgcctcagtgcccattcattcagttttctctccaacagatcagaagttcctcctctctgagcccacaaaaatagtgcagactttcctctacggaagtcaagatgaaacaaatgtgttccccatttcattaggcccctatgaacacccagatcttttacaggagctgccaagtctgacagcaattccagttaattcagggtatatgggatttgaactgatttaggggggaaaaaaaccaaactattgtttcccaaccacgccccaggctctgcctccgataccaaaggaacttgtacaagcagtaaaact

SEQ ID NO: 47538 - DNA, 511 bp, Homo sapiens
catgatcttatttgcatctagctgccacaacaatcaagaaaaaaaaaaatccaccaaaaaaaatacaacttccccactccaaatgataaattagataaagtaccctaatcattttaatctttattttatatgtaattgtcacttaggctcctggttttcagaattccataatcgcccttccctcaatgttgtctcaaacaaacattatctgagttactctttaacttgaatctaccatccagagtgctggttcttttgcccattggcaattaaccacagagaactagggaagcacaagtagagacagagaaatcagaaacagagtataagaaggcactgaaaaaacatattccaggggtaaagggataggaaaaaagaggagaatatagatccggaaatactatgacaacggaaaaaggaaaagaatcttcctcacatctcagcccagttccacttcatggccaaacacttttgaaacaatttagacaacctcttatttcatagctttggg

SEQ ID NO: 47539 - DNA, 2172 bp, Homo sapiens
ttaatcatatacttccaaccacccagctcttgatcctcttcattgacactgcaacacactagttcctctcctgcatatgatggctccttctccgaattccaacaaagtctaaccaagcttcaaagatctagtccttaagcctttgtcctatgctatttacttatttccccttgaaacttgaatggttttgttagtatagagcagaagtcagcaaattatgaccctctggccaaatccggccattaaatgattttttttaaagtaaaagaagaagactatttcataacgtgaaaagtacatgaaattcaaatgtcaatgtccaataataaagttgtaatggaacaccaccacacccatttgttcaaatattagttgaaatattgtctaaggctgctcttgggttgtaacagcagggttgagcggctacgactaagactgtatggtcctcaaaactgaaaatatttactacctggacctttaagagaaaaagacggctggctcatggcttaagctactgcctttaaacatcctgctcaaccttcatttctattatcttccatttgtctgccctcagttccatttgctaacctctactcagatttcacattatctcaagttcaacatatctaatttgagacaatctgctttgccccccaaactgtttctcaggaactatttttacatctattaggactatcatcttttttttttcctccatgaaccagacaggtaaatttaatccccagttaaaaaagtaaaaactgaggctggatgtaatggctcacacctgtaatcccagagctttgggaggctgaggcaggaggactgcttgaggccaggtgttcaataccaacctaggcaacccagagagaccctatccccccaaaaatacaaaaaaaatattagcccggtgtggtggttcatgcctgtagtcctagctactcaggaagctgaggcaggaagattgcttaagcccagaagtttgaggttgcagtgagctatgatcataccactgcaatccagcctgggtgacagaatgagaccttgtctcttaaaagaaagagagagagagagaaagagagagagaacgtattcgctgccttgtgttaggtgtccaggttaaaaattaatcaaacatgatcattgacctttggaagttcacagtctagtggaaaagacacacccacacagataaaaatgatgatataaagattaagtctagcgagagagagatgatggtgaagttcctaggtaaaatgataacacacatccacctcatttaaaggaccacctgctattagagtacagagaagagactcttgggtaaagcccagacctgggatgtggggagatatgctgaaacttcggtgaaagctcatgggacagccctgtggggaaaggtggtggggaagatggagagaggcagggcaggcccgcagggtcttgcttgccaccgtgggtgagtggtaggtggtggcaagggggtccctgatggaggatcagaggggaacctgtagggccagtgctgcattttaactagaactctggtgtcaaatgacaagtaggtttgaataggattgaccagaggcggggagagaaaatggtgccacaatccacacaaaatgtgaagaggtcagaattcattctcagctcagaataactttctttctctagaacaacttggttttatcagcctatgtttcaccacctgtaaaatgtttcaggaaccaaataaacctaaagtataaagttcaaaaaattaaaccttggccacttaaataaatgactctgttacgacccatgcttttatctttagtatgatcttaaagtacaccctcattatttttatgaaggccaaagattatatgtctaaacctaaaagcttcttaagagcagagctgtctacagcttctagaactcagacatagccttgcccatccccgcccccatccctatttacacaaacccacaggccctcctcagtgtatcaaatgcagttaaggtactgaaagtctttatttggaatccaaaaactttttcacaaatactgttaaacaatattgactaaaaagggtcattttcaaatattgtacacaggagtttatgcagaaatgagccatgtttatatcatatgtacgcatttcgaattagataaaatttgaatctttgagc

SEQ ID NO: 47540 - DNA, 1475 bp, Homo sapiens
caaaagcaatcagtcttaacttaaagtgggacattatgctgatctggcctctccaataacttatcaaataattaacactactactactaataataatgggaatgtgccagattagaagagatttaaagaacatcacaacatgattctggatgggatgctagttttggataaacaagctataaagtcttttacagataagtggaaaaaattgaatagacactgggtgtgatcttacacttatgctctcaatttttacagttgcataatgaggtaaacagaaacacatacacatttaaaaggtaatgcagagatactgtccacagaatgaaaacaggaatctgataacagatactcatgaagagttattttaactgtcccacgaatgttatttcacaaaagcatgttaaaaatcaccaatattctagaatctcatgggtacaatgaccttttctttcttctgtttctgaattaatctttaatgatgaaacatatgacatactgaaaaaaagacaaatggaaatctctctcttcatcaattatggggttgggggagtggttggggacagaaaggggaaccttaggagatgataatgtatcaattctttagaagaaacttgatctggcatccactttgccagttaattttgatgctaggaaacaccctttactctgcatgtgctgaagctaaaggcttctgctgtagatcctagttaataatttaatccaatatcattgctgccatcggcttggtcaatttctaaacatctgctatcactgtgactggtttagccaagccacaatattcatgtgacaaatgttgaacaaacgaaaggcgaggcagacagaaaacatgctatgaaaaaaagaaacccaaatcaaaagtccaaaacacaaagggagccctgctgacacagcattcaaagttcaaccacgcctgcaggaatggaaggctgcaaagtcgctctagtgcatggctgggatcatccagagactgtcctgagatgttagaaatgaggtcgggctaacatggtagagctttgtgaaagggatgggtgctgatgttggaattattggtgagtatggaaatagcacaggcaaatcaaaaaagggagatttcataggcccctagaaagttagagctgaagaaagtcataaggaacatttaagacaattttacaaataagtgacctgcagtgatcacagggccacccagcatctgtactgataccccatcttgtggtccagttttcaattccatgtgctacttgctgccttcagtaagggccagtgaggtgagggatcccactgtccacactctttccacctctatgcctttgcacatgctattaatctgcctcggatgcttgatcctccgcttacccacttggcatacctctattcatttttcaagttataattcaaatgttaacctttcttaagaagcattccttgacagactgtcactctatttcaaa

SEQ ID NO: 47541 - DNA, 488 bp, Homo sapiens
tacctcgtttttaaaactcaacagcagagagtctgctttaaaattttcaacattgtgtaacaatcacaccaatgatttcaaaagtacatattttagcatggtttacttctgttatactaataagggggacttagcaacagagtcccctttgaagagaaggaggataagcaggagaatgttgaaagactgagtcatccaacagactgagctatctaatgcaactgtttaaatttttggctcacactgagttgactgcagtgaactaagttcaattttgttttttgtttttccccttctcagcgggataaaagttcatgaaagaagccgaatcgattaaaggaaataaaaaggcaacattttcctttgcatgactgatcataatgggtatgtacattttcaactcttctacctacacatacaaactcatcttaaatttgcattgccatagtttcaaaggcatcctcaaagcagctatgttggatatcatt

SEQ ID NO: 47542 - DNA, 557 bp, Homo sapiens
tttctttcagcaattacaagaaacacacaggaacatgatttaaaccaaaggaagagcaatcatgtttcctttaaaatcaatgctaatcacaaccacatatgcaatagcccctaggaccttggctagccacagaccaatgaatgaaagccacttttccaaagtaagaacacaaagcatcaacaagtagctcttactattcttctgcttaatctcactcacccttattttatcatgggcttgcttcatatgtagggcaaaggacaacttaaaaatcattattgtaaatcaacaagctataagtcacaggaagaaagtagaatgtcaactgtttgtcctagctgccgggagatcagagagtaggctttaaaagggtgcgattgtggattcctgattagaacacacacttcagcgtaaaagcacttagttgtcatcacatgccatacgtttgagtttttaaaattttctgagttaccacagaaactaagagtccaagaaaatgagagattctttaataaaatgaaatggctgttatgggaataggtggagaaaaatatgtt

SEQ ID NO: 47543 - DNA, 1267 bp, Homo sapiens
atttatgtttacataggcttaaaacctattttttccatacccttgtacttactgcagcaaaatgttatagcacttctaaacagcacacataccaacctctattaaattgctgaaattataggtatcactatctgaaaacttcacagcattaacctcgagcaatgacaacaaaaggggtttttcttaatgtcaaatataaagttatcatattaaaaaaaaatcccttgtgggccgggcacagtggctcatgcctataatcccagcactttaggaggacaaggcaggctgatcacctgaggtaaggagtttaagaccagcctggccaacatggcgaaaccccatctctactaaaaatataaaatgagccaggtgtggtgtcgtacacctgtaatcccagctactccggaagctgaggcaggagaattgcttgaacctgggaggcggaggttgcagtgagctgggatcgtgccactgtattccagcctgggcaacagagtgagactctatctccaaaaaaaaaataataaaataattttaaaaagcccttgtgtttacaactgtatgtctgagaataaaacatgaaaaggcacactgttcaaactaggaaaaaataagaactatccattgaaattatgattgtctgacaccattgatcattgctactgagactgaaaaataaatacctaggaagctttgtgaaagggagtaggtccaagatgatgcacactcacaggatttgtagtcctctggacagcacaaaggtctggcctttgccaaccatgaccttagggcggcaaccacttctctcccttgtaggattacaacatccagcatcatgttaaagtttaacattattatctctacaagagggagtggtatccacacatgcagccaaaaatatttagataattatgtcttcaaaaccactccagtgtgatttcacttgtgtgctaccagtttaattttgatttccataaaatagtggggatgagaataaattagaaattagtttgcataatacacagaattagtgcgtctagatcagctcaaaatttgacttcattcctggcaaaacacaaaacaaaattatacaagcaaaacaggcaaaccatatctcctccctatgtatcctcttactcttgccaaaaagcccagataaagatggaaaaatccttctccatacccattcacaagtctgtttcacctcagctgcaaagtacagtacagtagtcctctcttatccgaggttttgctttcagtactttca

SEQ ID NO: 47544 - DNA, 681 bp, Homo sapiens
gaaaaagttccaagtcaaaaatagaatgctaagtttaaagttttaaaatgcttctattgctttcgaggcaggtgtgcttctgacagctctattaagttactcaactgtctctagggacttcagttcctaacaaagaaaggctgcagcctggtgcccttgggttggttttttgtttttgttttctttttcctctttcattctttgaaaactgaatgaattctgttcttgtgcggaataaaagtgacatgagaaagcctgttttcaggactggcgttcttcctcttttgtctttgctatggtaagttgcttatcttctgcatatctgcttagaaaactttctgtgtgatacagagtgactcagacgcttccaaaacctgctctgtaaggtcagaaaaggaatttgtcacttgaccctcacagggcagtcaggaatgtcaaaattaaagagactaacagaaaggaacacactctcaataccttaagaggggacaaaggaatgtaaggacatagcctcactgggccctgttgggtacaggccttgagcaagctaactcacttttctgcatcctcccttcttagctgccaaacaagggatcagacagggtatctcggaggttccttccagccctgacacgttagttagccttgttgttaagctaactctacttggatcccttcaca

SEQ ID NO: 47545 - DNA, 708 bp, Homo sapiens
gagatttctaaagtcagtggcataaccttcccctggttacagtgacataagaacacagatcaactgaataaaccaacacattctccagagtggcgatgtaaccaaggtctgctgatccaaagcaatgtcgaaagacagaaaccccaacctcgccagcttcataaagcatcaatagcacacaaatgagacacggtggcttaaaagtggcttgcaaatggaacagagctaagatccttatgacagaacaacactcaggcatgcacacgtaaggacaaagagttggacttgggaagctagcaaggaaaaaatatttgaaacatctttttataatgggaatagagtgtgttgaagaactcagcaatgaaatgactttacggtagaaatcaaagttctttttccaggaagtcagagcattctatgtactttctactggtgaaaaacttatgtaaataaataactaccaggcaagatgatcacagcaaccaaactaagcaccagccacaaccacccacaaggtaaattcacaaattgccttgtgtctgctttgtaaaagaatccccgaccaatcaagactaaagcaatacccacccgtattcaggaaggaatgctggtttatctcagaaggcaatccagaaacaccagatacccagtttctgctttagctgaggcgtttctagttacaaagttaaagagaagcttagggaatag

SEQ ID NO: 47546 - DNA, 2138 bp, Homo sapiens
agcgagactgtcgcacaaaaaaacaaaaaacaacaaaaaacaaaaaacaacaacaaaaaaaacccctacatatccagaactaaagagtgaaaactgacaagtatgcaggtaattgcccttaaggaaaaaggtgtgtggatatattttagtgggctggtctaaatattttctaaatatcgtaagacatatgaaacagggtggctaggagctgctatttcagctttttaaaagcaattgtgatggagcaaaaattttgcctgtagacaataattaacctttctccaaaagcatcacatatatatcattctatataccaaatgccacagccacaggaagtcagttgcccacagccttataaatcagtttacttgcttcctcattttctgttatggactttcctagccaaactctgtcatggcagttcacttcaaaattaaaaataaagttgatttaatggagcctggatgaatcccatctgaaagccattaaaacatacacacccacttccacacaaaccagagaatcagtagaattcaaagacttattgaatcctgaaactgtaaaggatccgagtgacaaataattcacatgtcctattaatcacaggaggtagacgggttctgtgattccagcactgacacggaggcagtcaggagcactgctaggactagaatcccgttgtccttgccccagtccaggctctgcccactctcccatgcttcaggtctggctctgaagttcgtgattccccgttcatagtcttcaagtacatcagtgagtcacgtttccgtttcctctcactgttccaaatgctgggctttggtagcacagagttcattcattcacaatcatgctaattcactcatacagagagagagtgctgacgcacttaggaattatgacttaacatgcaattctcaaatcagtgaggccaacggctaactaaacttaaaaataaaaggaaatctagcccttagcactcaaaatacttcctttcaacctactgtaaaacaacaaactcactttcattaggagatgaaaagtgagtcatttctttcttccagtagacggtctccccaggcacaaactcatgcacattatatttcatgggaccttttaaatatttacttgttagcagtattcttcctttcgggtcaaagattatagtatttagcaacacaaagaaagctgagggatagagttatgaattagtaaactgctttgccaagccttccatttgttaattcagtccaacttcaaagaggattttaaagagaggttcagctgtcagaaattaactctaagaaaactgctgaatcaaaaagtgacttgggcagtttttcccaaactggtgttaaggaaaaactgttcagttgtaggtataggagcaaaaagtatcttcctatgcaaataagcttagggcaaacaaagtttttaaaaggttttttgtcttgttcactacaggactttcccagcctttgacatgctaatgttgctgtaaatttccagggatgtggtgggggtcagtttattttgatcacattaattatgtggttgggggatgtggataaaataggagaaatgcactacactgattcagcagcttctaagcaacagagaaagggtttggctaaagtactagtatttttggtattcagtagcaaagaacagttagactctcattcacaactatttcaggacaaggtgggagtatctattcagtcatttgggagaatgaagctacgtagaactcaatccttgagagcttaatttactgccaataggactgccaatttcgcggggcttctgcaactcctccccggctctaagcaaaaacagcccctgtacctgttcttggggactgacgtgacatcgttgagtgttttccctcaactctttgatcttcatgcacttgtctatttcaatgttttttgaccatggctgtacatcagaatcacctagggagcttttcactccacagatgtatgggcccattgccaaatctacaaaatacaatacgatccccaataagcagcaccgagagctgaaaaccactcttctgcttcctaggaagagctagacaacagacaaataattgagagggtgtgtactttaaattgagcacgttgacactgaca

SEQ ID NO: 47547 - DNA, 1133 bp, Homo sapiens
ctgtctcaaaaagaaaaacaaaaagttaagacctgcaaacagcgaatagaatacaaaagcctaattcagtgctggcatatgaagcatcaatccataaaaatggctggttagtttccgaagttttgatctggtgtcatatagcctaaagaacaaagaatttacaggaaatgattttaggagcctggaaattttaattccatctcagatactgttatttccttttaatagtaaaatctacgtaactattgatttgacaagtttttcatttggctgcctgtgctattaatcatcacggaactttagtccaaaattcaaatcaaacatcaccatacacgcctcacttccaggtcccgggtacatgttgttcgtttctggttattctagtgtagactccttgcttactttggaattttggcaggaattgttcaccatttctgaaaaatcatatcactgaccacctaaccgcttgtagtgtttgagtcactagcttttcatcatggtaattccacacacatgtaagcatccaacggtttcattccatcttccagtaagtacagttttgtgtgagcaatgaatatgaaaaggtaaaaatggccttctttaatttctccttacattgcaggtaggacattatattgactttttaagcatgcatgaatagatgtattatattggctatgtgatactcatttcagggtagaaaaaagataataaaaatatttcttatgactgagaagcactgacctacaggttatgccagcacttccccagtgacgatgataatgtcatcagtgaccttgatgatgatttccagcagagaaggcggtgcaggtgaaactgtcccccaccttaaaaatcagcttttggcagggcacagtggctcatgcttataatcccagcactctcggaggccgaggcaggaggatcataggagccaggagttcaggaccagctcaggcaacatctctacaaataattgtagagataccccatctctacaaataataattttttaaaaaattaggccaggcgtggtggctcacgcctgtaatcccaacaatttgggaggccgaggtagatggatcacttgaggccaagagttcaagacccgtcaggccaacatggtgaaaccc

SEQ ID NO: 47548 - DNA, 710 bp, Homo sapiens
tatccctaccatgagcttaaaacagcaggtagaagacatcttaaagatgttttaaagaaaacagatcaagccaatacgatagatagtgagatgatattttttagcagcagctaccatttactgagggcttactatgtgtcaaacactgtgctaggccttctgccaacatcatctttcctcctcacaattctgtaggtatcgttagttccttttctaagactttattttttttagagcagttttaggttcacagtaaaattgagggagatacagatcccaacctccctacttccacacctgcacagcctcctcctttatccacatcctccatggggtggtgcatttgttacaactgatgaaccaacattgacccgtcattatcacccagagtccatagttcacattagggttcactcttggtgttgacattttatgtgtctggacaaatacataataatgtgtatccactattaaactcagtctaacaaaaatgatcaacctgaagaagggtacacctttaaaactagcagagccaatatttatcccatactatatgtgttgcataagatggaaacatacctgaattagcacttagaacctctgacaaatagtatgcttttaataaatatatctcagtcatcaaaattaggatataattaggtactattttaacagaattggaggatttacactttcaataaaagttaagc

SEQ ID NO: 47549 - DNA, 1959 bp, Homo sapiens
agcggaggttgcagtgagctgagatcataacattccactccagcctgggtgacagtgcaagccccccgtctcaaaaaaaaaaaaaaagattagctgggcttggtgggccacacatgtagtcccaagtactcaggaggctgaggtgagaggatcgttggagccccggaagtcaaggctgcagtaagccatgattgtgccactgccctccagactaagcgacagaatgagaccttgtctcaaataaaaaaaaaaaagaaagaaagaaagaaacaccacaactaattctgttaaagcatgtcttcattaaatatagaatgaagtaaatctaagcaggaaaaagattctttaataatttcagcttgggacaggcaggtggctcatgcctattatcccagcactttgagaggctgaggtgggaagactgcttgattgaggccaagaattcgagaccagtctgggtaacaaaataagactctgtctctacaaaaaattagaaaataattagccagaagtggtggcgtgcacctgtagcctcagctacttgagaggctgaggtagaaggatcacttgagcccacaagtttgaggctgcagtgagatatgattgtaccactgcactacagcctggacaacagacggagacccatctctaaaaaatagtaataacaataataataatttcagctagaaacagatttaattctagagtaagctttttttcagaaaaaaaaaaaaatcttagaatgataatcctttgccctaaatagttatctttataaacaaacaaacaaacaaaaaaagaataagcaccatagctttcacagattcctttctgatctaaaagattcctggattgtcattaaataacattacaagtgtagtttaaccataatccatgagaaaaatccaatgaacctataatattactcttttaacatttcttcttagaggcacattaaggtacaaactgaaaggttaggatcctcgtccttggaaagccattatttttaactgatagttgtatcctttgttttagtttgcaattgtatggcaataaataaaacatgattgaatgtatatcctccaaagcctgggactggggctagtcctttggtcttacatatcgtattatggctcctttaaagaagattcatagtcatttgacttgcctcctcctgtgttttctcatttcaaacaaacaagtgagtcattcacaaatgctgcaagactggctactcatattttggatgcttgagtattttgttcaaacaagcatggatatatgacgactattcatttatcctggtaaaatcactaataggcttaacaggttgaacaagatctgataaagaatactcaagacttaggggaaaaaaaacctgtctcagaagaaaaaaaaaatcagtcatgtacctatacctgttgtaagaacacacttcaactttcatacactgctggaattgatgtatattggtaaaaagtttctggaggccacttaggtaacaaatagcaaaaaccccctttaaaaaaaaaaatggttacctgtgacccaggaactctacttttaacaatccattttcaggaaataatagccaagtacacaaagctacatgtgcaaatatgttcaccgaactcacggcaaaaaaaaaaagaaaaagaaatattaaatgtctaacaatcagatatttgtcaaataatacatatttccctgtagtggaatactatgcaggtattaaaaataatgtatagttagtaacagcaaaagatgttacgacatttacttgaaaaaagcaagtaacaaaacagcatatatggtatgctgtcattgtatatgtctgtgtatattaaaaattctaggccaggcgtggtgggtcacgcctgtcatcccagcactttgggaggccgaggcaggcagatcaccttagatcgggagttcgagaccagcctgatcaacatggag

SEQ ID NO: 47550 - DNA, 3011 bp, Homo sapiens
ggttctcccacgtacctacaccctagacagaaaacgcatagaagcaactcgtgattgccgcatagaccatgacatcctactaggacagtgtatcctaccatatgcatgaagtcatcactcacattaagtagatatattctgattatgtcaacaaccttatgagatcactttgattcctccccactgatttttttttcttggagggggacgctctcccaggttgggaactgtccacaattcatatgaatgtgttgacggcacaatcaaagagatgaacgcaaaaatgtaaaactgccacgaattaattatacaacttggagaaagatgtattatagcaagcaatctcactgaaattaaataattgaaaattttgaactcttaggctgtaaggtagttaaaatatagctaagtttttctagctagctggaaaacgagctattcgagattgcatatgaagtgattctaggagaaaaaactatttcatccagagctgctgaaatctaggcgtgtgttacatcaacatctcccctcccacccagcaatccatcaaccatctccaatttattctttacacttaggattatgaccaagttcacgtacttaaaagggagaaaccacagagacatcacactgaaagtttctctgctttgggccagcaggaaattccagttgcttcattcaccggagccagttaagctgctgaaatgaaatggatcaccggagagatcactatatcaggacatagacttgactttcagggttggaggaagccggacaaagatgaatgggattcagagcctgaactcaaggtcaacgtcttctgaatcacaaagagctggtgggtcagtctgggagaagaaagaaaattctgcgccaaatgggaaaacccttaaagtctgcatagttttgcttgtcggtaagaacacaggtaggcggcgggaagagaggtggcaagcagccccaacgctcgccgagatccccagggttttacaaacggatcgtcctgaagtctccaaaactgtaactactatatgcccaaatttatattctcccctggcttttccaacaggctacctgcctgtgacagttttcccacgaacttggctctcctctgtctacagcgccccggggtctcccaaacagacagacacagacagacagaaggagcagacaaggggactgtccaattcccaccctccgcgcccactctctcgaggtagccaagaccctccaggagtccgaaagtcacagagcgctctgcgcccctgccacctgcccagcctcccgctggggtccggcagtccccactggagaccccgacatcgcggggctccgcggcccccgcgccgacccagggccgccagggggcgggcgggagcagctctccgggtgcctcccccgccggttcccctcccccggcccgccggccactcacggattttcactcggcggtggtccaggcgcgcagcggcggcttgcagggcgtcgaggcggcggtgcagcgcggcggtgcggtggcccagcgcggccgcctggccctcgagctcgccgaagatgtccccggcgcagcgcgacaggtcggccagctgcgccagcaggcagcccagggcatgcgagctgacctgctccagcgagcggaagagtggcgcgcccgcagccccggcccccgccgcctcgggccggcgcagccgcgcgggctccagggtcctctggtggaagggcatggcgggggcgggccggcggcgcgggatccctcagtctgcctcccgtcggcgcggggcgccagcctgcatccaacacaaaggaagtcccgggcagcggcggggcgccgagggaagcctggcggcccctgcccgcaggggagaggccgggcgggcaggaaggacggacggacggacgggcgcgcgggcgagcgggcacccgggcggcgcggggcaggaatggggtccgagccgtggctgcctggcgcccggcggcgttcctccacccgcagggcttcgcgggccgcgcggcgagaggaagttccaggggcagctctgggcggcggcggccgcggcggcgaggggagccgcgagtcccgctgaagtttgcaggcgggcaggaaagcgccggctgctccttccctccctccggattggagagggaggaggaagcgagggaagtgccgccgacaccgggcgagagggaggggaggcgaaagaaaggaaagggggaggagaaaagggccggcccgggaaccacctgcggctcccgcggctgccgcgcccagcgcccgcagccagtggcggccccggcgcctcagcgcaccctgtcggggcgggtgcgggcgcacagtcccgggacgcccacgtcgccgccccaactccccttggcagcccccgggcggtggggcagagccctcgcccgccccccgggccggggtgcagcgcagtgcgggcgccgggagggcggaggcgccaggacggccgcggccagctccgctcgctctgctcacctgcgcccctgcccacggcgctccgcagtcaggagcgccccgccccgcggggaacgccccgggcccctcggggtccccctgctctctcctacttcccttctggaaggtggccaacacttctgggccgcccgggtggacctcaaatagaacgtctttaaatgtccggtggccaagggttctgtagccgactaggagtcagcgtccgactcggaacaactcaagacctcttttcagggggcgtccagtgagtttttttcagcaaggtgactccccctgtggctgcctgctactacagctggaaaggtccaagctgaaatgtgactaatctgagtttcttccaccaagcatgttagttaggggtggaggactagaacctagaaccctgaattcgagcctggaagatatgtaagccacatgctattgagatcgtggtcatgggacacccgctaacacaaaccttctggtaggaagtttttgagaagactgggtccaatatccccaagctaaaatcccactg

SEQ ID NO: 47551 - DNA, 672 bp, Homo sapiens
taagggaaaagtgtatttgataaaagaggtaactcctacctggtgtaggagtttggaagcattcttacaaatcaagaaatgttgaagaaaaatgtctagaggtgtcactagactaggaaagtgggtcaggaagcatgagaaaaacaagatattcactagaagaggaagtggattttgaggccaggaataaggtcagtgctgcagacactgcaggaataaccacaagagaaattccagccaggaggggccgcccatgcctggggagcatttagcgggtagatccacatttgaactgttcctcagggcctcttctgtggcattggagaatatcactgtaggactttggactattgtgatttgtctattgcaaaacatatgcatagagtcgtttgtttatctctaaacaaagcttgattttactatactgcaattattgaacttgcaaggggagttcataccagtttactacactatcccatggacagttttctcaggttttggctcatgccaaagcacatgattttggagtaaaaaaagactctgtcatttcaactttctaagcctagtttccgctcttccgaaatgggaatatttctcatctcaacaaggtgttgcttttaacaccttaccagagatacataatagacccttcatgagtattagtttccttcc

SEQ ID NO: 47552 - DNA, 1259 bp, Homo sapiens
agcctgcaattccttctccagaggctttaagtatagtggaagtagaactatctttgacgacagagagacacctgcatcaattagcctttctgagcctcaaattccccatttgtaaaacagagagtataacacctacccataaaattgtagagaggtttagatacaccgttatgtgtagggcccgaacagagtagctattaatagtggtaacagactctcaattaggggctcaacatcatggtcgctgaacagaatcacggtcgctgaacagaatcacactcttcacgccgccttggagccaaaattagtttagccgcgagaagtccgggcaaccaatcggaaacaaccaaggaacagttgcatggcgacactctggttccgccttcgggcatgctcgaacagcattctgggaattgtagttcggggggggaatctaacactcaccgaggggcggagtagcttccggaaagggtactgcatttcccgtttctacctccactgcacccgcttattgcgtcttgctcctgggtcacagagcctaaaacgacacacccaacacgcccgccggagttacagctaaaggaaggacaggggaagcaatgaaatgccgagggcggagccaagagcgacactgggggagcaggaaaaggcggggcttccgcttggggcatggaggctgtacctcttacgtcacttccgtaaacaaacggagctgcggaggagcgggtcccgggatgtgaccggggctctgcttgtggctgcggcggtggcttctgaggctgtcgggtctttgcgggttgcggaagggggccccaatacccttcttcttcaggtatgtagtggaagcaaaggaacctccgcaacctgcccctttaggcccttcccaccactctggtcactgctgggtactgggcggtgaagggtcatcgcttcggtagattggggaaggggaatgaggtgatgtcaagagggatgcccagtggtactgcttggaggcaagacctggcacttaaaaccactgtgtgaataagtaactatgagcagtttacttattatgccttctctaaaacattctttgctgtttgatatacaggaagggtttcagtgctcttgtgacagatgtaattttccaaaaacgaggaaatcgcgagtgctggctccgcagaatattgtggtttagaccaccactggtttatttgcattgctttacttcctagatttttttttcttgtaccaccaagtgtgtattagcatcgtta

SEQ ID NO: 47553 - DNA, 589 bp, Homo sapiens
gaatatcagaaaacaataaagcaatatccagagagttctaagtaaaaaaattttcaacctagaattctatccaaactatcaagatcatggaaagaatggacattttcaaccaggcagaaacttttaaatgtttatctcctgtgaacccattcttggaaaaatattgaaggatgtcattcagcaaagtgtgaagacacagcttccaggaaaaagtagatacatgccaagaaaacagagaaaaaaagttgcaggatgtcagctatgcaaccggcctacagagcaaccactccagatcaaagtgcaatgacagaagtctccaggaggaagctttcaggaaaaataaagaggaagaagaactcaacggctatgaaggcaaactgtgagaaaaaacaaaagacagttaagaaaccccaggggaaaagctgtaatcatagtacaatactgaatacttggctctgccatgaaaatatttatatagtcatcacatgaatatttttggttcattttcaacttttagattcaacctaaagtcaaaacatattaaacaattaattatggttacagaacaatataaatgttattaatatta

SEQ ID NO: 47554 - DNA, 2704 bp, Homo sapiens
gaaaaacattgttcagtctcatcacatacacacgttctacagataattacaacttcttgtatgcctacttgtaaaactactaagtagttcacattttaaaaaatttccctaagaattttgcttcctttaaaaaaactgcttcttcgattcctaaatctatagaactcactttatcacgtcttctcggttaatccaagaattaaaaaaaccattttgcccatactgataactttactactctgcaggatccgaaaagctctctatatgccaggttctaggattcacacacattaacaacctaagatccttcaagtgagatagctcttgcagtacagagcacagattctcagggtcgtgggggataccggctgaggctcttcagacccccaccacaggagttccgtcctctaagggcaaccccctcccccttggccgcggcgcgagtccaggcctcccgggcacctgcggcccctgcccgctgcggggaccccccgaggaaccagccccccgccgggccccaaggaatcggcgcccactcccactcctggaggccagtgactgcaggcctaagccgcccgccggccccgggacgcgacgttacctgtaggaccacgtcgttcggcagctgcgcggcccggaacagctccagcacccgcccgttgaccaccaccttcttggtgctctcaatgtcgcagtaggagaagagatctgaatagtatttctgctccgcatcgctcagcgttaagccttccatcttcgcctccggctcacggccgccccgccccgcatgcactactcggggcccggccccaggaacctgggccggcaggggctgcgcgtggcccggcctcctgctagcttcccgaaaacgccggccccggcctcacacgcgccaggtgcgcccgagcaacagggcccggaggtcgcgaggagggggcccggctgcgctcgccgcgccgctgcctgcgaggcccggcgcgcggctgcggctgcggctgcgactacggctccggctccggctccggctccggccgcggggagggtgcagagaaagaggcgggggccgcggaggcgcgaggcactggcggactccgcccccgccgcgggttcgagtctccccggctccctgccgattcccccagacttcccgcctcggcttccccttccgtccacgcctccggagcggcagcgcttcccggaaagttgtggggcttcgaacctaaagtttcgggggatctgggctgagcgtggccgccgctccgcctccctccgccgccatttacagtgccccggcccggccccgacgcgcccgcaccaacagtgacagcggcggccgcgctccagacccggatgtgaggccgggaggagagagcgcgagagggagagagaaacacccaccgggctggcttggccgctcccgggagagggaggaggccgcagcgccccctggtggccggcgcccggcggcgggatgaccgagccgccctctgcgcggagatctcagcagcaagacccccggaaaggggggtgcagtgggaaacagccggcagctcattaagaccgagataactaagatccgggttgcagtttttatgtttcgcagtttctggtcctaagcgtctgaataattggattgaaaggggagccttgttcaggttattatcattctatctgtaccttttcggtacagatgaagataaatgcagtatttccatctgttctgaagggctatgaacatccgggctatgaacatcctggctatccgggaagcctccacgtagacaccaacattgaggcttcatctcactcgtgcttcaagccatgtttacctgagaaacaaaatgtgctgaatagaggggaaaactggcaaagttgtcctctttgttcaccaggtcattccggtcactgggaacttaatactctacatttataccttcaactctatcaactcatgtaggcccggggctgcccacaggggctgccttccgtattttctcctttatgaaaatcatggagtggcgctcttttaatctgcacctgtcccagagaggggattcttcagctatttcaagtagaatatcttaagaatttatacttagcaaatataaaatacttcaaagacgggagctaaggcagaattacccagagttctggtttttattttgtcttctacaagttgtttcccagagtgcggatcctataaatgacacatatgaggaaattattacaggttcccagtcatttatctgtaattgcaaaattcaaagcgcactgaaaacccaaagacttttttttgtaaccctttggaagtaaaacctgccctgcctcatttggaggcaaaatctaaactaagcttgcatgaagctatttctagcctttatggatcccacttagtgtcaatatttactcatttcactccaggtctttgtagaatgttaatatgtacacagtcacaggcattctattatctttctattttttaagaaagataagggattttagacctgtcaatgtcttctgacttgactagtagtatttgataaaggtaagtatatactatccattaagcttatttcccatctctaagactttcagtttgctacagcagcccctcatgtgtcctttcagggcacctgcagcaagtgatcagaccccccccagacagctgccttccaaaggtgtaaacagaaagagcacaatgggg

SEQ ID NO: 47555 - DNA, 794 bp, Homo sapiens
ttgcaccatgtgcctggaaaagccacagacactcaatgccaacgcgtgaaagcagccaggaggggggctgtaccttgcaaagccacaggggtggagctgcccaagaccatgggaacccacctcttgcatcagcgtgacctggatgtgagacatggagtcaaaggagatcattttggagctttaagatttgactgttctgctggatttcagatttgcatggggcttgtagcccctttgttttggccaatttctcccatttggaactggtgtgtttacctgtaccaccattgtatctagcaagtaactaacttgcttttgattttacaggctcataggcagaagggacttcccttgtcttcagtgagactttggactatggacttttgggttaatgttggaatgagttaagactgggagactgttggataggcatgattgtgttttgaaatgtgaagacatgagatctgggaaggaccagcagcagaatgatatgatttggctgtgtccccacccaaatcccatctggaattgtagtttccataatccccacatgttgctggagggaccaggtgggaggtaattgaatcacgctggcatttacctccatgctgttctcgtgatagtgagtgagtgctcaccagatctaatgattttatgaggggcttttccccttttgcttggcacttctccttgccaccatgtgaagaaggatatgtttgcttccccttccgccatgactgtaagtttcctgaggtgtccttggccatgctaaactgtgagtcaattaaacctct

SEQ ID NO: 47556 - DNA, 1196 bp, Homo sapiens
gatggaggcagagtcctagatgtcatcagtctatgagaagcagtgtgtctgtgtgagagcccctccaaacaaatacatactcctccatggaagcaggagctcaaaaagacagggaagcctacaagaggaggagcctgcctccttgcttccgagatggatactgggtgggctgagtggtagaaggctaacagtttcacaatgaattaaatttttctctagatctgtcacttaaattcatatttccaattataaaggaaaagaaatacgatgtaacacattggccctttgggttcaagtctaatctttcctatacatttttagtaatatcagttttaaaaatgacatcatgagaaagctattttaatacaggtggtctatattatatagacagattttaaaatgctgattttcaggtaaaaccaactagttggttattgccggcaaatgcatcagctgttttttaactgaaaatctctaatatcgtttttaaaataaataaattacgtacagtgaagtttgacaaatgcaaacagtcatgtagccaccaccaaaatcaagatatagaattccacaatccaaaaaaattcctttgtgctgcccttttgtactcagctccaccctctaccctcagccccccgcaaccactgatttgtttgttgttcctattcttctgccaaaaatgtcatctacatggaatcatgtagtatgtagcctcttaagtctggatttttttcacatagattaatgcatttgagattcttccatgttcttgcttgcatcagtggtttaaacagtattctgttgtatagatgattacagtttatccattcactagttgaaggacattggggttactcccaatttagggtgattattaataaaatacctaggagtgggattgtttggtgaatgcttaacgtgtttaactttatttttttaaaaagtcattttttcaaaatggctgaactattttgcattcccaccagaaatgcatccgaattttagttttgttctacaacctcataaatcattctaatgtcattctaataggtgtgtggtggcatctcactgtgatttaaatttgcatttccctaaaacaaatgatcaccatttcatgtacttacttgccatctgaatatcttctttggtgaagtgtctattcaaaattttttcccattttatattgcgggtttttt

SEQ ID NO: 47557 - DNA, 721 bp, Homo sapiens
acaattttatttctccattacaacaactctgcaagcagatttcattatcactaagttttagaatagaaaactgaggctcataggggtttgtaatttttccaagaacacatgcaaacagaactacagccagcccgcgtgactgggtcacctctgctttgtacatgcacatggagcttcagtgccagagctggcactgaagtttggccttggatttcagtaggcaaaggtaaggtgggaggggaggactcagcaggcagagggaacaatcagagcaaaggcaggaaggcaagaacatactaaataaacatttacagaacaaaactggtctccaccccatgccctcactatagtctggaccagatgcaggaataggatatagtgcagtttgatagatccgtggtgtatcacagatggcaatggagggtcaggactctggaaggtaatagtggtcaagttgtggaaggttttaaaagatgggaaaagcttatatttgatttaatagaccatgtggaaattttgaagctgtactttcagaaaattaacctgacattagactgaagggtagcccagaacagagcatcttaaacttcatgtaatgcagacttctgtatttctaagtctaacattctgcatttctaagaagctctctagagattctgacacaaggaagctggagtgggctcttcccgatctccagcagcccagattccaagccagcagt

SEQ ID NO: 47558 - DNA, 3427 bp, Homo sapiens
tttagcacatgtgtaaacaaagtatcttttgggtgagtttatttttatattaacaaggatgtttacttctttaggtaaagtaacctatttctttttctttggttggcaattagggcaatactaattacctaatcataacagaagcggtgctctccagactcattattcctatcattggatattatctgactgatgaattgtgatccctgtcacaggccaaaatagcgaggtcctgcttcgataattgctaaatatatttttcttgaattatatattttttgccttatgtcgactgtgaaagatataaactataacttctcacctttcttttggtgagaaaaaaataggcctcaatcattttggtaacaatataaaacaagtaaaagaaaaaaataggtctgaaaagatcttggagtcaccttaaactttatctgccatgagacacttagaagaatcagacctttgttgaagattacagaacagagactccttcagtcacacccaggagacaggtattcaccgtaaagactagaatgaagcgtgggaagtggatggatccagtgcagccccagggaactgaacactcacatgcccctgggaagcaggtctttgttgctctccttccatcacttggtctcagcttgtctttgactggcttctaccacttgtgcctccacccaacctgctgctacattctcctggtttctgcttactcaaatgttttgcatccgaagcccattttggccccttctgccttaccctctcttagctccaacctttctcttacatcagacagctccgtctctgcattctccactttccatttccaagggagtgtctgattggcttactaactatcagagtccgtgtttgatgagaactgtttgctccaggtcacctcacaggatgatgactacatcacggattgtgcgctcttgggtcacgcgatcactcttaatttaaattagctgggctgggggtggggagggggtaaggaacgttttttgtagttatttgtgcaacccctgctctagaaatagtttgggtaactgtttcctttccaaaaggactctctgggtacggtaagcatctctctctcacacacgcatatattaaaataacagtgactaaaacaaagggagcatgaataaattgaattatgaagttaaatgtatgaaataatgaatgaacaagggaagaaaccgatactgacccagggtcaacaactatctatgtccaagtaaaatttctttgcagtctgacaaattggctttcaagattgcattttgttttgcgaattaagccatttttaagtcatgagtcgtagttttctggaggcccccggcatccggaacccatgaatgccacgttctttctagcagccttcagcaatttgagggcgctttgtttcttacgttgggagagaaatccatcaggaaatcgacgcccaggatcagatgcagatcctgggatccttggctctgagtagcacggtggaaaagtgaggtaatccaggctctgggcccgttttcctaggagcccagggcgcttcacctgtctgcagtcagcccctttcttggacgtctcctcccctgagtttcctcctcataggcttgtccctgggagtgtgggcggcccctttcttgagcgcagaaacacttacttttccccctaccctgctcctcctcctccacagccgtctttctctttgcctcagccacttccttccttggcctcaccctccccagtgcactgaagaaggtaaccgggtccagacccacgcggcgccagttctccggcgggaaggaaaaccgcgcagagaggtgcgtgagcgcccgggcagatgtggcttaggtagcagggatggactgggtgtccgtggtgcgccgccgggcaccgcgggctgcggtgagagtcgggtcaggagggggccgggagggggctcagggcgcgcggaagctgcgaccggctgggccgagacctcgcgggttggggtcccgtggggcgcgcgccgcccacgcccccacctctcgggtcgacttccgcactcggctcacgtgacgtttcgccggccgggggcggactgggaagccggcagaaatggaacgatttttaccgcggtgcgacgtgtcggctttgcacttggcggtggttcaggagccagttctgcagagctgggtggggaagggctgggggcgagaggagaggctgccccgaggaacgtggtggcctcagggcagtggactctgcagcgccggaggtgggtgcggctctgtgcgctccagatcagggggtgcagagtcgtgaggggacaccaggggctcgtggagcccggggcagggtccgttttcgtcgcccgggttgggtgctcgctctcgcggcgcttcggggcgcccgggccacgggggaggcagacccgcggcgccgggccgggagctgcggagacaaagacttccgggacgcggcccttcccgggcgccagcggtgccgccccgccacggggggcccagccccgcgctccccagccctgcactggtgccggcggtgaccgtgtgatgatgggctgcagggcacggggttaggggacctctaccaggcagaaccccaagctggtagcagaatggccaaatatggagtgagcgcgccccagaccggagggagtaaggagcccagtcaccctttgacccgcaccagctgcttgtccgcgattgcgaagaagggctgggaaaacgtgcccagcccgagtgtgtaaagttggttcctgattccggacatacctattccagtaggctttatttccttggatattagaaaatctccatgcattgcctccaaacttttgaaaaataacaatgccctgagggtccttaaatacattctaaagtgtgtattggtggtgagtttcgggttctgcccagtcctccgactttccgcttcctttgtgtttcccacgcacaaagccgaaatcgattctgcgacaattagagtgcctggccgtcatctacctcgccttccctggagccttttcctgtcttctggtccagccgctcaccattaagctcttccctttagacttgctctgcttctcacctctcctcattgttcttttctttttttttttcttagacatagtttcacggtactcgtgagaatgtgttacattcgtataaccaaatcagggtaattggtatatccatcaccctaaatatttatctcttctttatgctaggaacattcaacttaacttgcttttagccatttggaagtgtacaatccattaatgtgaactatagtcaccccactgatcaatgcaacaccaggtcttatttcttctgtgtttatacccatcaacctctcttcaccctccgcccccttcattgttcttcatcttgctctctgcagtcctgggattctgtccttattataa

SEQ ID NO: 47559 - DNA, 921 bp, Homo sapiens
gcggcgggcgcggcgggagcggcggccgggggggccctggcggcggcggccggttgcggggcggcggcggcgggcgcgccgggcgccggaggcgcggcgggcgccggaggcgcggggactggcgccgcgaacgctgcggccgccgcgggggctgcggccgcgggcgatgccaaaaacggtaagacggggctggcggggcgagcgccaacttcctccccgacggggacggcgcggtggcggggccctgggtggcgcgggcggtgcgtggacaatgcgagagtcaggaagtgctcaccccgcccctccgccccgccgcggctgccccttcgcggtccccacgcctggcggcggggacagatctgcggcccctgcccggtgtccgcgcggggggcagcccgcgccccacactctgaggggctcccggctgcggcagcgctgccctcgggcccagcctgctgcccgcgctggcactgccccgccgtgtgtgccgggccgaagggaggaaggaagggaggaaagagccgcccaagttgagaagaatgatccgattgaaaacttaggcaccggttaattcttcccggtgctccaaggccacccgtaacccccggaatgaaggagagagagcctcaattcttagcacacccaggcttgctgcgtcgatcgccacaggtgaagaggcctcgagacatttagggcctctgtgtttgctctttaattttttggcttgcttgaggaaggaagagaatctgaacttgacttccgttctcagcccggagttaaaaaaaaaaaaaaaaaaagaaaagaaagaaaagaaaaatcattctctatgtcattgtgcttaacattttcagaaggaagcctcataatcttaggtagtgcctgaatgttccttttgaggggacacttaggaactggcccaga

SEQ ID NO: 47560 - DNA, 854 bp, Homo sapiens
taggtaatgagtcatgttaaacaggaatatttattttaacatgcaagtttttaccataaaggacaagtggcaaatatagaaattaggaaaccaaagtagtaaaacaacagtgaatgcttgccattgtgttgaccgcttagcatccaagtcttctttctatttcaaaccttgaataaggataagtcttggtgatgggcagggttctgtctacccctgtgaaaggtaaagaggagcatgcattccattccctatttgacagctaggagtagcacatggcctagccttgtccaaccacactcccagctggaactttgaatctgggcagttatgcaatgatgcagggagcagaggttatttcctggggcagtgatgactgtccagtgggtggagagtttccagcagccccagaattatgggaagaggtttcagcagcaaatgttaatcagagttatttctgagccaggactcttctgcttagatttatatgattccttaccatttcccaaacctgattttccatatttcttagattcagtaggctagctatgaattctctttctgtttaaatatgcccaaatcagtttctcttgtttgcaataagatttctaaacagtagatcttgcgtacacacacaaagtacacatcacaggcctttgtagatgcatattaagtgttaattccttttctttcttctttcctttcccagttgcatgataggcctatttgttctcactaacataagcataaaggtgcttagcatgtgaccttgtacaaagaaagtagtcaatattgcctcttgtccaaactacacacttagtaaagcagaattcatcgttaattccccgaagagtctc

SEQ ID NO: 47561 - DNA, 669 bp, Homo sapiens
caaattaggatttttaagacattgtttcagggtaaaatcattcaatttaggcttcttcccccaaatttcaattagcccaagtggcatctaactttagggaggtgttacgaattaggtaaccccaagttatttgcatttcttcttttcctgagagtggaagtagcaaggtataaagtgttataataatggctagtaatttgcaaagaggtaagatgatcttacaggagtaaaccagcttgctggaaatgagtattttcagttaagggccaaaattgtgtagcacgagctcccagaaagcccctggaattgtgccagcagacacggccatgaatttggcagtggctgctgtagccgtgaggcaaggtaggcctttgccacaggatcaaaagacagactgtaataagctatggatttttggtgctttccttgtaattaaagctattagagaatcagaattttatttagaagcttctttattccaatcaaaaaagatagtacattcaacattaggactttactgtcctaatgaagagaaacttcatttgctctaagaacactgtaagatggacaattttggaaacatatggaattctcccaaagtggccaaatcatcatcggtgaactagtgccagtttgtgagatgtgtgcaagcatttggataataataaa

SEQ ID NO: 47562 - DNA, 2974 bp, Homo sapiens
ttctgaagaggtgtactgctgctttcatgctagcaaaacatttccactgcagaggaaaaaattgccaatggcatgggtcttaaattccttgaattctaaatttatttattttttggagacaatgttatctgcccagtttattttaaagtaaattttactgactcaattagacagcaacactcatcctcattaaagatcctgcagtcctttcacaagattagggctggtggcttggtcacattccaatgtggataattgcattctgcattcctggatatttccctccacctttccaacctcataccgtcaaatgcattgttatttacccttactgcaaatcaacagtcctgttgtggaggcgctgagggtttgccatcccctcagtttgcaggctaaagcatcagcccaaaccactgctccttacacttttaaaagaaaaccccttaggtaatgcatattttcaaatatgaggcaaatctcaattatgcacacttaatcataggttaaggtttttggtaagtaaaatattcttattttataaaggatgtttattttggaatcttctttgatttaaaaaatgtgttgctcgaatatgtgctgtttgctcaaagaagaaaacaaagtcttcagaaatggcaacaaaacaaacaaaaaagcgaaaaagctcttgaggaaacagcttttcattgaccttctaaataaattccacaagggggcgaaaacacctaatggtccggggctgcaaagtttttattgcaaagctggccacccataatagattagtggattaatatttttctctaaaggatctggcctttaatgttgacatcaatttatagccatcccaggcgtttacagtagtaaaagtcatggagaccataaacttcacaatagatgtcagccttctgctactagtgctctagcccagcaccccataaacagtggtgattaggtaactgttcttcaaagacccatccatagctctaacgtctttatcagctcccgcaaagatactgtcacgaggattttatcaggcacaagacagaagtatacgtttttattaatgtggacttatttttctgacatgtagctatgaggttgcactgcagcttatcattgatctcttcttgaaaatcaagcatggagtgtctatttttgggcaaagcttaaagaacagaagctctcttgtatcatattagaactttttgacaaacagccaaggtacagaggtcaaatttccccatatgctataagcaacttagtaggaagcaagaccacaaaaggttttgcaaatgtctgccagtagccgggtgatctaggtcactgtacaggtttcattaatcaggttgttgaaacaaggagttatttttctctgcttaagagacctgcagatatcatgtagaatctgctcaattgttgatcaagaaagagtttttaatgaaacagagatcactcaagtgaactggggtgcgggagcgtttgtatttgtactgaagacaaattgtgctttttagcccagctcctctgtttgagtcctctgttctggtagggatgggctcaagatctaataatagttccttgggctctgcatctccacatacgtgttccggcgtttgagcagcaggaggaatttagtgacagagcaggtgttgtggcttattccctggcagaataaatggtgaagggtggtggcaagacaattctttggcttctttatgcaaaaaaaaaaaaaaaaatgcatttaatcactttccttttttcctggcactagtgaaaaaggattggagttgctgtattaatatgtatgcaaacatattttttcacttaagcctctggaaaaaaaaaagagagagagagaaagaaaaacttactgtgaaaatgcttagccagaaagattcattgctgattgcagatttagtattgacatgtcttagctgaagaaaacttcagctttaactattaatgtggaaatctggatcagcttttaaagtagggtaaaaagagttttggatgattcagtatatttatttgaacataattttaaagaagaaagtgtcaattatagaggtatataaaaaacccagtggagtgtgtgcattttaattttacatggcctaccttggaaataaaattataaaatgcaggtgatctgaattatacttaaagcagcctttatgcccaacttactctctcataacacttctaaatatccgctcctcctgatttcttataaaatatggaatttaagatgagaatcggagtctaaatgaaatgttcttttaaagcattatttataagattttcctcaacctacattttttacttcccctagtaagttgcgtacaaaagtctgtattttttcttgaaggtaggtgtgttgctcttataaacataagataagccatgaaaacatgaaaaacaaaattccttctccttccacctgggataatttgagattttcacaatattactttttcctttgcttgattatataaggcaaaacttgatacccacttagttgtagctatggtcttcttgataagacatctatccaggtaaaattaaagtataattttcaggtgatttgcatcccatgcatgcaacaggaaaactcagaattcaggaaaacagggcatgcttaagagggaacatcttgtaaagactgtaatttgacctttgagtcaacctgagtacattttaaatattataggacaaaagcctcaaagtggaattctgcctcatctttctcagaactataaaccagtcagacactgtttcagagattacgctagaaaatatgtacctatccttggcacttttgctgagaaataaaactctcatcactggagataaaggtagatttatatttaatgccacccatcaatcaatcagtgtattattccaatctacctctatttaagtagttgaatcaggtataaacagaaacacttgattttttttgcctcctgcccat

SEQ ID NO: 47563 - DNA, 5490 bp, Homo sapiens
ccaagaggcatgttacaatgataacaatgaagcattatgccaattatgttaaatcctgctctccgcttaagctcatcatgacctgttttagtgtcctgtaatttatcctttggaatgcttactctcatcaatagtgttcaactcaaagacggggggaaaaaagccaccaaagggaacaaccacccccaaatgacttctagaaaacaagttatttcttaactttttattgacattggcaaattaaaatagaataaattaacaagtattttttcaaaaaaatgttttgtacaaaaatactgtcaaaatttcctaaaaagctttcaacacagtagtatcttttcatgtactgaatataactattagcacagtgtcaaaaatgttgaagacagaaacaaaataaaaatctgtgaaatgtttgccactgacgacattccacaccctattatcatctgtacatatgggggtggggggggcggcgggggggacagccaacttgaaagtgaacagtatgactttcctgatccagaacagtttggcccacatctgtttaatcttccagtttagcatattttaaaaattagtctgtactcaaatgcatagttaaaaaaatgaagcgagatggcagtttgtgcagtaatatctgcccttcgaagttcatgcaaccaactaatgcaatttttcctttcactcgtaaatctgaatgcagttcagtcatttgaaaccatctacaaaatccacaagattaagcagtttgccaagattaatatctaacagttgagcactggagaaagtgagggaaaggagtaaaaacaaacaacgaaaaagaccaagttagctagatatttcaactacataagggaggtgggtgaatgtcaaggctacaaaaacgaaacaaaaacaggaaaaaaaagtggcagcaattttttttaaaaccaatttgtacaagtttatagtttactttgtttccaagttctcaaacctttcaagatctgaaaagtgagatactgtgtctaagggaatgtttcttttaattcacgccgaagaagttgggggtttgatttctttcgccggggtttcgatcgagtcaacagctcactctgctgggctgctgtttgcacacgaagtccgtcataaaatcaaactcgttttgccccagccagagttcgggcagctccttgatgcggtccaaacccatttctatcaccaaggacataagaacttcctcgtcgatgaaatcagtgtctatgacattgggcggcagcattgcagcggggacgtgggccacggaggcgggcatgttgccgctgccgctgccgccgccgctgttgctgctgcccgcgccgccgcccgagctgctgccagagccgccgggggtgctgctgccgcccgagccgccgggggtgctgctgccgccgctgtgcttggggttgcaatctcggaagtgctggtttgtcccgttcatctggtggcctgcagcagggtgcaaatccggcatgtagtggttgtgggggtaggggtgatggttgaaatactggttgttgagcttctgcagctgcatgctggccggcagggagcctccctggctggccaccgggggacccatgaactgggagttgttaaacctggccgcgggggccagcgcgctcggggggtgccctccgttcacagtccccggccccatcgcatgcctgatgccgctcgtggcattcatgttgcccgcgccgtagtgtatgtgctcgcccattagggcgttgaaggcgtgctggggctgctgctgctggtggtgatgggggctcgggaactgccccatgcccatgcggtgggcagggtgatggtgcagcccattggtgccgtcggggaagcgcccgtggttcatggccatcatatggtctgccatttccagtcctggaagtgaaaagggcagataatgagacccgcgccacacgtgtcgcccaccacagcgcaccccacttttgctcgcctctgccccccaggattcccgggcgcacgtcggctgcgaaccaccacccccaagatcccactaacagcctgtgcacccgggctagccaccacggaagagctaccactcataacacagccggacgctgcacaaacagccccttcccctgcgatcgggcggggggacccgagcccacaccccctttgctccccgaagtggcctaataaaggaagtgccccgtagccctgctgcgaacttcaggcattaaatcagccctcctcatcctgttgttgcacatcctgttgttattccccagcttcgcctcacgctcttcctccgggcaaaccctgccctcggaggactgggctggcaagagccccagccagcttcgcccgtcgcgcttaccttccgtttttgcgatttctgctccgaagaccgagggcgggctcgtcgcgtccaggaccggctcagcagcacatagaggggaccttcctggcgtgcaaagcgcttcgctgtcgcgatgtcggcgccgaggtctcgcagcggccgctggggcagattcggagccgttcccttttatttcccctccgttgccctcacagctcggcaggaccgcccggcagctgccaacaatgagctgtgtttcttagggctttggccacagttaatataggcatttcggaaaggcggagcgagagcctccagggcgggcggcgccaagacgcggattccggaacaccgcgaacaccctggaccgggtcccggagccgcgtccccgccgcccgcggcacgtgctgcagaggctgcggggcccgggggccgcccagtcgccccgtcgccccccgactctggtttcttcccggcccagaaacgcgaggttggctcagccacccccgaggcagggggaaaatcctcccctgccgccccgcccgaaggtagagcctgccgggatagccacgaggagagctcaccgcccccctcaggctggatctaccccacccccagctttctcactcggttcacctagcgatctgccccgctctctacgggaaaaggggactcgcccagcgccccccgccctccagagtgcccttgtgcctccccggttttgcaaaagcttccacaggcagcgaagaatggctgtgcttcctcgagttgggttttaaagacccggacaaataatgcgccctttcctgagcgcgccttcctaggctgtgcctttgtgttttcatacgggcagtgggtagacctactctagatcaccgcttgtagatgcatttttttcctccactcctttcaaggacaggagctgggggcggggaggggcagccgctgcaggtggacggagcgcgctcgagggcccggccacccccgctcccgcgccctggaattccagtccgcgctttcgggcccgcctgccgctcccggggtacgtgtgcttctgctaagtttgcgtttgcagctcttggtagctttggcatccgagctgaggcgtctctgctctgtaaacaaactcagcgatcctcgtccccagatccacctttttgcacatacacagttacttgcttctgctgttgccctggatccgggaggtgggggtgtgtacaaacttgcagagcctccctccgggctctgcctgacggtttggggttgatttagaagcaaacgggtttgtaattaagaaatttgagggctgagtaaggctgctcttgctggaaaaggaaaacaaatagataacgtggtaatcgctttgtaaataaagtcgttctggaggtgggcacgtagctgcacgtcccgtatggcaccacgcgcacacacacggctgggactcttccttttcagtgaaattgttcagtggggcaatgggcgataataataaccttgcttccacaacgcggcacaacgagcctggtcgcccgtttggttcattgacttgcaaataaaacccctaacacaggtctgggctactaccaagtcggagctctctggctttctcacatggggaagccgagttgtttccccaacaccatgatggggctgttctgagcttttacattgctctttatgtggtaaaatcgagtttagcgctccgaataaggacttctgggcagttgtttcttcataactcgatagccattgaagacttcctgctgcgaagagcgagtccgcctccccgcccccccctcgtctttttcccccttcttgcacacaagacttttaaaggccctgtttcttgaggactggaaattctgatacatttccccgttcaggaatttgcaaaagagacccaatcctgattattttcgtctatgacccctctgtcttttcctagtcaggcatatttttgtaaatgttgttactttgtgtcttgtcttctttcctcttccaggctctccggcaaaccgtgcaggcaaataatttttaaacctcaaaaatatttactttttagagatacgggcacatgacacattgcattgttagttgcaacaattccctattctcctaacctcccaccacctttacctgtaggtcaggacatgcagtttaccgtatcagaggcttggatacctgaaggggccacttcctataaaaaaacagattctaaaatattggtaaaacccaacctgaaaaatcgcgggattgtttactttcccttctttgtactgcaagtgtctttcgacacaagaaacagcttttgaatgtctaatctaaattcctcttgcaaccactaaggaaaggtggagctccatccagctccagtggttctacctactattgggaaatccctggaaaggtcacctgcccatcccccatcccttaaaggagaacaaaatagttctgggaccagctggttggaacatggcatgctttgttcatttattctcatccgtccactgaatgtcctccaagtgccaagtgctttcttggtgcctggagatacaaacaagataggaactcatggtcacagggagaaaactgacaaacaggccttgaacacactgtgataaatgccacaaaggcattgaaggaaagggctttggagagcacataggagggacacctacccccctcctgggtgctttgggaaggctttccggtggagatggtgactaagtggaggcctcaggatgaatggaagtttggtcccattaggagtggggtagaaaatgtatggctagggagtgaatgcaaagatgagagaaataaggttggagaaatatgctggggccggatgccaagggcattgtggcctcaagctgagaaattttgctgtatcccaaagacattgggaggcaggtaaaagcttgtgaagccatgagataggaaagatttggattttagaaagatcagggcagtactgtggagaatggttagagaaagtaagacaggaaacagggagtccagttagggggcacttacagtaacccagggctcccagaagttccgtataaccagggtttatcccgtgaacctgggtgagcgagcaagtgatctgtctgtggccctcacagcactgaatggttgtattc

SEQ ID NO: 47564 - DNA, 1802 bp, Homo sapiens
tagtccttttggattagggcttctcctactggcctcatgttaacttgatcacctctataagctcctgactccaaagaaggtcatattctggaggttagaactccaacatatctccaagatatttttgcggggacacaatttgactaataacagtggtaaataaactgagtaatacaagacccctgctgctgacaaagaaagttgccacctggaactgtcttcccagacgtcctactggcccatattctcatttcttcatgtctctgctcaaatatcacctcaacaaactctccctgactgtcctacccaaatagcaatatctctcttgtttccttgccctgctttatgtttcatcttagagtatcttcctacctgacatgctgcatggtaaattgacagtttactgccttccccattagaatgacagctccatgagagcagagacctagcctggttgttcattcactgtctgaaacaagtcctggcaggtattagacttttactaattgaagggtgaatgcatgaataaaatatggcattggcactatgggaaccccaatgaggggccaaggaagactttctggagaaggtcactctcaaggctggaggtaggccaggtgcagtggctcacacctgtagtcccagaactttgggaggttgaagtgggaggatcacttgagcccaggaattcgagaccaacctgggcaacatcttgagatcctgtctcaacaaaataaaattagaaaatgagctgggtgtggaggtgcatacctgtagtcctagatactggggaggccgaagcggggggattgcttgagcccaggagttcgagattgcagtgagctgtgatcacactactccactccagccttggcaatagagtgagaccttcatcccttctaccaaaaaaaagctggaggtagaaaagtcaagtggaaaaggagaacagcagcttacctttgtctgcattgtggcagccacttgggcaaaactgttatctgtttgggaagatgactcacctgggcatcactgactgctgagtaatggacaaaggtccccattggtgtgaacttttgactgaaacaagtttttagaggtgagtctctggctttagctaaaacctgaattgagaaaaggctgactgaaggacccagcttcaaaaaatatattgaaagacctcatacttgtgtggtgcagctagggaagggaggaaggtgagatttagcactgtattttgtacgttatttaaattatctcagctgagggcagtgactcatgcccacaatcaccagcactttgggaggctgaggtgggagaattgcttaagcccagaagtttgagaccagcctaggcaatatggcaaaaccccagactctacaaaaaatatgaaaagtagctgagcatggtggtgcatgactgtagttccagcatctcaggaagccgcgaagctgaggtgggagcattacttgagcccaggaggtcaaggctgcaggtcgaggtcgaggtcgtgccactgcactccagcctgggtgacagagcaagaccttgtctcaaaaaaaataaaacccaaaaaacaaaacaacaaaatgaaacaaaaccccaaagctcacttaatcctcaatgtaaggagtagggattactttcatcactttagtaaggaggactttgagtctcagagaatcttttaaaaataaaaataaaaacaatgaaaaacatggccaccttctcagaaggagaggaatagggaaaagaggagagaggtagccagagagtctgttaacacatgatttaatagtgacaga

SEQ ID NO: 47565 - DNA, 526 bp, Homo sapiens
actgcactccagcctgggcaacagagtgagactccgtctcaaaaaaaagaaaaaaaagaaatattaatttagatataaattccagagcatcatgacaccaacaaatcatccttttcatggtctttgttgtttaccagggagaattccacgaaaagaaggcaggataaactattgcagacagagagaaaggttcagagttcatgaggctagatgaactctgctaccagagatctcaggagattagataaaaggtgcaagatcagaacccagggagtataataactcttccaacttgctctaacaaagaacagttttcctacatgtcaccctcccccagccccaccccagcagccactgcctacaagctcctccgggctggagtgtaacttatttttccttgtgccctaacacctaacatctgttgacccccaaacccattctcttgtcactacacttggatgatagaaggacattaattcagggataacacattttcataagtaaaattattctcaggaaataaata

SEQ ID NO: 47566 - DNA, 705 bp, Homo sapiens
ccttttgtctgagtctatcttttctccaccataatctcattctcacagatccctctaactaagctaaaatatttaagacagaaaaatgagttagatttggaactcaactgctaaatactcctttctttcctttcctctgtgctatgtgttagacactgtgctagaatctgcgtatgtggtgacaaatgaactaggtgcaattcctgcactcctgcaccttacagtgtaggacatacgatacagtgagaggcaggctgaagccaggacaccccaggggtcaaggcccaggttgtgtcagtatttgctgatgtaagattgcacaagtcactttagctcttagaatctcttctctcacttgtaaaacatttggatttaggtttctgggttcttttctgcccctttatgttcaatgattctataaagtaaaattctctcacgttgcgtttcagggtggtggcaaatgttatctttgaacttgattgttgtaagcaagactcaatcaagattgtctaagttgctgaaagctttgagccaccagcactgtgtatgcgtatgccctgcagaaagtacagggtgattgtcaatgcttaccatgcaactgttgaaccctgaagtatttggattctgtagagaaatttactgaattgaagggaagatgcaagccttgggaaaaggatttgataataccttgcacaatttaacacc

SEQ ID NO: 47567 - DNA, 927 bp, Homo sapiens
aggataattgagaggattgaaggatttgttgatttctagtgctggtggaatttacgtatgcccttcaattttgtattgtttaaaaattttcatcttccttttcaagactacgtggattaattttaaatactctttaaataaccagcagttgctctggcatgtgttcactgatgaccatatttagttaagaagacactgttcttctgtatttgctttcagctctgatagacagtagggaaataagcactttaaagtacaacaaaccaaagcattatgtaataggcagaagcaaacacataatcagataaatgtataaatatttacagagtttagctgcattgggcattaaaacaaataaacaaaaatccacactgtcacccttctttcaaaattttagtcaggcagccttcaggtaaagcaaagaaactttctaggcattgaaactgatgtgagagctaatacttaccttgggctaaaatatgccagctaagtgatttataggtaataattcatatagtgcttatgctaactgtaatggatgctgtggtgtgtcacacaggtgtccccctataggcccaaggcattgctcccatttccagaagtgttgtctgctgacagctcatagctaaatccttccctagaaattgctcttggcagggaggagctgcctgtccaaggctacagactttttcaggcctgtatccaatcactggtcaatatctcttcagggccacgccagcttcggagctggaattagtgggatcagctgaggcctctgttgccgctgcctcaccgttcaacttctctctttcctcaatcttgcttctctcattgccttactggtgtttgtcctgagagcatgccctccacaaatgtaacatttctcagagtgctattatcaggatttatgagaaagttgaggtgcag

SEQ ID NO: 47568 - DNA, 850 bp, Homo sapiens
ctaactcttgttacttcatctacctgtgcatgccccaagtctcttatgcctggaatgaattagcagtaatccctgacttttactcagtactctacactgtatgaaagataccctgctcttacagaaagtaacgaagccatcatggacatggtgttctttctttggagacaataaaaagcacatttcttatgttaaaagaaaaactttagactagttaaatttaacagaatttaattgagcaaagaacagttcaagaatcaggcagcctcctgaaccggaatagactgtggcactgccgggtggtgaagaaaaatttatgaacagaaaaggaaagtgacagacagaaaacggaagtgaggtacagaaacagctgaattggttacagcttggtatttgccttatttgaacacagtttgaacagttggctgcctgtgattggctgaaactcagtgattggtgcaagagtaggttagtctgtttacacatccagttagataacagttcactatgtatggagaaacctttatggcaaacttaaaatgtgtaaggaagcagctttaggccaaacttaatttaacacttaaagggccaatcgttttgaaagagttgactaggattctacttataaatattccagttatttaagtgtagaatgctgaaaagagtccaatcttaaaaaaaaaaaaaaaaaaaaacaaaaaacctcctttgctgtgaacctgtttctttttactacattgtgaattggacacttttgtttcttttaagcttttgtattttattttgcttttccaacttggttctttgatgacaatcatgtcacacctgaagactctctttttttccttca

SEQ ID NO: 47569 - DNA, 1232 bp, Homo sapiens
tgcctcagcctcccgagtagctgggactacaggcgcccaccaccatgcctggctaatttttttttttatttttagtagagacggggtttcaccgtgttagccagtatggtctctatctcctgacctcatgatccacccgccttggtctcccaaagtgctgggattacaggcgtgggccaccgcgcctggccagaagcctgttttattgttccatttatttaggttgtatttcatgtggtttgctgctactttggactaacatcattctgagcaacattcttagggtcaaaggagaggaatgggtatttgaggaatgtaacagatttttgtcagcagtgtctttccagtattagtcatgcctgttgattcttcaaactgatactctgagctccatcctgggcaatgatagcccttttcggattagctggtgggaggatgtctctccagttaatcaaatctcaccacaacaagcactctattccacctctaaccaagaagttatctctacttctattatttttccactgtgttaggaaaatgagtagctcgacattatgtatcaatcagaatttaaaaaatctttccttttggagttgctaccgctaattgccaggttagtaaaatcttacccattctggcaatgagggtgtgccacattttattcacttttttttcaggaacaagagtaagattactggtgactctaatcaccacatacagcagccaggtcttttgctatgacctgggagaggtagagttctcagctttcataatgtagctttggtacaggcccatctttccagctgaaggtaatgtgagctggaactggtcacagaggccctggcagctggcttaacctgtttatataaagacggaacacagccactgattaagagagccacctcctactgattggttttggagtggagcccagaattttccatggagatagcttttaaaagttaggtcagcatctcaatgaaagataaggacacacaagaaagcccttgtgggttgccctgtcttgagaacccccactgttcagcaaggatcagaatagatatatgtgaccagtgaaatgcttctactaggtttatctctgtgaaaagatcacttttcccggagtgatcttgtggactgaggattaagtgggtaagcttgagccaagcttagcatttagcaacttacgtatttccttggctcttcaattctgaaacccttcagagtgaact

SEQ ID NO: 47570 - DNA, 1972 bp, Homo sapiens
gtaaaactaactaactaacttacatagagggccactgctctctaaatcataagattagaatgaggctgtcctttggttatgtaactaggaataatttacttactccttttggggaataatattctctgttttagaataaagttcatctaaggtcttgggttctaggaccctgaagttaaggatcacagaaggatcttaactttcttagggcttactcaaattaagtagctggagctactggctggattcatcaactccttttgagattctttttcttagtgattataggtctcaggaaagaggatgaagcaatggaaggtgcttgaaggaagaaagaggccccacagagctgtgtttttaagagctggctaagagggcctttggaagagggatctcaaagcaaatctgcttgaccagggaggaacaaactcatatatgttttaagtgccagtcatgtgaagcaactctactaggcactttatatgtcatcattttgtttaattagcagggaataggaagaattgaataatgtccttgtttatgtaatttggctataaagtaaaattctgcctggtgaattccaatttcctattgacttttgcgtctcattagagactgtccctgtggctatggctgctccagtgatctttctttcctggaagtttcagtttttacaggctcagttatcataacaaatttgtgtcatctcagttataattaggcttacttaaagggatgttttcatcattggtgttgctccaaatacatatttttctcctaagtatgttggaattaaaatattgtcaatgttcaagggccaaacacataaggccatgcttgtgttttaagtcttcagaccctgaactccataccctggatccttgctgttggagtttccatagggaatgaggctccccaaggcctctgaaagaaatggagcccagccagctgagtcaggctgggtcccacgcctctgtagggccgaagtccaaagcaacaggcaggcagttcttgcaggctttttctctgcagagtcattagaatactttattgtctttttttttttccccactatttcagcagctcgctctatgaggacatattctcctcatccacagaagcccttttcaaacattactaagaagtctgataagaagaaaaaacatccactgatgggttctcagaaagaaagcattagatttaactacagggcaatactgccctgattaccacaggcccagctgacggcaaggttgccaggcagctctcgtcctgccaagaatggtggtggaatgaagcaagcatgtggtttgtattaccatttttcagctttttaaggtttagaaaagagaacgtcaccaacaatgataattcactttggaatgaatacattttcaatgcagtgttcagcaactgctgatgtgtcttaaatcctagagttcatatgcaacattttacaatgtgaacaagataaagcacaggagatgtcaagatcctactatatgcaaataactaagtttctggccaaatccttcttttaaaaaaagaacgaaaaaatgaaaaacctctccagcatttctaagctgctacttacagcctttataaagatagcacaggaaaaagatgctaaagccaaagagtaagctaaattctgccttccatttcctggcaccatcttctttaaagttggggttgattttcttaaatgtttcaagtcataatttgccacaaatgaatcaatctgtaagctgaagttaaatcataaaattcaaatattttaatttgtcttttattatctttttttttttaatttaaaaaaggagagacagatatgggattattcatactttgcattctcctgggtgttcttggaaatactattctcagaaagtcagaaacactaaattggaacaaatgatttgatccttagacaaatttacaaagtcatatggtttgaggatctgcattgagt

SEQ ID NO: 47571 - DNA, 566 bp, Homo sapiens
cacatttccatgtgtcaatcagcttcctgcagaaaccactcctcccccagcttcctgccaacatccctttggcaagaaaagaaagatgggctgaactcccaacacttggcgaaatatcccctttcctgaaagtgttgggtggagggtgggggtgctggaagaatctgtcctcagtatgtatcctgttctatcctacacactttcaatcaatagtgccaccgtgttgggtcaggttccaagctctccctctccttgcctttctatgaccagtgacctgtgcacttgccctgatagctttctctttataaagctgactttaaaactgacaacaaaagtagcagttaacagttacacaagaggagatgaggaaacctcaggctggtgactgtgtttgttcatcaactgacatttgggtgccttctgaagaagcaaagaaacagcagggcacagtgtaatttgaacgagagagacaaggtgctggtcaaagcaagaaaatcctaactggggtggaacgaagtgtgggaaactctctctagaatttcactgattaaccattgataaaataa

SEQ ID NO: 47572 - DNA, 2563 bp, Homo sapiens
ttgagagtgaaaaataatacatttttcgagcgttcaccatgtcagtgtcagaatggcaatgaaagtagttattaaaaaccttagctgcactttcaagtaagaaataaagtaaaacataaattgctttcatgaaatgaagctagttacaatgatcaatggtcaataatagtatgtgttatttattcttctatggagcaaggggcaaagaggtttgaaaatgaccggttaaatatcagtctattttatttaataagtgatagctatttcctacattaaacaaaactcggtctacttatccagagctcacatttcagtctcaaactcagctttggctgaataatcagaagccatcattgtgggccaaagctgggagatttttggtaaggattccgtgacatggtgacacagaagaccaaatggatttggtgaaggctggattacttacacaaagtccaaagataaatttagttgaaaattggtcacaggtagccttgctgtctcaaagggcatttctgactagacaaacagcgtctaccaacatcccctccactgaaataaacagccgagtgttcccttgccacaggctgagtaaatactaactaaaccttcagcctgtatgccagtcggagcaacactccctattttttagcaaaatatttttccattctggccatccaagaaaatctccaaatccaatacacttcaatggagtttttgggcttctcgatttttctcactatttatagctttcagatgttggcaggtacaggactacattttcttcagaataaagttgtaaacggcagcagtgctgtttcatcatataccacacagtattgagtcggtattaaaacaatccctcttctttacgaatgtcaacactgacaaaggctagaaaacaaaataaatgcctcaccaatattgtatcagtggccatatttacattgtgcagagttttgtggagtgaggacgtgggaatgggatcctgaggaaaagcccagtctgttctggggtaacgtctgttcaggtaatagcatttgtgaggctgaagtacaaaagtccaggaggccagatctgccccttctgtgaaactaaggctgtgcagggcataaagggaatgtaacagtgcctccaggcatatagtatttaatacattaccaactgcttgcaaacacgacaccttactggtccttagaacaaccctgggcaatagaaggggtaattattcaccccgctttatggatgaggaaactcagtttcagagagatgacttaaccggggttacctggctagaatgtggcagagccagaactggaggcccaatcttctgatggctaatcttgcttttctttcccaactcacactgctcctccaagaattcagcccacagagctttcccaggctcagtggagagacagtctgttcacatgtaaaggccagtgaataaagagaaagagacagtaaaggggtgggttagagaataaaacccagtattccagttgctagaaaatgattatattgggcaggtcaggaagtgatagtcaggcacatctgaagtgtggaaaagttgaatttaaatcgccagttttgtcactaaccagctaggcgaccttccgtgtcctcatctgtagagctttaaggactccccggggattgtggtaaaatcaccacaataaagcccttctggggtcacttgagagacaacctttaagatcttgccctaggccacctgtggcaggattcgtcaaggaggcatgatgtaaactaaggaactatagcaacagagagggaaaggagaagggaaatatggacagggaaatagttgagtccagttatggtggcaagggtgggtgtgctgcttatatgggatagtaaggagacatttgatggataggtgacacaaaaacaaaatatgtgcgaagttcaaccattaccaagtcagttttatccatggagttaatcagtctggacatttcaggtcaaaatttactcctttatcctttaaccaattatcaagatagttatcctaagtcttccttctttccctctccccttcctccctccctccttccttccttctacctaccttctttcatcctttcttcctttctgcctctctcccttccttcctttctccctcccttccctcctgcctttcccttcctctctccttttcttccctctttcctccctctgtccctcccttctactttgcctgcttgtagacacagacttctctggagtatgtttcaggaggggtggatttgtttgtctagggcagggctgtcaaatacaggtcatgcatgctgccacgcccctgccatgacagacaatgctaatcaatcactgctctctgggcacgatctcaggattcatttcaaggtgcatgggttgcttagagttggctcaagtgacgagagctgtttgccaacataaatctaggacacaaatggatcaaatatggctttccattttaaaaaaggttaaagtatactagaaaatatacttcctttaaccttttaaaacattccacccccaccccccactgttttagtctcagcaa

SEQ ID NO: 47573 - DNA, 779 bp, Homo sapiens
gaaatagttgacccaaaatataaaataaaaatgtccatgaatccatactgatataaataaatattgaataaatacatcaatgggagaggagagattcctcttccatgcaggagaattttaaataatgtatgtggccactcctctatcaaggaggtagagcataatttccaccatttaagtgtgggctgcacatagtgactttcttccaatgaggacagtatggaaagaagaaaaagagtaacttcatagtggagacaactgacaagcacttcctcagccaggtgatcaaaattatcaacagtgataagtcatgttgataggatgtactcatggtatgatgtaatgagaatggcactttacctctgtggcttccttttccaaacctcacaactttggactaatcaggactaaaacattataccaattcaaatcaagggatattctacaaaatatcttaaccatcacccctgaaaactgtgaagacaatcaatagcaaggaaagtctgaaaacctgttataatctagagaagcctaaggagacatgaggctaaatgtaatgtggcatcctgcatgtaattgtgaaacagaaaaaggatattagatgaaaactaaataaatctgaacaatatgttgactttagttaataaatatcaacactggttcttttattgtggcgaaagtaccatactaactgaagattttaaaaatagaggaaccaggtacgggttatatgagaaccctctgtactatctttgttgcctccctataaatttaaaatt

SEQ ID NO: 47574 - DNA, 795 bp, Homo sapiens
ttttgaataataaaaaccagtctcagaagactttgtacaatatgattccatttatagaacattgagaagcatgtcaaaagtaaacagaagttttgtttggagatatatagacattatatgtatactggaacattgaggtaatcaaatgttatataaacaaacttttttgtgttttctttgaggacttgtagctaaattttatagtttttctctcttttccagtttatagaatgttagcttgcatttttcattatgttgagtatgcctgcttctagcagtactcccccatgtccctgtaatttgctgctttttatttttggtggcctaggaaacaagataactaaacttgttagaatcttacataagacaagcagtctccagatttgggcctggggaactctcctatgagaaaattgcatgaccttttgtacatatgcaatgtaacagtcattcataaaacaaatatttagcaatttcctatcacataccagacactattctgggttaaagaaatgcagcaaaggacagtaaggcaaagtccctaaacttatgtaacttgctgtctagtggcatatgtttgggctcttaactgtattttaaataggcaagcctgtttcacaaagacaatttgggtgaacaaggaatttctgtacacacaaatacaggcaatattcgcattccagtgtgtgtatgtagaaatataaagcccatagccctgcaggtgccagctctatgtgtatgactgtagacgatgaggaattgctcgtagatctgataatgatgctacatgaaggt

SEQ ID NO: 47575 - DNA, 791 bp, Homo sapiens
gctcactgcaacctctgcctcctgggttcaagcggttcttctgcctcagcctcccgggtagctgagtagtaggtaggtgtgcaccacgacacccagctaatttttgtatttttagtagagatggggttttaccatgttggccaggatggtctcgatctcctgacctcgtgatccacccgccttggcctcccaaagtgctgtgattacaggcgtgagcctctgcacccagctgtcactgaagtttttaagcaagctgttttagttgttagcagggaggtggtggtggggctgacattatattatcatagttaaaatttagaaagatgacacaggctacagtttggaaaacaaatgggaggggcgccagtttggatgtggttagatcagataaaagatgattgcaaaactccaggagaaagttcatagcaactgactagaaaggtaacggtggaagtgaaaagaagtggctgggtttccagggctgaaagagtgatcagattttttcagcaaatgcctgtccagatttaggtatatttcatgaaggcaactatagcaactcctatacttcagtagaatattccctttttcccatgttggaactccagatagcataagaaatagccgaagttttctatagctgtccttatttttgctttcttcatattggcttccggaaatggggagtttaaaaccaattgactttgggtgggcatagatttatctggattatttagaagctgcctggcaaagcaggacctcactctctggaggatactttttggctccttcct

SEQ ID NO: 47576 - DNA, 1846 bp, Homo sapiens
gcattacttagtaagataagtaccaaagtattgaaatttaaattgctgtatcctggtaccacccaacatctgtagtgccaacattggcaaaaaactgtcctggtgtaacaatggggcatttaaagtattttaaatttttctctctctcctcttctttctctcccttttagaatgtggaaatggtgcaataacttgtaaagttaccattcaagtgtttctcaatctgtttttcttcatatagaaattatggctatatttctgtccagcgcaaatctctgagccaacttgggcttttggttattctagacaggttttccgtaactccaccactttctctcctgctaaagaaagtataatggaatgcaagtgagctaaccttgattttctgtatttttaagagtaaatcatttacaaactcagtcctttaattatgactagtaaaaaacaatttccttgcaacacgcccctctactgattgcaacaccatgcttgagagcctctgttcttacaaattaaaaggcactgccagaatttttgtttttgttttaaatttgcatcaagtaacagtgtgcttgggattatttttttaaactacaaagggttgctttaattctgttcattttaattcttttttactttcaaaaaaattttttcacctcataattttaaaaaaagtgctatattgagaactgtatgtaacttgactgattattttggcaattatagcatgaccagctcatctcagttggcctgggaaatttttacttttagcactgaagttccatatcctaggaaatccttcagctctgggcaaatgggacagttggtcaccctgaagcaggtggacataaattgagaatgtatttatgcagaaatcttggacatcaatctaatgttctcagctaaaaacggagagatctctccattgctcaacttgctgattttctaggttgccattatagtgagctatcaaaaacacacatcttaatcatgccactgcattgcacaacatggcttctcatccatttctggattaagcccaaactcttgaaagtggctcatctggccttatttaatttagtccagtggttctcaaactgtactctggtaaggaccagctagataatttgttaaaaaggaagattcctgtgcccctggttcaaaaggaatgaatctggatagtagctgaaaaacattttttttttttttggttttgttttttaacaacaacaacaagaagcttacagcgggtcattgtgttttaggtggtctttgaacaatgttttgagaaaaaacaacctagttccttttttctttgataggtttaatctgttgcactctccccttacactgtattctctgggtttactataatttctttaggctttgtagtgttccaggcccttaacacacatgccgggcctgctctctgaatctctctcctacatttgtgggctgatcagatttctacctagaaacccccttctcagtgaagcctttgctgaagcccctgttagaattttctctcccattgcctccatcagaaccctctctcctccagccaggtgcacatagcatgacattgtacttgcctattccttgtgtgtatctccctttaaactaaagtccccacaaacctctcatttatcttatttatgattgcctccccagtttccagttcattgttgaacacatgttaagaggttaagattgtttactgaagaattaaattactttgttaatggagagattggtgtcacacaatgtcctagctgggctggaacgtagacttatacatctggtattgggttactccctttctgagtcctattgattatatttattg

SEQ ID NO: 47577 - DNA, 759 bp, Homo sapiens
aaagtcttcttaaatactgtttggtcacacccattcattagtctgggcatacttcctttagggagtaccaaccagtgccttctttattttatattaagggtcacagaggatgaagtttggtgaggcacttcagggggattttccaatgggtttgaatgagtcttagagaaaattgtatactccaaactccttggagaagagcttcctgggataaatgttaaatctgtatcagaacagagcacagctcttgtcactgtttggtgcctgggtctgctgctggaaaattcctcttgccttatgctatcaagtgagctagctaaattctggagaaagctgctcataaaactgataagagccctctgttaaacaacctaatttgaactttatcccagagaccttgagaaacagggtctgcacttttataatccaagaattgaatatggtcctgcacagttgggtaacatttgaccttgaaacgtcgttctaaaagtcgtgtttcccccttgctggctttgctgttatctgtgcatcagtgaacactttatcatagtaacgcttcaggaatgtgcagaatagttgaggagcttgaatgccacagcagtttcaagtatgctgggctcttgctaccagctcactgggtcggtcgctagaagactgctatagcacatatgctgcagaactgacgttcattaccaggtcactttcaaagtgttggctagcaagtctgtagttagttcttatttttctcctatgatttct

SEQ ID NO: 47578 - DNA, 655 bp, Homo sapiens
ggtgtaaaagcttaggcaactgttaatggattttaattggttcccccaccactccttctcccagtccgtcacagaggaaacaccaaagtattttttatccaagtgctcttttcaagtgacaggacaagggggcagtgaaaagtgtattttcaccagtaacatggacctagccatggattttgtaccaaaatgacatgggaataggtaagaaaatggctgaagtctagggatatatttagatgtactacttcctcctccacttcaacaaggtggtatcactgtgaatacagagtttggcagagatgatacaataagaaagtgacgattcagtgtttgggaaattccagggaagctggatattaagggaaaacccataggtaggtatttgaatccaggtttattggtgaactgtagactcccaagccaagttccttggaaggattagtcaacagtgtcctctgatataaaaatgtcctttcagtggctatgtgtgcacggctgagaggaggctttgaccatggttcttcaagttaccactagaaataggtttttattcaaatatttatgagtaattgtagtcagtggaaattgttagtaacagggagatgaatttggcattgcattttgaagaatggaacaacttagtatttaccct

SEQ ID NO: 47579 - DNA, 2267 bp, Homo sapiens
actgtgctagatttaaaatggctctgttatctctgagacttgggaagtctgtttttaatgtataagagaaaaggttttgagttgtacaggattttgattttttttccctgtaccatgcagctcagaagtaaaatagtttaggtcaaaataaattgaacaagaagaaagaagaccttgcattctagtgctagtcttagtaatttctagacatatggttttggacaaattaattgacttcttttgaaactctgtttcttcatctgtaaagactatttaaattgaaatatagtggtactatttacttagtgaaggacaaagagatgtttacatactgtactcaaaaggtcgaacagatgggattattttagattgaaagctcatgtgtgggagtcatgccttttgtaagccacataaattctcatggggtctggtaacttactgtgtgcccagcaggaacccaaaaagtcttgtcatggtgataaatatgacaccatttaataaggtcacatttaacacaaggagaaacttgggaaagaaaacaaaacaaaaatctagacctcatccctaggtactttgtatgactttggacaggttactttacccctctgaactcttcaattgattcataaaaagaaccaaatgcttagaaggggagggcaggcatataaatggaatagtagaaaagattactgagcccatgaggtgggaagtatagtactctgaaatgtatgacaccctgaaattgttggcctcctatatgtattctcttcaaagggagagactccccagaaaaattactgttggacaatacttgtcaagacatttatgggagctgctttggatacatggtatgcttgaattgagaaggagcttaaagatattttagattaacctcttaattttacacatggaaaaagaaagtctcaaggaagttatacaaattctttaaaattatataatgtgtgagagagctagcactagatttgcaaggctgtgagccattggggaattcaagtttgtttgttttgacctattttgcttttttttgagtttaagtggcagaaggtaatcttattttcttggtgccttacttttcaagaggccttgtcaatgccccctcatttcttgtctgtagaaactaaataaatcaaaaaaggaattaatttcacaaacatattatgtgctagccattcagtacccattgttgggcattggtaatacaaacttgctacaaggcacttgttgtccttggatagatttttgttttcattccttcacattgttaacattgagcaatctgcttagtcaggaaaaggcaacacattgtaaaggtatgcagatataaaaaagtaggagtccggtgtatgattcattcctatagtagccttggtgtagcccagtccaaaggacaatttcctccattagacattaactaccatcaatttcttctctcatgaaataaacagattctgtcttggaaatagaaattttctctgctaatgagctttttactacttgggagtcttctatttcaatctgagactaaaagatagaaggagaggcttctcagggagcaggaaatggaaatgacagtagaccctaactccctctccacctgtgcatggatatggaaaagggctttgaaaaaggcaccacttataatagcacagtccagggaactgggtgtcaaagtcaatgcctgtgatgggagagctgctcatgcttcttacaatgtcttgaatactcttaatccttttgcaaatacttgcttcgttgtaagacaagtcaaagcagatatgacgatgtcttagctgaggaagaaattgtggcttcttggatgcagtatggcaaagaggattgtcttttaagaataataaaaaagagtttttttcatttaaatctggtctaggaaaaatatcctcttgaaactctttttactattagttttgttttctaaaaaacactgatctgaacaagattaaataagcaaatcaatggctttctgggtttaaagcaactgaattcctactgatctccctttatactgaaatttcaacatagattcttcacaagagaagaaagatgaactgaatcccatatgacactcaagaagatgtaggacaagcaaataaaagtggtcccaggggagaaaataatattcccagccctgcaaatgattcgcttctgccctatagtttgactcttccaaaatctggttttcaaaacaaattagtccacctctgaaaaaggcatgccgactttccaac

SEQ ID NO: 47580 - DNA, 781 bp, Homo sapiens
ccaaaaattatcttctaatctccaatgataggcccttttatacctttgatgtggttgaggcatctaagtgtcatctaaaaggcctcggtcactcactttgaaacatttttgcttcttggtctatccacacactctggcatgtgctggggctgaaacctccagtttaacatcagataaatcatagatattatcctgaaaatgacgtccttttcctctacttcagagtgctctttctagagtacaaatatgactgcctgactctcctgcttaaaactcctcaatgagttctcagagtccttgctcgtgcaatgcttggaatgtaataaggaagacagacagcatgagatagcatgcaaggacacagataagcaaagtgttgcaaaatcaaacacgtagaatgctgagatagggaataaatggggaagaggtgaggggagaggagccaggctctctagctggccttagagcagcagcatgtaatcaggaatgctaagagcataaactcttacctgagaatgcctgggttcaaattccagtactgtcacctgttagctatttgatctttgaagttacttatcctctctgtgccttgggttcctaatctgtaaaatgggaatagtaatcgttccctcttatgattgttgtattcgaggagttactatttttaagtagaagaatgcctggcatattataagtgatatataaagtttcttaaataaatgtaaaattccactggcttttcctacaggttttaggcccttgccctgactgacctaaattt

SEQ ID NO: 47581 - DNA, 1154 bp, Homo sapiens
ttaaacaccttaaacggtatattaaacataactatttttatgactcaggtataactataaatataaatgtaccaatgcacttatggcccattaaaagtttgaagcagttcaccttttcaataaatctttgtattatctcaaattactatattttatttgtctgcttttagtagtttttctgttagctattaatccttgccattcttggggtgcctactctattactcagttccatctcttttccttttgcagtttctaatctgctatggtctgggaagcacatagctagcattcttaaaattttgtgaaaacaggagaaacatgctttatgcagtgaatgagctttaccgtctggatgtcaggaaaactatttctcttgcccagaggccttatttgcttatgtagtggagggacacaaattatttgctttcagatgacaccagactcttttcatggggaaattctttgatatctgataactccaccactaatgttctaggtgctttgattctctgcggaatgtagaatgaacacactcgtaataatacaagtgcttttaggcatgcaaaatgcacatcctagcatacattctgaggtgcttatagtgcaaagaaaatgtatagttgtcaggaaaatgaatgctcaaagaattgacacataagtattgtggtgtatatgttttattttaatatgaacttagctatttttagttaaaatgggttagataataatcaatgtatttgtttacaccttctaaaaaggggagttaagccaaacttcactggcagagaaaaaaataagctaggtgaaaattagagatagacaacttattgccatagagagagaagtaaaaatctcaaaatctttacaagcctgagaggattgaggaatctcttgctgagtgaaaaaaaaaatttagtcacttgaattaaaatgcttccccttcgggagcaaatgaaaaatttaatgtttttctgacgtagtcacacctaatataacagtctttcctttgtaagagaattctccatcttaaaatcctagaatgctctgatgtccaaggcatagactccttaacaagcattttcattctctttttctgatgcaggaagcttctttagtaggtcacaaataaactttaattgcattttgtaatt

SEQ ID NO: 47582 - DNA, 1307 bp, Homo sapiens
ttgttcctctttaaccttttgtacatcttttctaagttgttaatttgctccagtgttgttgggatagttgtgtggttccatctgcttctctctctcactgtgtgtgtgtgtgtgtgtgtgtgtgtgtgtgtgtgtgtgtggatggctgaggtagctggaatatgagaggtgagttgtggaggagaaaattgagatatgaaggtatttggtgatgtatttggggagttgatatcaaccttgagagctgactgccttcagcttgactgataacagttatttttctttcttctcttcttttcaaatcactaaaatggttaagggtttgcaggatcaaattaagtacacttggtaggaattgcattcatgttgcaatgatctctgagaacagatttagccagctatggagttaggttccgattcctgctttgtcctcacatacagtagtttgtttacctcttttccgtggctaaaaatgaaaaacagtaaacacagagaccatttgctctgaccttttccatctttgcgtattatgcaacaatttggctaactgggcagaaagtgacagcatttgactcccagaagagatgccagttgtgtgtatctcattacaatgttcaactagatcaacttcactgtaaatattaaagaagtgcccctttaaggcccttactctgacctctaatgcaattcatttcacagaacatgaaaaacaaatcaccagaataaacttcctgaattgtatttgtgagctaattctcaatctacttataaatattattaggagtattggctaaatgctaccatatgttaaggcagaatttgtagaatcaaaatgccatacacatcacacaataaatggagttcactgcttctatcatccttagttattttaactttatacttgtggtgtgttatgaaggctatttccccctaaggaacatgtgcagtgtgtaaattattaactcgttaattcctgaggtccttaggcttcaaggacacaaccgtttatttttctctagtttgctggtttcataaacgtggaaactggaagacttacagcaggaaattaatgctaagccaaaaatagagctcaggtttttgtttttagtacaggattgaagagcttttgcatggaaataaatttatgctatttgtaggcatgatatcaattgagattagaaaaattgtttctgactgactataatatttaattgttttaaattactttaaagtataaatatgacattttggtttggggaaatgtattgcccttaaagcactatcacttaactggaacttattcaatg

SEQ ID NO: 47583 - DNA, 1014 bp, Homo sapiens
gtcagttgcttaaaactacaatatttaatttttgttcaggcaacacgttcacaatgggttaaaaaaggactctgctcattgaagttattaaggaacccttggtgaatagaggcttcatgctttcatgatcacagagacttggggaaaggacacagcaaaccacgtagtagctcttaaaactttggcccagaacagtcatcacgtctgctgactgaagcaaatcagtcatcaggccaggccagtcttctatagaaagggatgtgcaatcctcccatagggaagtgcactgaatattgtaaacaacaatacaggttatgacaaccatgtgtccttaacaaaaaaacctaaataatgattttctcaactgtcatttcccaacatattgggtgacaaaaatttccaaattgcatcattccctactgactccctgaagtggtagtgttctctgctggcagtttaaaatgagaactgtctgctttcaaggatagaccggctgcgggtaggattgatattctaccatgaaaatgcagcagcttaaaggagccatgccagaatactctccaccacttaatactttttattgcttttgacaacttaaactccacattttttccttctctaggaaaacatattggtaactagacatatacataacatagattggtataatgatgatgccttttatgattcaccttaaccattctttcgtgacccctgccatcaaaaacattcagtgacttccagtggcattcctagcatttttgacaccttggctggatcatttttataacacccctcactttgtgatgcaattattttcatgtagtaattagcaatcaatataatttttaaatcttctgttttaaaacaaatgaaaagaagtgattttgattctaaagattgtgcaaatttgggatattttatatatgaactaaaatttgcacttatcaaataaaaaatgttatacttgcattttgcatttaaacgaaaataggaaactccaagtgatcccat

SEQ ID NO: 47584 - DNA, 2839 bp, Homo sapiens
acaatgtattattaaaactcaatggtaatggcagcaattgtttaaaactaagaccagaaatgatttttttttttttttgaggaggagtattttatcacttcattgtttagaaatgtcggcaggaagtgatgattagaatcagaatgactgggttttattatagctttaaaattttttatagacagggtaccccctcattgtccatacccagaactccctcatacttggtcagtcactggtgactcctcagtgtttacataattgagtctaaagtggtgatctttagcatagttctccatcatatggcctcaacctccttccagcctactcctccacagttcacctattgcgaaaataccccatcatctagaattgtgaaaatattctgttccctgagccctcctcttaaaaaaatgcttctctgtgtgtttgtatttctccctctgacaatgtaagtgtaaagagcacaggctttagagccaggattttgtgggactggattttccctctgcagcttataaattgtgtgaccttggacaagttatccaacccatctgggcctcatcctcctcatctgcaaaaatattgattacagagcccatttacagataccactggatgagatgagaacacataaaatatatgttaaattgtcttatccctccatatctttcattattctcccttaataagttttgcatatctaacagttacaggactttgatcaaaataggcctgcatagagtttgaacaactgaattgaatttattgggcttcattcatgatatacaagcttccaaagtcacatggtctaagcccaagctccagttctttctacaattgcctcagctgtgagtcttgagcattgtcataagaagagaatctaggatatttctcatttggcttcagttcctcttcttcagctgtccagacctctttcatttagaaaaacactgtgacaaaatgaggaggctgcagaagcacaagtgggaatggcagctgaccgcacggggagaaggtgtctatttcaccttcaggaccatcttagcattttgagcagctcataggtcaggaatgctgttgtcatcagggttagagctatgtcctgaataaataccaagttaggaggaagatgactcagagctgcctaaacctcatactcctctgatattttaagcaacagagagtggcaagcagctgttagatatctttgcttctttgttcaggcaaagcttagcctgttccatttggaaagaaaatggtcataatttccagcccattttaaactcttccttcttagaattgttactgcacacataacctgggtcacacaacttagttttctgcaatctcaactctttttctaattatttcctcttccccaaatggatattaagtttgttgtggaaagagaatatgccttatattcctcttatattctctccaaactgaaagattagcctttggcccagagtaggtagtgcatacaagcactaatttcatttatatgggactttaaaatgaaaaattacctttatgtccattcttttgtttaaacttcactacaacttcataaaataattgttattatctttattttataaaccaggaaactaaggtttagagagattaagtatactgccaaggataaggatcatacagctagtaattagcaaatcctgcatttgtgtgtgtgtgtgtgtgtgtgtgtgtattcacctcataaatcgtatcttaaagactcattcattaatgacagcttaattgaaaacctttaaaaaatatatttaatttttttctacttattaaatccttgttccctaacttgtttttattgctctgaaagcagctagaaaaccattttgtaatttgcaaagatgtagatctagaacctaattatttcatttgtatgcagaaaagaaaacctgtacaaatgtaagaagaaatggcacaggaaaatccccaagtaataagaaaccataaattcatttgtattttaggtaatatgtttatggcagatatttagagaattcacattattttggggcatcattatttatctgaaagattaggaagggcgtggaagagtctgtgcggttaaggagagcaaaataggtgtaaataatatcaattggtagactcatttgattcagtcaacaggttttatgaagcacctgcattttctgtcatggctggagagtggttttcaacacatgttaacatttgggtaggtcagatactctgtgagttcaatcaagataaccctgtttacccactaagatgactcagagagctgctaggacctagttttttcatttcggtctcgtgctgcaaatggtcagcaactatgagattgatggaagacatttgcctcaattattatgctatgattcatagattcctactatagaacataactgagtatttggccttcctctttcagttggggagagtaaacaaatttcttatttatatcaacaagtcataatttgagcaagttaaatattaaaacctattgaaacagaaaaagaagttaagtttaggtgtggataatgtcaagaacaactatttagtctttatttgcgagatgatgggcaaacattttatgctgcttgcaaaattaatgtcttcagtaatttactacaccttttacttcattcatgacaatttcaaaggattaactgtgaatggatatttgaggaagttagcttactggatcaccaaagagtggcccaaggaagggtggggagtagaaaagtgctcaggagatagctgttgaagctgcagagaaatctctatttctatctcctggtttaaaccctccatcccactcaatgtg

SEQ ID NO: 47585 - DNA, 663 bp, Homo sapiens
gaaagaaagggctagagaaaacatcaaagctttgtaaaattagacttcaatccagtttgctgagtggaagataaaaacagtattattagggctcaagagcccctcaatctagtggtgcctctgctaaagtgcaaacctaagaacagtacatctccccaccatctggaggggtgaacatcagagacaatgagaaaaactaagaggaacaatgggcagtggcagcagagggacttggtgctctaaatcctgaaagaggttggaggtcatgggtgaattagtgccacaaataaggcagtgatgcatggtctgggcagagtttatgggaacaggggtattttgcaacagcatggacagcagcccatgggcaaacatagtgcccgtggcatagtgctgcctacgtgtgtggcagcatcaacacaggtgagcaaagggtcagtctgagccacggctttagagctgcaaccagatgtgagatggtgctcccctctgctactcccacttcatctgtcacctccgatctcatttttcagcccccagcctcttttgtaataagatttttgaaagacacagtatattctcattggattggtatagcttaaacacaatgctttcctggggtaatcaacttctaaacctttcctttagtactatactaatattatg

SEQ ID NO: 47586 - DNA, 901 bp, Homo sapiens
ttgatgtcctgtggacatttttgcatttttatattcttcattaaacataaaacaaagagctttggttctgaatacaagagaatataagttgttaagaccattaacaactcgttaatggtcacaggcattctggatcttttcccatagcttctggggacacactctttctcaaatgctgggtagaacagtaagtgtggttaaggctgacttgagaatgaagttggaattggatgcagcagtttcacaatgacatcaaggtccaaggtcagggaagtggcaagacctttacccagcagagttaactataagccataaaagtatctaggagcagacctgagtgaagcacgtgttcagttagttattgaaacaaaagtatgtagcttgtctcaagttcctggtaactacttcagggctgattgactaggtatttctgtgtgtatgtaattgcttttctccatttaagaataaactacaaggaacagatactatatagcttctggaagtttatttcttctagcaaatggcaactttagttttttattggttgaagcccttgggcacgttttaaaatattgccttgtaaaatgtgatgagtgtattcctaaagctctagtgtcttaactcagctctccacagccccacattccttttacatgcatgtctcctaactggacattagggaagttttttttctcccaacttctcattgataatataaataaccaccacttgtataacatagaatatcttacaaatactgtcatatgcctgacctcattggtccttattctgcgaagcaaatattgttattactgttttacaaatgacaaaagagatgctgagaaaaatggatttgaccaaggtcaagcagttaatgaataataaaggtgaattcagaatg

SEQ ID NO: 47587 - DNA, 1004 bp, Homo sapiens
ttattaaattctataatttccttttctgaaagtagttcctctgtatggagttggagaaagaaaattacattcaatattcaccttaactgaaaagcagctgagtgtggtggctggtatcctataaatagcagatctgtgacctcattcctgttctctctctgcctagctgtttccagttgcaagtagaatagaaaattgtcaatcatctgggcatataggccagcttatttggataaatctgacccagtccttgtttttcgttagtgatgcaggtactgtacctctatttaagcaaaagccttctatgctctgtgtttgttgctttttgcctgcactgcccaggtaattgcagttatgtggaattggcctaacgtgaccttggaaaactgcttaaccttttggagcctcaggttattcatctgtaaagtgaatattgtagctgcctcttgctcatttcaatggaatgctttgagaattgatttgatagtgtgcataaagcaagttgacctcctcaaaaaggaatacaatgtatgattttatttctggtctcaaagctagcaggccaggcctctccagtacaacgtggtcattatctgtgtttttggactgcctggagaggaaattcacaccattcagggcaaaacaatccactccagtttctaaatggtggggattgtctatctatggaacacaaattcaacagatggttgccaaccttccacttgattttgtggccctttaaactgtgttcattaaaacttcaacttgcagacaactttatagagacttggagggatgtatgaatgacagtttttgatataaaggatatagcccatatgagacatgaatgtctctgattctcagaagacgttgttaaattaacatgtaaaacagcaaacaaatactctatcagtaactaaaagtgcatgaattgtttcccacatgtttgtgaatatcctgctgatgtcaacactttggaacttcactaacaagtatgttttgaa

SEQ ID NO: 47588 - DNA, 1344 bp, Homo sapiens
gtcagatcttgcaagaaacagtactggttgggattgaagagagtttattagagaatagatttagacaaatgggctcagagaagccagagtcttgaagctattcattataaacaagctattagtctttataagtaacctgtttagttggttcagtcttatctttaagaaacaagtagtttctggagcaagtagctgagttaaatttgctttgctctcagtattgtttcaaataggtacagaaaattatattgctttcagttttctttcccctttcctctccatcccccccacggaacttgtctcaggttttcagagtcggactgctagattagtacaataaaagtgttgtgaaactagggctgttgcaaggacttagacctcaaagccactctatttgagctgccaataataggccttgtcctactgatttccaattaaattagcttttaaaaacatgtttattgattgacatacatacataattataatggactattttccataagtgattattttaatggacatttgtgttttatgaacacattagctacctgaccaaatagcaagcaagttatcttgaattaatgctgtaggtttcttccaactactaagtaggcaggctgggatccattactgtaggctgtcaggggagaaaagatgaattgagttgatggtgatgacataatgaatgtggcttcaatgacacagtggcaaatgttaaactcactcactgtatgatgaaaccacatcattagaaacaatagcaagggagaaggtaaatcaagaaaggagacaaatcactcacaatgcatgagaatatctggaagctcctcaatgcagcatccagaacttcaccatggttgaggcactaaggaaataagtttctaaaaacagtggctttaaggagaaaagaaataatgaccaccaattgaaactaggacaccctagggtcatatccaaagaagtggaaaatgtagggtatgttagtaaacagggaatttcagccattacgtttgttttatctagagctagagactactattattgtcacctatagttatttgagctcactggtgccaggtaggtggaaaccagagagacaaaggtcacattcacagaaaaaaattggactgttataagtcttagggcatgtcaagcacattatgatcacaatgcattaagaacaggcttatctgacccatgaacaagcaccatggcaaaatctgagagctgatttaagcaacacttgagctgtgggagtaaaccaaaatgtataaagacagtatcatttccatgaactcattaaaaatgacttcatttgaattttaattttggaattgaatc

SEQ ID NO: 47589 - DNA, 726 bp, Homo sapiens
caatttgatagaatcccgtgattctttgaattcatgtttgtttctcatgttgatatcatttacgtacttagctttgttaatcttcaaagtcattcactgctcaatgagaacaagcattttcaaactctactggaatatttcatggtaagcatgtctcctctttcctcatttatttacataaagatcaagataaatcaggatatgattataggtggtgtgattcatcagctgccaatcaaaagctgacataaaacctttggcagaaagattgaaaaaactatttggaaaacaacatgatcctaaagaagtgttctgaagagtggtgatgtcactggtctgtaaactctaatgaacttcttattcaaatatctattcctcttggttagatacattcaccttatttttcttgtccagtggcttaatcaactctatgctgtttaagtgtgatgatttgtcttttgtaaacctatgaactagaatgactcacatattttttcattttcacttatgaaactaagaattaaatcaatattcatctcataaacacttgccagctatctattatgtgcttcatgcattggtaagaattactattactgtaagtattataattctttcatatcttccttaagatatacagttatctcagaacttcacacttaatatagtatttttctaatcactgaattgattcaaaattgaataaaatcttttcctatagattaa

SEQ ID NO: 47590 - DNA, 1702 bp, Homo sapiens
cggtgagaagaaattcactcagggaagtagagagaaaggccaaagtaaaattagcaagcatgtgaaggggacaaagtgtgaggaaagatagacagagagggataatggttcacagacaggaagatgagtgtttgccgagacaaatatgggcttcaatgggtaaaggagttttctgagtttttgtagtgatttttccccccgcgagatcagcagaggcctggcacaaaggtttcaatttactgtgcaaaggccactgtcacttcctagcttttgccctggcatttgccaccttccctgtgggagttgtcagctcaggtaatgcctactgaatatcctaattactgtcattttatccgtggctcactttagggtccaggagaaacaatatggaaaccagtaaagctttttttcaacatgtaggcagaacctgcctgcccttatgtaaaagtcactcaagcagtacttcatgcattgttacatgttctcaccaaattactgtttctttgattttggctttaagttctctactttcagtagcatcactgcctttatcatattctgaatctttatagcttctccatcatttatttctcctaaatttccgtatagataaagcagtcttctaaagcgatgtttactatggctatagatgaatagcccccttttctgttaaatgagctgaagtaaaggagaaaaaaaatgaaaatttcccttctatttccattaacaaatgaacttgcagcaagtctgagtgttgagtttaaaaaaaaaaaaaaaaaaaaacatttccccctttccccaagtaactcaatgtttttccagcagtgaggaaaatgagttatgcacacaactgttcaaagttacctcatcacatcagaatcagaagggggtggggaaaggaattattttgctgtgaataaccaggaagtgcatttttgcaggcaacagttcaggatgaaaactataactgcaaattagttggttttagaaaaaatgtaaaaaagaaaatgttgagttacttgtagagataaggttgtaactgtgttaggtctatttaaaacaagttgaaaatattgctttttttataaatttgtttttctccagattatatccataaattatttcttgaatccagtacatagaaaataactgactactgatttttatgaaatctaccaattacattctttaattactttgttttactcctccccctgatttctgaacacaaagaatatttattttgccttttagattcacttctagtttaactgcttgcttcatgatgccctaacagacttaaagtgtgactgttgactcagcttcacctgaaccgaacatccaactataggtgtaattaaaaatgttgaatggcatcaagtcaaattgggaaaaattattcagtttatggcagagggaagtaaaaaccctcttaggaaaataggtaaacttcaaaaccagtcccttagacttcaattcagagaagggtgtttttcaaaccttttaatttcactcgaatgccttgtatgtcaatgaaacgtgatattctttttaagagcattaggttgaatataaagaaacttttaaactctccagggagtcctttcattaggggttctttttacaacatctggctagtgatttctaacaggctgaaattagtgtctttttcttttcaattttctatgctaaaactattagg

SEQ ID NO: 47591 - DNA, 1012 bp, Homo sapiens
tgttttgtctcttcagaattttttttcttgtcttctggggcaccttgcaatttattttgaaaaccagacattttatattgggtaataataaaagaaatgtatggatttatgttatgtatgagaaattgggctgtgcttaatgtttgctatagctgttgttgccagagtttcaaattatcgtagtatgcttgttttagtctcctgttgactttggactgtcctaagtactccccatcagagaaagtttgtgtcttacaactcttccagccttaatctgctgttatcatactgaggccttgttagtgtgatggtaaggtggaacatttgattaccttaaggttaagtctcagtcttttagaatgcttgtgtcttggtgctgtgatattcacaaatgtttccccagtggtatatctgccctctccccctgacatcacctgcttacttttctggctatagcattcccagtctatttgtttgaagccctcacccctgttaactatgttttttacccccttaggtgagccagaaagactgacgagaactggagtgggaggaattcccttccctaagcaaacataaagctctgggctctggaaatgttccaggtaaacagatctcagctgtgcttttctgtatgtacctattgccccagattttgaggtgatccctgtttgccctgcaatctcagttctccaatgatcaaaggtcatttattttcagtattttcagcttattttttgtaataatgtaagtgacaacatccagtctgtttgtgtgtcagagctggggctggaagtccacagattcagagtagccttattcataattttcaaacatggaaacagccaaaatatcccttcacatttgagcagataaacaagtcttggtaattccattgaatggaatattacccagcaataaaacatccaacaacatttttataagtgaaaggaatcagacacaaaaaagtatactgtgtatgattttatttgcatacaattcaagaacagac

SEQ ID NO: 47592 - DNA, 648 bp, Homo sapiens
aagttctatgatgatgacgacagatccagttgagagctcatttgctggcagcatcctaaataactctgcttcatggaagaaaggctctgtaaataccaaagattaagatccttggtttaagactcaaggaatctgtttacaaggtaagtaagcaagagaacaaaaacaaaacatagtttatacaaggcccattcaatcacaatcttatcttttcaatttcaagtctatcccctttaagtttccatgacataaatatcagctgacatacacacaaggtgactcaccttcttcccattaaactaggttgagattaaaaacaaacaagcaaacagctggaatgtggcacgtgggtcagacccttctgagtccagttgggtaactcagcagagatcagaatgatcttcaaaaaccaacaagccattggcacgtatcttcaggcatgcttgaagtctatggggccaaatggtagagtatcctggcagagccaaaaagtcttcttttatgacacagaaaagaaaacttctttcaaagtagttatgcaacccaggagaacacaatgcatccactgtgtgtgtcctggggctgtctatgaacacatgatttcatatttttgtcctctgtaaacttcagcattgatgatgaacatta

SEQ ID NO: 47593 - DNA, 911 bp, Homo sapiens
ctctgagcacaccatgcagggcaaagaacattgcctggaatttctgtcctgcatagccccacacactttctcctacttaagaatggctttgcatattcaccttgtcttcattttatggtttaactttcaaatggcatctttttttggaatatctatggtgtgttgtgctgtctgacctcagtccgatgcagtgatttcaacctttttaccctagaaagcaaacagtgggtgacattcgctcaccaggatcttatttataaagccttccgttctctctcactcagaaaaggatatcagaaagcagataagtgggagtgatagttcaggataaccttgacttctaactcacaaacaaaagtaaatcatttgctaactttgaactattaatagtaacaaattacttgcaacagagctcaggacagattgtgaggcacccttggatcttgacctctgcgcctagtggagaaaataagtggttgtttgcatctcttaaatttctcatattgaaaagaatagtaacacacatagcacataagcaatttgtaatttgactttatgacggagaaagcaaattttataccatgaggaagacttctgtccttaaacttttaaagaaagcaagaattgcatcgactctttgctagtgggccattttgtctatgcctataaaggaaaaagagaggcatatagattattatttaaaaagatcatgagtctatttatcttaaaaaataaaaagaataaagaaaagataaaaaaagaaaaggaaaaaagaaaataaataagctctaaattcctaggttccttaggctttaagaagactaaatataaacccatagcttactttttttccattaagtaaagaacttctaattctagcacaagttcgagctatgatgatttaactttaa

SEQ ID NO: 47594 - DNA, 1622 bp, Homo sapiens
actcatatgtgacttccaaggcaactagctgtaaccacagttactactgtctccaaggcccaagaggagattttcagcctggataagtatttcatagagacatttgagccaggtgctttatgtagtaggatcggtgattcagtgtgtggcatttaacaatgtgagtcagaattaaatgaatgtcttagtattatagttggggagttaatggaagggccatctcttggatgagtcattgaacatagatcctgctctgaaccacttgctaaaaattgtgcaatcattttcacaagcagataagatgataaccttgatgttctgccctttctaagttcacatgatcaagctgctcatctctctgtttccccaaaatagatttgagctataaaaccacctttcatctttattcattatttttttccacatgtgttctgtgccttattcattacatgtaaataatgcaattatgatattttaactcttacagtattctattagaggtaaactgcatttgttatttatagtctttcttttctccaaaaatacttgaggcagcttataaaagacacagatatgctaaaactattcaagcaagggcaaatgaatgtgattacgggctatgctaggtcaagagagaatttataggctaaagatagcttctgaaactgagcatcaaatttagctttgagcttcctgaaaattattttcaacatgcatcattttgcctttttaataaatgtcaatgtctgcattagtatcttctattctagaatataagcttaagagggagacggtgctacaatttagtgtgatttgtcaatcagatggcaagtttattgaggatgagtcagaactataatgtgagactgagtaagtagggtgagaattcaaagaaaaggagaaccaatcacttgttcctgtcttcaatgaggtagctggtcagttgaataaaacctgtcatacatttgagatgtctctcaccatggaacatataagctaatgaatgttcacagaatcctaactggggatacaattgtgggaaaatattacccttaattaatatatagtctgatatttgagcagttatagattcaaggcagaaggctagctttcaaggggagactttcactcccatacctggctgctgtatgactgccctagggcagcaatcacagagacaccacagggcagcctctgttaggattaggatgactgaggcatggtctagttggatgttaggactgggctctatttagcctacacaatcctgtataatcttagaattaaagaaaaaagaaagaaacgaaggaagggagggagggaaggatggaaggaaggaaggaaggaagaaaggaaggaaggaagggggagggagggagggaagggagggaaggaaggagggagggagggaaggaaggaaggtgaaaagaagggaggggaggaaaagggaaaaggtctgttggtcaatttcatggacctcttattatgccaatgtgaaaatcagttagctaaatcttttgtgtcattttttatcttttcttaaacctttttagggagtgataattacatacatctttcctgtgttttaggaagaaatttttgaaagtagattaaaaagtcag

SEQ ID NO: 47595 - DNA, 4447 bp, Homo sapiens
atttaagaaggaaaaataaacaaagttaaagtcagaatgtttattttgaatggcattagtaaatggggaaaattggtggaaccgattctttgttattacgtgactcataaaaaatattaggttgccttgatttctgcttcttaccttgtggccttggtttggtttatacaccctcattgtcagcactggctctctataataagcataaccattacaggtggccatagttgggatctgagcttttctatagcatctttagttctgcacagcaagggccactagggaaagggcagagaagggtggagaggatgtctataggtagcaaagatactttgagtttggagaataataattatggaattgtggcatgtacgttacttgtgctttttcctttgtttttctgatgcctaaggtggttgaacacaagtttttcctgttgcgtagctggttacattttccactgagccttgcagctcttgtttttgagagaaaaaaagcactaggaaatatgcaaaatctccttgagtgaataatgtgaattgcagaaaggatccattgacttccttctcagcagtgattttctatctgagtggctgctggatagttagtgcataaagctatgttggtgctggctgggtgcaaattgccttcatctgaagatgcctgctttgtaccattacctgcctacagcaaaacagagcccctccagtagagaagtctctttaaccaaatatcaaacaaattaaccttttagtgtgctcctaggagcctctcaagagaaggaacacttcagtgacatcactgatggcaaaggttagcctaaaagtaaaatgaaatcatctggccaggcaggccctgcgggagaatcaagctttgtaattagattgaaggctcctaggaaacgaagctctgttgcaggaagagcatttgcagaagctaattggggtaagcttttgcatcagtgtcggtgcaacgcatcacttacagccttgaaaatagctgtaatggtgtatgatgattgagtcattccctaattttagcaacctaggctgaacatgaattacatgacgaatgtgcgcttgagtttgtcctatctgagacttcggactccgggaagattgccgtacacgtactggctaatgtgacgactgttttctgggagttgcaggattgcgacagctttgtgcaagcagagcctgagagttttgctctgttggctctgcccatttaccttcattctaacctccattcttaccttgtcatctggtggatgtctccctgcctttaccctacttttttttttcccccaaagtgtggaatctgtaactgaacccagtaattgttctaaattatttctgtggtgaattagcaaaacaagaaatctagttactaagcgaataaggtgaggtcaccatcctccttgctgtagtgactcaaaccagatacaaactgaggttggagaagtaaaaacgtgagcagagaagtaatattatttggtcttgcatgtgtctaaacttctccctagataatcaccttaactttgatatacatagtggagttctcttctggcactttcaaggatacaccaacctgaacactttatctttcacgatttcctttggttttatgtggttttcagtctttgagtgacaacagaatatcaaggcaagtcagctcccgggacccaccatctgtgtgacaaaggcatagtacttaaactctctgagcctcccattcctcatgcataaatgagaatagtggaagagctagtaagagtatgaagcatggtatgaaatcatgcatgaagctttatgttgtaaagctgtgttgtatgtggcaaaaatttttacattatcagtgaagtaatagatactaaaatgttgtatagagacaagagatgaggttttatctaattaagcacaaatgatctagactatacattaaaaggcagagggtgggggagagtattatgggaagccctaatagataagaggaatgctaacggttgatttaagaaggaaaaataaacaaagttaaggtcagactctttattttgaatgctattaataagtaaagaaattgatggaatcaggtagaagcacataatcagctttcataagcattagctaggatttttggccaaaacataagggtgaaggtatgtgagagttgttctttattttggtagtcataactaacaaaaacagctaacattttttaacgcttactgtacgtcaagtactacacggagcacatgatgtggtgatgacattaaaaactcaccccaacctgctctatgctcattgcacagattaggaaacggaagcatctgagtaacatagtgaagatactaatgcaataaataattgttcatcaaagaatcacagaaagaagcacttggagctggctcatctcagggaaatgcacgtagtgataatgagtcatccattttcaatgcatcactatagctctcccaaaccaaaaccctcctcttgagctcacactaaatctgtttatttctcatatctagattgcttttacattctgcaccagctaatctctggtcctatttcaaatcagaatctggatattatttaccatctgcctctaagggatgcacttgccaagtcccttaatttgctataattggcaggttttcagtgtacataatttatatcaaaaaaagctaccctgaaaaagaagattaattaaaccatttcttctgggtccctaaaagtgcagtggtttccaggaggatggctttaaggccttaaggtcttctgtgtgtatatgctgtcacagctgagcacattaaaaatgtatgttgggttgctccctggtgcctctgagctggtcagaaagatgtcattggcacctgggtaacatcacaaatactcactgaattaagcagctcacatttgcatttgagtcttttgttctaagcttcgcagacactggaaactactagactgcagtataatttatggatacctcagtgttgacaattctgtcactgatatgataggaaacactagaaaaaaatacacccagatgtacagaattctaaatagagtaagtgagagaccgtaacctgattcagacaagcagcacatgtggctaggaaatagaccatttacagtttttccccctttttgccctttttcagtcattcgctaggctcatggtccaatgtggaacatcccctaggctttgtggaggcattctggtccttcacagcttctggataatataatgcttccttgtgagtttatttcttaatccatgcctatctaaacttggcagattgattctccattctaaaaatgggaacttctgtgttttctatctttttctagaggttttttttttttttttttttgaattaccagccttcaggggaattacacagcgtagcacaggaatgaatgtgaagttgccacatatttttctttattttcctggaatgcccatcttcacatccatggccagtttttcctacttagcttccaaatcttaactcaaatgctgccatgcttgccttgccccatcctgacctcaaggtggcctcctctgtgcttcagaaactatatctgaagcttaagaaataagtaaaaaatgtggacagcctccattcattgtctttttgaaagaaggccagctacagattaactaatatacttaggttacctcactgtttactattaattacaaattccagactttgtagcattcgctgttgacttgtagctttttgcatggtggagctgcaaataatttctgccaggtggagcagataactccaaaggtttatggtcctgttggacatgagccactttttaaatctacccatcaatctcattctaagatggtctctgtccagcttataaaacaacttttgatctggtcataacatcttattaattaatgagttaaataaaacatgctcatattacgtgagggtgggagtcacaggtttgaactccagtagagtatagcactctccacattctcccagattgagttgtctccctttgccactaaataaaagcctcatgaagacagggaccttgcgttgcatgactttggacactcagtacttagtaccatgtctgatgcctgcgtcactcaataagaatgtgtactatgactaaatgattatgtaatttaattctaacccaattggactctgcagcagtgctccaggtcagtgcaaggatgctctattgctcaaagaacagcttctattttaggataacttagatgtggagtcagaaatgttatgatagtcttttctacgacttgatgactctatgtagtggccttagtcttaatccttctttattagtcttttgctttgcactgcctttggattaagaatagacaaagttattcaatattcaatatccacctaagccaggacactttgcaagggcaaacagaagtttga

SEQ ID NO: 47596 - DNA, 1110 bp, Homo sapiens
atggaaattctttctgatgatcttggagttcctgactagatatcctggtaaagtctccggcagttgtcttttcagttaaagtggcttttgagataggaccaaatttggcattagaattgcagatacacatgagaacttgtatgtgtagcacaaacaatttcttgctgcctattgcttgtgggatgcttgccaagaaaaaacaatttgctttgctgcaagaacccagttagccattactggagaatgtttttctaagattgcttatcggtaattttaatagggctcagaggtttgtgtggtttgcacaaaatgttagttactttttaaaggcccaaatttctccccattttcttccacaaatctgaactccattctaattgtaaaataatcagtgagaacagcacctccctaaatgagtagataggaatggataattaaatgcttatggtgaaatggatttaactattatattgctgtttcagatagaaggacattcccaaagaggctcctttggttttatacaggagttcaagttgttagctactattttggttttgtaattgtgcactgtggtcatgagaggctttctgtgggggaggatatgtcctcagtgcctcttcattgattgattcattcattgaacaagcatttgttggcagcagttattcatttaacaagcattattgggccacattgagccacagagagagaaatgagtaaggcactattcttatcctcagtgaagtcaagtccatcttcaaggtgactgatggcaaaaggaagaaatctagaattcattattttcaaccatttgttatctaagtggattttaagaccatgttgtgaaactattatgattcaccatcagaggaaaagggcaatttattttgacctgtgaagatgcagcggatatgatctatgttgaaatgatttttttaaaaagatattatttctagattaaacttccttgagtcacagcctaaccttttaagacatattttccaattatgccttgctgaccatatattgagttttcacaatttgcacttctgtcattttaactaataatatttaatgttactacctgccatcatatttctactaattatt

SEQ ID NO: 47597 - DNA, 746 bp, Homo sapiens
cagcctccccctttaatttaacaacagcccccaccagagtggtacatttgttacaactgatgaaacttttcctgaatgtcagttacttggaacgtagtctttaccaatgtggcgaagcgtgggggtaagacaaatattctacagttctatgattaggtctcagtcttttagtgaacttaggcctctagactgtaaatttcacgagttgtttctcagttttttcctactctcaggtgggttggagttaggtattttccttttcccatgtggaaggttagagctgacagaacttgggtatttcgcttcccccaagtgagtcaggctctgttaacgccccagcaggttagactctggttcgctggagtctcctgaggacaggatttgtgaagcgaaggctttgttaagaacagaatgttctgctacatttcaaaatggttccttttcccctccccctgctggaaacacgagggaatttttctgtgatatttactctgagaacctgcccatgcccctggaggtaaaacacaaaagtgtgtgggggccccctttgactagttcctggtggagtgttttaagtctcagaaccgtgcaccctgagcctccagcagtttcttaattacagttcagattttctcaccaagaccttggttcccaccgtttctgtttgtgagcctttgctatgtagatttttgtctattagtcttaatgcattcaactttgtaactttgtctcttttactgctattt

SEQ ID NO: 47598 - DNA, 1710 bp, Homo sapiens
atagccactgggaaatgctcatctatttgaaggcacctcacagcctctttatcctatgtggcctttttaggtgttcctttttaatcctgatctaaataaagtaaatgcttcagagtatcaaatttacagtccagctaaatgagaaatccattagcttggaaactcctagaagttgcattgctgtggccattgatttctcctctctggtattaaccttaccttgtatccattgaacacaccctcctggcagtgggtccatttactcacctatcatcatctcatgaagagccccaggtggccccctgtagcatgtcactttgaaaaactattactttgatggtgaaagagtcagtgtgacatcaaaagtatcctgaagattcctgtgcttaccatttttatacctaacagaactcctgtagttacagaacctaaaaccaatgcaaaatgtgatcgatattagtaaacagtacaccactatcttagacatttaaagttcgtactaggaaagatcaaatcaaataaacaaacaggcagtggcttgccttttttgcatagggcagcctgtctgcaaagttttatctcactaggctgctatttttgaggaccacctgaagctgaggaaagctctttctttggttaggtgtggaaatatcaagtcgatttgttaaattgaatatttttcatgtatttgctcatactgatcttaaagatgtttaggtttaacaggccctaaagaaacacaaattaataaaagtggagttatgaactttggtggacatacactttatctttaaaaatcaggacacttcagaaaatggagcgtttttaaaaatagtaccagtgcaaagaacataaaccaggaccattgcctggaaaactgagacctgtggtcaccctaattatgagaagaggacaattaaaaatggaatgctaacagaatctattaggactgaaggactagggtttagtttggcaaaccgatgtttatttgacaaatctgatgaataaatatgaaggcaacctcctatattaatgtggaaggtgaataatttgattggagttattaagaccattagaactgattgctttaacatttgttgttattctgttagattaaaagataaatcaatgtcagcttgttactgggaccctcccaagtaaatcagtcaatgactaacttagtgtgtgctttctgtttccagtcattttggtttcattttcacaggctgatttttgcccttgaatgtacgattagttgtatttacgtagactgtgcaccatgtcacttctgccaagatagctgttgaaaattttcatttaaaaatatgcagttacttcctttgtggaattgagaccttgcacatctttaaacaacttagaagaaatgtgtacatgatttatagaacaagcaaacaaagcatgacctttcctgaactgattaacagtgcaattcttcagaatggcagtttactgtagattcactcacattgaacaattttataaatgtgcataagaataggctttgctacaaatgcaaaacatgaaaatatagttggattaaaataaaatttgaatcaaatgcttatattatactggcatgagaaagaatgctcaaagcacttatcctgagccctgttttctagttaaaaaaataaaaaaaacactttatatggaatttaagaatagtatataagaaaccattttcagttt

SEQ ID NO: 47599 - DNA, 2822 bp, Homo sapiens
attcctatatttttctattttttaggattctcagggaagtttaataggtttcttaatactgtcttgtgcagaagtcttcaagatcttcttcatggccagccctatggtttcattctgtactgcacgcttcattttcacaaccccatctgttctttcccttctccaacttttgaaagccacatttatttgaacgatttggggagcaggtagaaattgttattcttctgaggaaatgtcttgatttttttgttagcctgtttacctcaactggtggagtttagttctgaggttattgaacatagttatgactcttcacttgctttattatagaggagttttgtgattagcaactttcgcctgcacagtgccttccttactgagaataaagaataattctcatttgtaatcatctagctgtttatgcagccactataagatgacagtgtggcgatgttaatgaggaattacaattctatacggcagtgttatgaagaaaagatacttttggatccttagatttatgttacaaataatgccctctttctttggcgactcttattgttagattaactcatcaccaaaaccacatttgagtaggacactaaatgaatattttctttaaaaacttctaaggacttacacaaaattgtaatcttgttatttttaaaatcaaggagttgaaataggaaaaacaggagtggggaataggaggaaaaataaaagaaatgaaagtagacatgacaaattttaactttcagcaaataaaattgaagccaagtttttgtgagacttagcaaacaacctttacccgatgctgtgatccagatatagaaaagaacacaaatactcttcccagtgggagctactaggatcctagggcaaacctttcagtttgactttaaattctcagatattggtgtattttcattgtttattctccctttttctctgtgataaataagtcgtgatcaccatctttcccctagtcttccctttatgtaacatccatattttctacatattccatttcttcatgcacatttaaaaaaaatgaactaacatatatttcaaaagttactgtagtctttatgggttttttgttgttgttgttgttcttagaaagaattactattccttagtaaatttctggaaaatcactgataaataattgtttaaaactacctatggtaaaatttactgatatttcttctactttaaatttttaatgacttcataaattataacttaattgatacagtaataaatgaattatggaggacaataaattaagataaaatctcatctgatatgagaacaatcaactgtgaactaaaaacaagtcaaaacctgtgcgtagaaactttaccttcagctaaaaatctcctgaaatcactgagttttgagtcagtatacattctagaatatagtcacgttgcaacggcaagttaagaatgtctccagtttttgaattgagaactccctcctgtctgtgctttctgatagggaaaatgagaaaagcttttggattagccattctgaaacttgacaatacgatatgtaggatagttgcccacaagcaaatgcttcaagggatatgagagaatactaatgtacttttcctttattataggagttcctatgtgttccatgtgtatctttctaaatatttaagtgtcaggttcacttgtttactctaaaatgtagatatattgatattactccatctacattaacttcccagtcttttctgtcatcatttaaagacagtgtaaagattagtgcacagtgtgtagtcatagcatattcatttagtcaaattctcattcactgcaataattcaatgaagatgtgttgacagcccttaggtgttagatgccctaagcaaggtcccacagagtgcaaaagctaatgagtctctcagttaagaaggttgcaatctgttatatagtaggaatgtacatttataaattaatgcttcagtatatagatgcaatagtagctgtataaacaatcttagaggaaggtaaaaattagtccaggatatccaggcctcttgaaaggtaaaatttgaactcactctaaaagtgagtatagacttgccatgggaaagagaaatgagaggtatttcagcatggtatgccatgctatttcctatctctaatttacccaatgactcacagagtgaagaattatattggcagaagtttagtgtctgtgtcaggaaggaaggaaagtaactaaaatggtagcttgggaatgttgtttgtgaagttaagaaattttgactttattctgtaggtagtaaggagtcaataggtttgtgagcaaaaaataacatgatcagatgctggtcttaggaaaatactcaggtagcagtgttaggggtggacttgagtaaaaagcgacaagagtgcaattttgaaagcagttgcaaaatcccttatgagatatattgaggacttcaatgaagtcctggatggaaaggaagttacagacgagggtactgaaaaaaaacaacaacaacaacaaaaaaaagagtcactcatttaatagctaggaaggccatttctagttcaatggtggaaaatagaacatagatattgactctttagaattaaagtgatttgagataatataccaaatacagataagtctttaaataaaattgattataaaaagaagaagaaaaatggggaagtaatttaagcgaaagaggaggaagacattggaaaatttatgggtttgtttgcttgtttaataaaaatgctggcttgtccatggaaaggttaaatctcagtttgatctgtgttgtaacatgtggc

SEQ ID NO: 47600 - DNA, 1405 bp, Homo sapiens
tgattaaaataataaaaaatattttatttattttttggactcaggagaatctcagagggagaggatacaccaaaaaacttcatagcaaaacaccttcttgttcttcattttaaaactatttacttggtcgtacatttccttctctaacccaggagctccttgaggtcagtggaatggaatgaaaaacacatggactttgctacgacttgaccatatgtttaactactggctatgtgaccttgggcaagttatttaactttttgagctttgtttttgtttaatctgtaaaacctactggaaattattctgcatgagctccaacatatgagacatatggtacatatttatggagtgaattaatgtaataattaattcattaatggttctctgtatgaaaggatttacaatgctatttactggtatctgtgtgatggtggttataaatagactatatttaaatgtaaaatgtgctttatagaatcatgagatgataaagctgaaggtttaaagaaataattccagaccaattaatctcaatagggaaggaaggaaggtatttcagaaacatctggttctatgcatgctagattgtctgaagagggttttagaatttcatcacaagtcatattatatacttatttctctgctagtgtattgcattgcaatattgttaatcatttctctctagtatctatatccaagttaagaaccaattttccagccaaataaccccatttacaaagcatgagactcaaggtagcatggcgttttagggccagcatggtctaacaccaggcctttgatacatagtgctttccaaactttatggcttaggaaatgcctgagttagaaagatgaggcaagatcacagaaggagttaaaatggaattgagaaacaaaatgaaaagaatgtattacctttagaagtaaattttttcttatttgaaattaatgtctgtgattattcaatgtttagtgagctaatgagtcacaggacagaggaatcatgatacacggggtaactttgagtgttttgcaattagctggtgtctgtagggtgattaattaaaaaaaagtaggactaactttaagccaggaagatatgtttgtagacagagcatgtggaaagagactgacttaaaaggtgtactgtttggagcaaggaaaggtggctgtaaagacaaatattgtcagagtgcaagacctgtggttaagttcagatgagtgaacacatcgcttttgcaatcataggaagggagaagactaagcagttttgtttgagaaagagaaaacagaattatttgtggaaagtttatgaaatagagtgagagcacttttaatgaaatttttactacagaggtgggtttaacttttaagtctaaaatacagaaaatgtgtcctttta

SEQ ID NO: 47601 - DNA, 1310 bp, Homo sapiens
ttcctctatttttgaatctagtgaaaaaaatattttcactaaaacaactttaattaatactgccaatgatatctttattgcaaataccatggttatttattttaaaaaaacatttctgctgagtgtactagtattgattatttcctacttgaaccattctctcttccccttgacttgcaggactcaagtttcctctgttggcagtctctgactgtatgttcttatctctttcctggagtcacaatcttaacttctctcattttatcttacatatatattccattttaattcatctacctacgtaactctttatagatgatttggaaaaaaatttcaaaacctaattttctgccacaaacttttaaattacctattaagtctctatttgcaaaaatctaagtactcaaagtttaacatgattaaaggagaactctatctttttcactcacggttgctccattccttgtatttcctattttggagattgatctcattattcattcttcctctcaagagacaacttggaatccagcctgcattcctatcattctcaatctctatatcctgctaattgtactttatgatactggccctttcttcctttctcttctctgtctttccgcctaacttttggctgtcatctttctttcctggatgacatccacagcaccttcactcatttacctgcctccagtcttcctttgcttaatttattccacagtcaaaaagacaattctctttcaaaaaatcactttatcactcccctgcaaaaatttttctgcactataatcttttgcttttgtcctccaaatttattttttctaacattcatgggggaaaatgtttgtctcaaacactctcttgtgttgttcatctttctataacttctttatatcaattgctttttttgtgttgctctcacctatttcctggcccactccattccttgttctgctttctttcattttacatttagtcacaagtgacagtaggatggcttctagcagctcacagtctgtgagataatagattcaagcccagtttcttcttggtatcacctgtaaacattttgagagtcactatatgtcaactaatctggttcccatatctatccctgaatcaattagtgttctgggctgctggaattgtaggcctggataatatgcttactgctgaagtgtcactttagccaggaggattcaggctgtgtgtgattgtcctggcctaaggcattatgtcaacctgtggaatttagagtggagcactacttggacagtggattgatggggcagaagtggtggtctccaagg

SEQ ID NO: 47602 - DNA, 822 bp, Homo sapiens
tgttattagacagttaactgaagaaaaatatataatagaaatgaattattgcatgagagtcttcttttgatagcatgacatctccatcattactcccatttttctctcttaaccttttgtgatacctgtgaaatgtgatataccaaatgacatcactctggttcagagctctaaaaggctttcagataaccattctgagaaggacttcctgcttgacctatggacttgcaaatgaaggacttgacttgaacctctgaactgggccaaatggccatgatcacaacattctggaacagctaaattttaccagcagtgcaactcctgaaaagtgacaaccaatgaactatggacttatatactaagccagccacctccaccaacgacatttctttcaaaacaacttgtgtaattattattggcatccttttaaaaaatccctattcccctttctctcttcaaaacttgatttggcatctagctgaactgcgtctctcaaattgcagttcctaagaccccaataaacaccttgtcttactgttttgcagtttgatcgtttgtgtcttctgggttaactaaccaaaaatcattacaattatgcactcagagcctagaaatcctctgcttttcaaggttaacggcactgcccccaattgctagagatctgaggagcaactgtagctctttttgataatgactaatacatacattgccacaagatattttgtgtaacagaatttgaaagttaataaacttacaaagctaactaaagaaacatgataatggagttgttgagattggaaccatataccatcagagcatcag

SEQ ID NO: 47603 - DNA, 3988 bp, Homo sapiens
ggcagaggtttcagtgtcacaattgtcactgcacccactgcactccagcctaggcgacagagcaagactccatctcaccaaaaaaaaaaaaaaaaaaaaaagaacatgttacagaaagttatgcgttcagtagtttaggaagtatttgggaaatcttttagtcagtacagactagttctgccaccaaatattaatgtccccttgggcagaaaattgcaatttcccatttcagtgctcagggtttggactaaattatcacaataacctccatctctgaccttctgtgtttctcagcagactaatataaatgatctagaacatgaaaatgtgtgaactttaggacttcagtacaacattagagtatcttatgccaaactccttctaattcccagggaaacattaggaaactactattatgttgtagagaaagaaagttagaagactttttggtaagctttttacaatgaataataaatgtgcaaaatcacttaaaaaagtctattcctaggagctttttcttgattttcgtttgattgtctataattatgcaatccaaagtctccaactgaattaaacatcccataaccattttaatgactcaggatagaaagaaaaaattgcagcatttaaattctgtttcaatatgatgactcttgagaattttactgaccttgatggaatttttggaatttgagttcatttgtaatcaaactagaaaaaaatgttttgaaatgctatttagatgctcaaaaggattattggaccctaaataactttcattacatgacattttgataaggtcattgtaagtgagtcagaaacatggactacatttcctttaaaaatacacatcccttcacaacagatttggtcctaactcattttggcttttgctgaatcccaagtgtttttccttctacttttttttccctttaaattctccagtaaacttgctaaaccggtaatctaggtgagctcacctgctccttccactcacttccctgttgaatttagcctcgggctttgctttaatagcatagatccttagagcagagagttttatacacaggaacaggggaagcacagagtctaataaaggcctgggaatttttgttgttgttgtttcttttgaaaaaggagagctctaagggaatgatattgttccagagaactgactcaaatgtgttctgtatttgaactctgtgattatgaaatttcaactaaagctataaaaagcaaaactaacagacaccagagcatgccaaagaaaaacaggatgttcttttttgattgggaaataattatctaagttcaatggctgggtccaggtagttgagtttacatttgcttctccctcattatagaatcagttgaattatggtaaattttccctaagcagccaagctgtcattcaaaggggtgattttattggggtgcaaatcccttttgttattgcttcagtccattttttaaatggatttgaagcctgaggggaaagtacaaattaagacagacttttctctttatgcggtgaacccagcctgtcctgcctgctgcatcccactctagtacctccagggtgttcatctacccggaaagtcctctgctattttatgctctatggaagtgagatgtaaacaaaactagcttacttctttctcaaaaatcattacactgattggattatgtccttagcaacagaatgaatctctctacatatgtattactcagtgattgaaaactgaggttcagttttgaggtaaagtagaatgcactaaaaaattgtaggattgcaaataaacagtaacattgctaatgattttccatgtcttccatgtgggggaaagcaggacagagagtatggctttttaaaatagtgaaattgactctttaaaatttttagaattggagttcttcagtttattggaaatgacactgctgaagacaatttaaacattctgtttaaagtaaatgaaagaattataccgtaataaagatctaaaatgattcacaaggattataacagaaacaaatttatatattacttgcaccattttaactagatactataatggaaaggaaaaacaaaatcagaaatggttactctcttctgggaagtcactggtaatgaacatactttccttaacagcaatgagggcatattttctttcttttttgccataagggcaataatgtcataagatatattttagagcttaataccctgtcatcagaaattcagtttaatttttaaatataacatccttacattaaaatttagaagaataatttttatgttaaataaggttttcagtaagtatactatatatttacatatatatggaatatgaatatttatgaagacacacgtgaacactcatatattttcttcagaacttgaaatgacctcagaaaattgttaattttcttcctttgtttcatggcagcattaccataatcagttttagatatcataatatgcattatcttgatatcccagaaaatggcatttcatgagtaatcttcattctgcatcatctaatctaagttcttcctgccatacccttagacttttttcccttgctcttttatcaacagaaatggtcatcagcatatgaacaataatattcctgcatttccttgaagcctgttatcaccgtccttcaaaatctcactcaaagtctgctaccaccatccttggaaatgtcactggggaccaaataattactataaacttccttagctaaacctttcaatctagactttgtatcaatttgactgctctcctggataccctattcatgttgtacccaactatgttaagtcacagagaagaagactgttaggtgatggtctaaataggtttgtgtataatgggaaaattacattggttttcttcagtgtacactttattcattcctgaattctgcttggctgttacgaaatattgctgacaaccttcaaatcacatactattctgaactcagggactgtcttctattaaatttcacatagtccggttactgattatctagtgtgtgtacagctatatttcctctaaatgtttactatattttatcttttccttcgatatcaatcaattcccttatttgaataagaaaaagtttttgaataatcataacagttactgattactaaacactaaccctgaaatatgctgttaaaatgggtgttataattataatatttgggaggatagttgcatattatgttttattcctgtagatttagaatgtataaagaagctctatagtaatctatttaattttgatggagaagtttttttttaattcacaaacattttattaaaaatatgagcttgttgaatcaaattcttataggaatttaaactcagagtatggcaattagaaaagtggatgtcttagtctatttactgttgttataatagaataactgagactgagtcatttataaagaaaaagttcttatagttctggagttctggtggtttttcttaaatgagataaccttattctttttctcttttcttctgataaatgtgatagtttacattgctgaattttttaaatgttgaactatgtttgtattcctggtataaaaaactcaatcatgatgattttttttttcttttttatgtacatctaggttgtatttgataattttaaaactttttttttaacttattttcctttgtatctttcaaaatatgattaggttttaatagcaagtttctgttgaaaaaatccagtcttatattacatgtatattggtttaacgattacattttaactcatggactctgataagccacttgttaatcttactggttttccttgtacatagtgaattgtctcttactgctttcaaggtctttgtttttgactttaaacatttgaatataaaatgttgggtatggacctccttttgtttatcctaattggagtttactgaacttgttgggtttatggattaatgttgtcaacaa

SEQ ID NO: 47604 - DNA, 3239 bp, Homo sapiens
tggataaagaaaatgttgtacatatactcaatgaagtactaatcagccataaagagaatgagatccagtcatgtgcaacaacatggagggaagtggagatttttctgttaagtgaaataagccaggcacagaaagacagacatcatattcttacttaattgtgtgatctaaaaatcaaatcaattgaattcatggaaatagagagtagaaccatggttaccagagtctgggaagggtaatgaggggttggtggggaagatataaacagtgaatgggtacaaaaaaaatagaaagaatgaatgagacctactatttgatagcacaatagggtgaccataataataacttaactatatactttcaaataaagaaggtaattggattgtttgttactcgaaggataaattcatgaagggatggatactccattctccatgatgtgcttatttcacattgcattcctctatcaacacatctcatgtaccccataaatatatacctactatgtacccataaatgtttttaaaaagtataaaaagcaatattctaaaaaaattaaattatgaatatctacaaatgttctttctagcaaggttaaaacaactattaaagattgttgctatttaaatatatcataggaaaaatcaaattaaaattaaaaaataataaaaactcacatacttcaaagagcttaaaaaagtctttttaatgaatttgttatgtgtttccacattaagtattaatatgtcatgctaatatatcacatatataacttttcaaacttaacaatggtgcttatttgaggcattgtgaataattgaagttataaaaatatatcacaaatacttttgaagaaatctgtaggtctactccaagccgatcacattgttgtctctgtctggaaaatctcataacttcagtagcagagtctatttttggagttgaaaatcagttcggtcacaataccagtgggatgactgaaggcttgggtaatgggctataaaatcttttccatctaggtcactgattgatttgagactgtcaccaaggtaggtagaaaaacagtcactgctgcctcataagaactgtcaaatcatgtgaaatgagaatatggtctcaattctggcagacatttttcccatctacctaacacatgcatgcacgtgagcacacacacacttaatgacttcttgggttgctttagagcagagtaaaattattctggaatgaatcttctgttctgtgcagaatagaaaatattttgcttaatttgtccaagtggtgtcatcaggcaatttctatttcagaattaaagtgatccactttaccagggggactctttccacttgaatttttatgcctttgtagactatggttaagtgaaatgagcttctcggctctttaactatgtgatcctccagtgcagtttattatttggaggaagcaacattttgtctgaatgattctaccaaataaaaacgaaaaagagtttagtttgatcagcaaagaatgtagaaatttacttaagcagtaaagaatgtggctgtctgactttggtattatgttacacctcatggttcaggcatcttgtttgccttaaatggtttcacaagcaggagggttgacccagagcagattcgcagtggctgcacagagcacagctaaacagcagatttaatgaggtcggaatttcacacaatgccttattcaaagaattcaggcagcaggagagaagttgtggtgaattgcagttgcccatggctttgcatcaagaagcaaaacgtttctccacaaatagttcataaaagttcaaaaatagatgccaattacattcagctttaagattcagacatttgtcagggagggggacttgtgtattcacattgttagaattaaggaagtacgttcatgaaccaaaaatacagagctctatttactcgtctaaagtcaggaaggatcaaaagggtttcctaatacattttgacatgctggaagtttttcctttgttttcccactttatgtttttgcagtacctaccaccttatattgcattctttgcttgtctgtctcccctacttaactttaaagtccttgaagacaggcatttggggtgccttaaatacttaatgaataattgcagagtgaatgttgaacgaaaatgaatgtaactcattcacatactctatgctaaattgagaaataaaaagctcagacattttcactccatcttattcccttaagaaacatcaatgtaagaattcgacagactgctaatctctttgtgaagctaatgaccagctttaattttgcaaattaaatatccagtttccctgcctttttccccattgaaaaatagtcctatgttggtcatttatatagctcattattttggacctggggataaagctacagtcagaaagcacacagcctcaggttctataatattggaattaggggtgagaacattttccctttatgtaagaactctgtggctctgggcatttctacataattattgatcaaccttgaaccatagtttctcaaaaagtcatataaatgggagaggattgaggtagaagtatgtgatatataatttattatctaaatttggacacttttgtctggaaagaaaaagaagaaaagtaaagaaaaactgccaggatgctgggacaagaggtgcaccacatcctgctggggaaagcaaaccagaacatcaggtcatcctgggtagacacaacctgagccagtgagcaacactgcccccattccagctgatttctagtgtaattttccatcatctgcctttttaaatgtagaaagtcttgattcaggcttgactggaagtattaaatgtctacctcacttttgataggaagaagatgatttttcacctagtggagtcattgaacagtggtcttcaaattgggattatttccaagaatgtgagtacagacagttttaacagacttaattaaagctcctcacttaccacaattactcttttttagcatgatattgtttgttttttgtttaaaccccttaagcccctttccttaatataatagctatttacaaaaaataaaaatcactcattcatctcatcagatatttcaaattactcttgttgccttcattaaaatcccctaatcccactacagaaatttgtgtttttccctgtcttatacatatttctgttaagaaaggagcagggaataaaaaatgatgtatttctgtccttg

SEQ ID NO: 47605 - DNA, 670 bp, Homo sapiens
gagagatggaaaattcctaaatatttgaaagcaaaaaatacacgtgtaaatagcacatagatcaaaatgaagtttcaagagaaataaaaataatttgaactaaacaaaaatacatattagtaaatattgcaggatgcagcaaaatcaatgcttagaggaaaatgcatagcattaaatgcacatattaaacaaaagaaagacttaaaatcaatagcctaagcttctaccttaggaatgtagaggaagaatagcagactaactgtacaacaagtaaaagccattaaataataagtattggagctgaaatcaaccaattcacaagaagaaaacaaaagagaaaatcaataaagtcaaaagctgtttttttgaagatatcaataaaattggtaagcgtctagccagattaaccaagaaaaaaaacaaagaagacacaaattaccagtatcagaaatgaaaccagaaatggggtattccaactgatctcatacaaatggaatttattctgtgaattattacacaaccaagtgagatttatttcatgtatgcacagctgactcaattaaaaaatttaaaaatacaaacaattaatacataaaatctactatatctacaggctgttgaaggaataacatatgaccacttcaattgactcacaaaaagcaacacccat

SEQ ID NO: 47606 - DNA, 724 bp, Homo sapiens
caattgttcctggatagaaaataattagccttgactgttatggaaagaaaatagagatgactaagactccaaatatttgatgaactacctgttgtcatcaaaacgttctgagagaaatataaagttgtcctatcacaagcacatacacgctatgcattacaacaggacctgtgttgcaaactctttgtggcctctcctcagacatacgttcataaattagatggttctggctcccttacatgtgttcaacttacaaaacttgccacttctttttgaagagtacctaacaactatgaacctatctactccctcactggaagcttcttcccatagtaaaaaaggtgatttgtttccttagctttgactcatgttaactctgtgaccatctacctttgagtgaaggctggagagaatgagtaagtaagtgagtgagtgagtgtttgtgtgtgtgttttatagggagattgctggcaaggagctcctcctagaggttagggaatgcatctcccagtatgtgaagttataattgttttaagaaactaaatacaatgtcaagcgtgcatatgctctgttagtatagatgtatatataggaaaccaaattttttttctatgtgtgtgtaaaaattttgtcttcagaagttgtgtcttcaaacatttggggtctgtaagaaagtcacagtaaataaaagtcatcttgatcaactgtgccactttataagtaa

SEQ ID NO: 47607 - DNA, 854 bp, Homo sapiens
acacataaccaagttagtaaattaaaaacaatattatatccactatcacatcaagaagctatagtcttatgaaaactacaaaggcatggatggagtaccagtttgttggacataccttacaataataagacactgtcttctaagacataatatatacctaaatcaaagatattgatttggttattttctcataagtaaaatatacaggtttgggaattaagggttggaaataggagtagcctactgccatcattccagtgccttacctgtagaccattttctccctgtctccataattctatgttctacatgattaaagttcctagttccctgtgggggaacacttctaccagggaacacaaaaaagtcccattgaattttataccttggctattgcctgggagctttgggtttctcctgctgagggattaaatgtaagttaatgaataaccatcttggcagtggtaattgactttgatcatcataagaatgttgtagcactgttacacaatggggcaggcaggaatatgtttggcacacagatcatccacgccactaaaaccaacagaactattacctgaggatgaaaggactctagaatgaataatggagaagagagataataagtattagttgtaccaaaatcagctgtaggaagtgaggctataatttgttccatttatctttccattctagattttccccagactgaaaggcccacatgaactacaggaaaagctgtccaccaaacatctgtgaaaaaatgaatctgattgcgatacaagggatgaactatggtagatccaaacgcatcccccatacacatccccaggtaagcacttatggtgccatct

SEQ ID NO: 47608 - DNA, 1411 bp, Homo sapiens
tggaacccacactaattgacctgttatttctcctagaagtagtccaaaagtgatgtgcaacctaaaaaacaaacaaaacaacaatgggggagcatgtggcaactaattttttttttaaataataaaagaacagagaataagggaaacctaaaagaagagttctggcaacctcaacatttgattagtttctttaatattgatttaaaatagcggttgataaaaatagggaatggtcacttttgcctgtgtcttctgcctgtgtcaaaagaagcataagacacatcagtaatcagatggtggagggacttaaaacattaagctaaacaatattgttatgttctgtagggaacctaggaatgcttttggaaaggagactgcagttttcaatcagaataataatatttttatgatcttaaaatgttggctgtattacaaattgtaaaaacattaatattttaaacacaaaaacatttaagtattcttgctattttacctgaatttgatgtttggcaaatggtccattcaagtcattaaatagttaacattaaaatcaattcagtcaaagcaatgtgtaaaaggaatgagcaaataatgacacagccagaaaggatgttggggccagaaaacaaagagattcacagagtaatcaatggcatttgcattcaatttatttttgtcaggcattcactgttttgttacttggtttattttaatatactttattataaatcttaactaaatttgatttttaatgaaattagaactctgtaaaaccaaaaaagaaaaaaaaatctcatctctgatgtgaattcacaaaagacagtaatgtcttttggcatttcccccgaggtaatgattttatttggtttgctttcattttcatcttgtgaatgaatcttttatctatcaattcaatatgtagatccatctactgacaaggtttcagcagcattcgtatttgatggggcttaatcaaaggaaaattaaaaaaatacttgtttaaattcaagtagccataaacattgctaaaataaaccagacttttctgacgactccacatttttgcattagatgtctactaatctttattatcccttggtggctaacacagagctgtgcatctagtccatgctcaggagtgtcacagaattgaatgaaagtttataacttgttgaaatgttaaagggatgactaaaacaatgtacaaaagagatttataaagtcggagcagccttaagtatgactctactaaagtcatcactgaaagaaaaaggaagtcggaactaaaaatctttgagataatttttgaggatttgtaactagaaaatattgcaactttggcacttttgaaaatgtccaaacatccggtccggtccggtaacatataaatatggtacattgaaaagataca

SEQ ID NO: 47609 - DNA, 1260 bp, Homo sapiens
aataaatgttatgggaacggggtctctttctctttttcaaaatatcttgtcgtactgcacacttagatgtgtagtataataagatatttccttgttatgatgtgagatgacacaatgcctatgtgatgtgatgaagtgaggtgaatgaggtaggcattgtagcattaggttaccagtcaccttcttacaatagtcacaaagagatcatttgctttgagtgatcctgcatcatcgagctgtgatgatgttgatgatgcggatgactaataggcaagtaatgtacgcagcatggatacactaaatgaaagaatgactcatgtctcgggtgggacaaaacacccacgacatgaatcatcacatggtacagtgtttcttcagggtattcagaatgacacacaatttaaaacttacaaattgtttatttattgaattttctatttaaaaatttcaaactgcagttgactgtggtaaacttaaactggagaaagtgaaactgggtaagaatacgttttgcatctgtgtatcctgacaatttcaaggaacacacattaaaattagcttattaaggtatgcacatgtttaactttattggatattatcttagtatgttcaggctgctgttaaaagaaaaacaaaagctgggtagcttacaaataacatacatttattttttacagttctggatgctgggaagcctaagatcatgggaaaggtaaatttaaagtctggttagagttcactttcaggtttatagatggtgccttctagctgtgtcctcacatgatgaaaggggttagtggtctctttggggccttttcaaaaggcactatggaaccacacacacaaacacacacacacacacacacacacacacacaccctggaatagccaaggcacttgtgagaaaaagaacaaagagttattacattactagatttcagactatgctataaagccatagtaattaaaacaaccaacatggtattggaaaaaaaaatacacactgaccagtggaacagaataaagagcccagaaatgaacccacccatgtaggatcagctgactttcaacaaaggtgccaaaaatacgctattgaaaaaggacagtctctttaataaattgtcttgaaaaaatatgacttccataggcagaagaaagaaattagacctttacctcacactatataaaaaatcaactcaagatgaattaaagacttaaacataaaaccaaaaactctaaaagtactagaaaaaaaacagg

SEQ ID NO: 47610 - DNA, 1409 bp, Homo sapiens
aaacaaaataaatgttaattttatttcattttcctttatacaaatgaagagtttgaaagtctggataacatttctgttagatgctgtaacacttgggatttggaaaacacattgctccagattatagtttaggcctctttgccttagaaataagatgttctatagtttaacacagaggcagaaaaaattcgaatatatacataaaaaagaacttgtgcttaatatgtttggtgaattatttaactgccaagattgcaatattgctccattcaacaagtaaaaagaacagaaagtgggccaagcgtggtggctcacacctgtaattccagcactttgggaggctgaggtgggcaaatcaagaggtcatgaggtcgagaacatcctggctaacacggtgaaaccctgtatctactaaaaatacaaaaatctagccgggcttggtggcaggtgcctgtagtccaagctactctggaggctgaggcaggagaatggcatgaacccgggaggcggagcttgcagtgagccgagatcgcgccactgcactccagcctgggcgacagagggagactccgtctcaaaaaaaaaaaaaaaaaaaaaaaaaaagcggaacagaaagtgaaaatgagtcatattgaacacggagcaaagtctttttggaatgagatatagagtatcagagtgacttattaactcttagctaatacaaagaagcaaagccacacaaagcaaaataaatcctgtgaaacattcccatgtttagatttttagatgttttacagatattatgtacgcattttacagatactatgtatacattttacataatacctgtaaaaaggattaagtagagtatatttactggaataatcaaggaacaactattacaaataatgtaaactactcgaaatgtcctataatatctcaaaaaaggagacaggattgtataattttcaagtattttccatagatgctactattgataataaatatactaaacatatgaaaacatgggccatgcttaatttttttacttcttaaaatcattgaataatgattttttatatgtgtcgggaatttagaagacttccattaaagttaatttcaataatattagtttattatttccatattttaagagaaactaattatgtgacctaaggtaataaaaaagtttcaaaattagatttattttccatctgtatgatagatgctgagtctatttaacagtatttaatgactaactgtgattaaatttgcaattttgatagaaactatgtagaaactagcaaaaataatgaacatggaagcatgtgatatgcatcttaaatttctcaatgcaatttatagaagttgtattgaagtacatagaaataattttataatgaaaacaaaaaattgaataagaaaca

SEQ ID NO: 47611 - DNA, 540 bp, Homo sapiens
gagggggccaatgttcaaaccataccagctatgttttgtttttatgtttttttaaaaaaatttgtttatttgtttaatgactgggtgggaatagttctgtggtctctcctgacatcagtaatgccagtaatgcctatgattcacttttgtttccttgtttttattttttcaaacatgggttcctagggttctacctagggtcagattggctaagtggtcaatcaacaattactcagagggtatgctgaaataacatgcgctaagggttgcatcatttgtcaatggatctgtatatgggtgagtaacacagctaagggttaggcagtttacgaaactgtaccatgttttatcttctatggaagcaacacttcaaattcagtcaggtaccagtagataactaggaccatcataaatgtgtgtgcaaccttggacatgtataaatccagatcctcaggaatgagtaagagtttaagagcttaggtctgtatatcagtcatggttctcaaaagtaggagaactaataagatagatatatagatg

SEQ ID NO: 47612 - DNA, 1864 bp, Homo sapiens
tatttattctcacctttttatgcctcataattttcagctgaaattttgacatgttgtataggcaagcatattctggtatctgtatttgtgtttgtgtgtgtgtgtatgtgtgtgtgtaagtgtgtccgtgtgtcttgttttttgtctctgacacttaggttttgtcttaactctgtgccagtccctggagtgatctgtcccttgcagtatttttccgctgtattccattgctgctttgatttgattttttgatactttagtgtcgttttgtgagctggtgggggggtgcattttccgatgcactatgtaggtcttagtcttatgaaggcactgaaaaagtgaatctcaggagtattgcatcttcctaagtgttttggctcctccttcagatgaaatgctgggtgtaacatgtatctgtgttcctcttcaaaaagtacagtttaatttcttcttctccgttcccctcctcaagtggcagtgggtttccgccagtgccttcaggctttgtattttaatgaactctgccatacagactagggaatatataatagtggctcttgatagaattttagagatgactgttattccactctccagtcaacactatggcaaaagctttctgaggatacttcttcatcttccctgtgaacatctgagaagggcctggggagaggggttcttaaagaaaaaagcctgcaggagtacgtgaaacctgccatgactatctctcccaggggttttatactttcaccttagcccatacttggccttttgcaattcattaataatttccacttgaaactactttttgtcttgtatgtcattcattggcatttgtccaagataagcaaatgctcagtgcctgtttttgcattcaggtgcttttcatgactcacttccctacttcacattgtttgtttgccctatgtgctcagttttctgctagattcaagagaagctgtttatttgcagtctgtctagtttttcttgtaagtttacaagtgaagctctttctggcattttgtctctctgagctaaaaacagaagttgaattattattattttgccctctccatatttatgatctatttttaatgtttttcttctggatcaacttttccctgttttctattgtcttttgctgtctttctgggaaaatattccaacttcatctctcacagtttcaattacgttttcatgttactataaatttaacttaaaataattatattcttatttgtttgtttcttgaatgcacttttattatagtactgtcatggatttctagaaatgttacttgccctttcattcaagagaaattgcacagtttcttcctcttccaagacattttgatctgtttgttttaaaccatatgttatataaaacatatttatctgtgtataaatagataggcaaatatcagttatataaataactggtggctttcttttctcatcatttttgtctgtccactcatgttgcagtgggagggactaacaagatgaaattaatgtttcaggccaactcacttaatgaggaaaaatagaaaagtcatacaaagtataaaaataaatttccttgacagcattttgtaagtcaaaatatagcaaaatttaagggtcatgatttgagaaaaaaaaacagatatatttataaaaatgagcctagtatttggggctgattttcctttgagggcatctgactatttcagaaggacatcttataggctaaaaagctgatagtactttgatggcctcttgatgctaggggggcaggaattagagtatggaggacaatgaatggataacaattatgagtaagtagaaatcttattatataggttctggcagaagctgccgttcat

SEQ ID NO: 47613 - DNA, 2018 bp, Homo sapiens
catttatctttagtgttacaaacaatccaattatacacttagtttttaaaaaatctacagttaaattattgctgactatagtcaccctgcggtgttatcaaatatcagattgtattcattctttctattttttgtacccattagccatccccatttcccccccatcccccatacagcttttattgtgccgccaacctcctctcctctctctgagtttggcattccctgtgacatgacctgtaattcaaagaaacaacctccaaattagctggatgctctcaacctctaaagagtttagaatcaggaaacatcattatttatgccacgtctgttctcatatcttatttgcctttattttctttaacaatatctggcttttgcacattcaatgaatgccatgatcggcagcagaggagtggatgggttttcctgcgattgtcctccccttttccccactgtttctcacagaggtgaccgcagtgacttcctgacgctctctgatagggaagctcctccacctcctcaccaggctgcctggcgcgctcagcccatcccgattccaggacgtccctgtcctccccagggcctctaacaggcagcattgggtaaaacaccggtttcaactttcaccttcaggaccacttccttcctaagtgccttattcagcaggaaagggaaacctgtgttggggtgtggagttttcctctcagattagcatgcttctctggctgctggcaaaattagaaaagcgtcgaggataaaatggctttattttatttaatgtcaccagtaggggaaatttttaacatcgacacccagcaagccggcccccttaggcttcagaagtcacccccgcttttcacagaacctatataacactttacctctgaaaatgatttctgactatgacccggatatcaaaattaggaaacagccaaaaagcatttcctttcttttatgtttttttttgtgccagttgccctccctgagtcttttcatttaccctggcagagatttgtctctttgcctttaaaagttaaatccaccttcatcgcacaatgtagaaagaagtgaaattaaactgcagtgtgttccagaggagaaaatctacttttttcatctctcagccctactttaacttaaactgacctaattacagcccacaccagaagaagcggaagagctgaaggagcgcttctgccacctagtggaaagatccttgaactgtgcatggagacttccacttttttttttttttttttgctttatttttgaaatgtctggcacagaagtgcaaatgaccttctctagtctctgcatgaatactgaggatatgcatcacacactgctctgttcctttggaaattcaaaatgtaacggtcttctaaagaactctatttagagaaggttgaattaatggctcttcagatgaactataccttgaaaactattttattaagaccatatgacatttcatgaaagttaaatggaaaacgataatgcaaatattaataccctttaaagcaatgttttaaatattatgtcttggatttaatgtttagggatgttagcaccctccccactaaatcaattactcttcctcgtagccactgcacggtttagctagctgaatgatttcttcagtgcagctcctggcttgtttatttgtttgcttttaggagtggtactggacatttaagaatgcttcgttctcttctcctggcttcattaacgagttattgatcaatgacttgaaagaaaaacttggatgaaaaatttagtcagccctgaatcaccaatgctaattaaaaccagggaaaggaaggaaaatgaaagacgtttacaatgcccaaatctcggggtagctgatctcctccttcaccaaagcatcaatacagcagccatgagctgctcagcctggcatttctgcctgtgtcattgagcaaagaaatgtcccccatgcaaaaatatccttgagcatataaagcaaaggaatcggctgtgtgcagtggttaaat

SEQ ID NO: 47614 - DNA, 678 bp, Homo sapiens
cgcttctccactatgtaggatagaattctggctggagtatgtgtgtgtgtatgtgtgtgtctgtgtgtgcgaaatgcttttttaaatatctatgggaaggactatacaatttttgctctttgtttttgtgtttttttagatctgtcgacagggtgaattatcttagagtcagtattagtcagggctctctagaaaaaagaatatgaggcaataattaaaatgttaacacttcacttgaaagctgaaaacccaaaagatgccaagggtgtgatgaaacaaaaaatgaaatgaggttaagggagaaaggatgcgatgcaattgcatgtggtgtattgcaacacaagcaactgctccaggaagtatcaaaaacaaaaatagaaactgcaggtcctctatcaggtccattcactgggcacaggggatatacctgtggaaagcctgaaaagaaaaatctcacttctgtgtaacccacaagtgggatcatttatccactcagttccttctctcctcgagtatctcactggttaaggtctccccatttcctaacgactaccaaacattgcaggttgcataatacatttctaagaggctggtcagaagtcagaccctgtgctctgcaatggataattttatccaagtctggatgtgtcaggataacttagctcaaatacggctgag

SEQ ID NO: 47615 - DNA, 649 bp, Homo sapiens
tggttgccaaagaatgctaaccactgctcctagtaaaaattgtttatatatgcaaaaacagaggtgctgaacaggattacaacattctccattcaaaggctaacatacagatataagatttgattggcttctattgagtacactccaaagagattgcttaacatactattgtaaagtggtaacaatcagaagggtctctatttacaatataatttagtccaggtttggatgaagaataaggagtccagttaatgtacaacatctcaacacaaaggtcaggaagcaatggtcatgcaccagggaagataaacacccatgttacataacccagtttccagggcttaatttttccccttggcataataagtttggaaggtcctgaaattttattttcttttcccaatatggtaatctgtttttttccttcatgagaataaacacaaactcatgccttctctagaatgaaagacactagtccaatcagttgcagtgtatctttaggaaagtgcccagcaatgaactcactgaacactgaactgaaagttttagtaaagttacatggggtagctgccttgaatatacttgcagcagggctccaactacagtgacaaagatgaaccaaggaccccagctacagtgctctgaaatc

SEQ ID NO: 47616 - DNA, 1192 bp, Homo sapiens
gtgctttcacaatggtttagcctccccatgtgaagaactgtctgcctggtttccaacaagtagagtaactagctatggcagtgtgccagggcttacccactcatgctaccaggcagtgacagttgctcataaattccagctgctcatggctagctgattccgtggctgaaactctatggagctcctcagcagctaccaagatgcttttgtcttggggatcttcccatcttcctccttcaccctacccccagtggcatcagctgcatataatgctgtactggtgcaggtaaagtgacatctgggaaatcaatgggcttcaaggcttggtaagtcacccaatgcacctaggaatcctctatctctgctacgtggactttttgtgctgtttggacctagcatgggtcattcatactgctatttttggcttgtatgccacttggactttgcatgagtcatctgtcatgccttttgggcttgagacaagattttagaacttctctctcaatttttccctttgtgggaattggtttaggagtactctatttgaattcaattgtgtttgtgtctgcatttggatttatgtctgtttctatttctctttgtaaaagtgattggtatggtctttatcccatctgcaggttcaggtcccaccagaaaaaatgagcctgattttctgaaagcagcaaggtaggtcatgcctctccttgttaggagaagaacagatctcaccatcctggctcctgattttgttaccctctttaggacttcaaagtattccccgcatttgtgttacagttggtgggagaggaagaggaaatgtgtgagctttcctgcaggcaatctaaatgggcctggaatcctgctggttgctccctgtgttactttagataagaaaataggatccatatcacctgggtccagtccctgcatgatcctcactctaacccattttctttttgtttggttaatttgtcaccttatctgttgtcactctgtctcatttcactgggattgccaggtcagtaggacttggacctggtataagactgaattattaggaagggctgtgcagaccattgcaaacccctggcctacttaaggaactctgtctttgaagtctctcgctgttgtggccatgtggcaaagcttatacaagcatgcccactgagactgtgaatggcattatatacac

SEQ ID NO: 47617 - DNA, 819 bp, Homo sapiens
gtgtatctgttaggattttgtcagagaagattgacatttgagtcagtggactaggagagggagaccaactctcaatgggaactggagcaaattggtaggcaccatccaatcaactgctagcacagctagaacaaagcagacagaagaaggtggaataagctggcttgctgagtcttctggctttcatctttctcccatgctggctgcttccttcctgcccttggacatcagactccaggttcttctaaatttgaactcttggacttacgccagtggtttgtcaagggctctcggacctttgcccacagactgaaagctgccctgttggctccctgctgacgagtcttttggactttgactatgccactaccagcttctttcttcctcagcttgcaagcagcctaatgtgggactttaccttatgatcatattagccaattcaccctaataaactcccttttatatatacatatatcccatttatgctgtccctctagagaaccctgactaatacagattttagccatggaaatcttgaagaaaaagagaaagaggaagagaagggggaggaccaagaggtggaggaaaagtaggtggcaggggaatgcagcaatgattgaggagaaaaaaatgggaaagatggaaggaaggaaggaaggaaggaaggaaggaagggagggaaggaggattgccagccatcattccagaggtcacaagatacgctacttccccaattactccggcagaatacatcactattacaaaacctaaaattggcttttgagatatcttttcagattttttgcatgcctgatacat

SEQ ID NO: 47618 - DNA, 1325 bp, Homo sapiens
tttggcgcgaaatctgattattttatccagtatgtcaacatagaaaaatttaatttacaatttaaacacattatttctctctcatgcaagtattgaaattaaagtttctaaaatcaaaaaggcttctaaaggacactgctatatggaatattaatgtggcatattaactggaagtggtaattcctgaatgacgccaaaggcaattctcgcctttatactttctcccagtcaacatacattattttcttgtttttccttttctatccttccttttgccacaaacaacaaaccaaacaaaaaagcaaaacaaaacaaaaacccttcctcctaccagcagagagcgctagcgccatgcgcggcataagcgccaaaatgctcgggtcttctgtgggttctaaccgccgagagccaagcaccctgaggttgtcccagctggggatccgtagttgacttgacgtcgctgagcaacggaagagtgggcagcatttgctctgaacgctcgtgcgcgctaccgcccagacggaagcggaagtgccggtggagcgcgagtaggaagtggtgagttcggagtagagatggccgcgcttgcaccgctgcccccgctccccgcacagttcaagagcatacagcatcatctgaggacggctcaggagcatgacaagcgagaccctgtggtggcttattactgtgagtctttccgagtggccgcgccctttctttcccagttgcattttagggcccacacacctccctgaggttcttggggcatgccccgcccccctcgctttaaacctgagctttgacctcgagcctacccagggaactccctgggttcccaccccctggcagtaggaatcccaaaacaccatggtgtccactgcttctcctatcttgtgcttaaatgctccagtactgactacacaggctcttgaactgtggaatataatcttccaaggttttctctgtgtgtgtacacacaagagcttcttgtctcaaataggaatcctgaaaataaattgagttaggtttaaaacgaaggtgagtgtccgaaagaaggagtgatgtggataaaaggacgatagactagttgaaaacatagtaataagtgaatattatttatgacagcatgcaagcccaatcagaaactcatttggttaaatggggagtatctgctactaaataagcagttgaatttgacctttccccacccagctgctctctcctaccatgcagaatttttagttttgacttctttgaataatacccgctgttgagacctttgaaagcagtattttcactttgagtgttatacgttgaatttacag

SEQ ID NO: 47619 - DNA, 1579 bp, Homo sapiens
cctccttctcctcgcttttgttacccaataaataggaggggctgtggaagctcaggggtgcctttgctcactggaagtggggagctctcttcttcttccccggcttcccttcctttaaaacagtttcttttgttttttgttataatttctaagttcgtcccttcgttcagtttgtaatgacggtctcaggcagtaacaacagtaactgctataatgaccgtctcaagtagtaaccgtggcagtcggccacattatgacagagcctatggcaggccagtcagtaacattttgtagatggctacctacactattaattctcatgaactgttctttgcctctagtctttaccctattccagaactagcgagttgattgcatcagtctctgagtaacattttttaaaacttgacaatatgcattgacaaggagtttatctagttaaataattcctatttaaatacctggttaatgatatttgggtcttatatctaccctcaaatcaattttatatttttaatgacactacaggtcaattccttttaagaaaaattggcaaagaaatatttttatgttttatttggataatggtcccagagagccctggcacacattttgacagagtgaaaaaggttcaggaaaaaacccacaagcataatgaaaacagaggggaaaggtaaaatcaacagtaagtcttggatagaagtgaaagtgtgaccatttgcaatagcaaagagtatacctggctgtctttcacaattcacctaaggagttgctcacggatcttgcatggtggcttgaactctagcatattccttctgatcctgaccgaacagcagtcctcctcagtctcaagagcctcacattacatgtgtgaggcccagtcccaaaccaaggatctagagtccttaggtgcagcacccttcctacttgctctttctgattccagaactctgacctcttcttcctcagttcagtagggccacagttttctttctggttgcattctacctctttgtgctcagaaaattttctccaggcacagagctagcatgaagtgagagtcatctcgtgagattctcttctgttagggattaaaggcttgcactgtcaatgtccaaagtccactgtctggaaatcattgcttcacatattttgtccaatcttttagctttatgttttgtatgggtaaaagtgaaagtcattcctgtttgataagatttttaacaaatccttgcaatgtttataagagacacatcaaaatacattgaatataataaagagatagagaatgatagactaaaaaaaagactaccaagcaaagctattgaagccttattggccgggtgcagtggctcacacctgtaatcccaacactttgggaggccaaggcaggcagatcatggggtcaggagatcgagaccatcctggctaatatggtgaaaccccgtctctactaaaaatacaaaaaaaattagccaggcgtggtggcaggcacctgtagtcccagctacttgggaggctgaggtgggagaatggcgtgaacccgggaggtggagcttgcagtgagctgagatcgtgc

SEQ ID NO: 47620 - DNA, 1479 bp, Homo sapiens
gcataatacaatttaaaaccacatgtttcagccaatacttctggtagaaactcctacctcaacaggaggaaattaggtattctttttgatttattaattgaccattaggcataggcatttacatgcatgcagagaaacaagtgctgcaatgaagtccaagtgttcaaagaataaagtttcctataaacaaaacgaagtgaaacaaaaccctatcccaagagaaaccctatttagggagattccagagggcatatcttttcagcctcaggcagagaaacagtacaaaaatttctagagaaattctgggcacttatcaaaatattcccctcactaaagcaagagggtatttcaaagaaaaattgagtaatgatttggcaatgacatgtgtactgcagggcttccaatttaatattcaggtttctcagcagtccaaatatcaagtgttcctgaatcacatttctatacacctctaaggtatgtaagtgatatttttccttgactagcactcgctcaagacacaatccaaggaaagctctctctagtcatttttttcacatcctcttaaaaattctttggattctgccctgacattggcatgttgcacaataataaagtgctgctctctcctgatcttttgaaagatgaacaaaaaaagggtcatgtttcagttgccattttgttccttttctgattcatacttttggaatgtagctatagattatgggtcatttacaatcgataggcagagctgatttcccagctgctgacaagggccttatcctggaaattacctttactactactgtaaaatcctgaaattctaccccaggtatgtattaattgtgttccctacatgttaaactacaaatatccaggaaagaaggtaactatcgtagctctagttctaatgtttatttacaactttctcaactttttagttggcagcccattttgatgagggttagagagagaacagaaagctcatgagggagcccgtacctgagggaacagaaggcccatgagatgccgtaaaggaaaggagagaaaaaaaggaggggcttttaagggaggttaagcatgaagggtcacatgtttaagagccaaattaatgtcactttcagcctaaagtcttccctgtgtgctccagtagaaagcaagaatgtttcctcgttcctatcaactgtggtaagattcagcactaatatcaggatatcctcacatactaccttgcattgtggtagtttttacaaatgcttaatcttctgttttgtgtaaaaatatattttataaacttctctaatcttttttcccctacttactcttaagctggtttgcctaaacctgaagcaagtcattttatacagcagctaaatctggagtaaaaggtgaggaaggaaaacaggactgactaggactgacttccttcctgggacaaatgatgctctcctgaactatgacctcagagcacctttagacaca

SEQ ID NO: 47621 - DNA, 1076 bp, Homo sapiens
tttattttcatttatttattgatatcactatatatttactcattaatatgatgtttattctttaattatttgaacgtttaattttttgaaaacatttgtagcactattttgaattttataactgttatatttaactcccagtcccacttcaaatgaatttctattgacagctttaatctctttttttgtaaatattttgtatgactaataaactttagttgaactttagacactataaccatgctgtaatgtgttttcctcttctgagaattgttgagtttttgctaatattctgtaacttgcctgaactcaaactgtgacacctatctccgcgtagtacatggtaactaatacctccgctcagtgttttggcttttagtagctggtattttacttcaactggcatcttggaagtctccatagctcatgagaaaaaaaatcaatatgacaaaaggggtgtgcgtgtgtgcacgcgcgtgtgtgcacgtgcacatatatctttattttgctggatgaaaatggacagttgtagaaccagtatacactgagagttcctccaccacactgataggccaatggattatttctggaaaagatgccacattgttacatttcctcattcagtcttgcctccccttctaaaacatgatgaaatggaagctcaggagcttcagataccacccagcctatccattctatttgatttaagcaataggttactgatgttgattttagaagtttatatttacttttaagaactctgtgtcctgccaactctgcctgagattttctgtcttctctcttatagttgtcaggattttactgtacttgggggcccttttaaaattatggcttaacatttcaacattgtgtttcctactgtcatcaaagatagatgacttaaaaaaaaaacccagaaatctgaaaacagtttaaattacatggaagagattcaaataatggccaatattcgcccaacactttacaatttttaaggcattgcccatctattatctaatgtgatccacacaataagtagaataggtgtctataattgtaattttaccaaaattaag

SEQ ID NO: 47622 - DNA, 1768 bp, Homo sapiens
caggggaggacaaagagctctttctgtgtttgctgcttcctaattgccttcagctcaaaataatcattatgccaatgtagcatatatggggtggcatatcttgatccccttcactagtttatcttacaaagcctgttctattgctcacaaggtacataacttggcctactgcattctcttaaaaagagaaaaatgagaagctatctcttctctcatgttaggaaagaggttgggtgggggaggggcggtttgtgagatcagggagttgagtggtttccaagagaagctgtgtaccctgcccctcagatagaggcccaggaaggcggcaagcccacaaagagagaagggctgcttggagggggccaggcttatgaagactgtgataggccatcaagggaatcaagaaagagcctgaaagagcctcacttaccagactgacattctatgtggaccaacggccagcgaccaaaaaggttgatatctactgacacaagtaagccaaagaccactttcttctaccctctctgctgaagaaagcaagaaacttgatgaaacaggaggacttggattaaggcagaatgaaacataaacatataaatttccaattgggttgaattatttacaaatatatatttattaatctacttgatttgtagaataaaatttatatatactccctggcacacagaaggtcattatagttactattcctgctatattttatttcatgtgtatgtccatctctttttggttaatctgatgcttaattgtatgtgtcaacttggcttggccacggtgttcagatatttggtcaaacattattttgcatatgtctgtgaaggtgtttcttggatgagattaacatttgaatcactggactttgcataatgccctctaggttcatccatgttgtcacaaatcacagaatttgtgttgctgaaacaattttttgctgctcaaaaagtcaacactaatttttatttacacaacagtaatatccagttcaggaatggtaagaatctcactgtcatcagggctgaggtttgaaatccactttgagtacattgcaaagagggctgacgttgactcacatgcacacaggaaagggcaagtcacatgtgtggtgaggagccagacactgaatggttaaaataactagggctgtcaaaactgaatgaaggaaggctgaacagagagatgataactgtcttcagatatttgaaaggcttattgtggatgacagaatgtgcttgttctgaatgggagttgaaagcatgaatgtttgattcaacccacagaaagaggaagcttctcacagttgagtgtgcatcaatgttaagggattcaaacagatgttcaatattcattttgtctggaatgttgtcagaggattcctgtatgtagaggaatgtggtcttggcacttttcagtttaggataatgataataggtcgggcagagacaactaatattagcaaatttcaggaaatatgctgagtgcttcatgtcattagaatgtctaatgacatcagaatgtctcactgaatctgcctaacagctctacgagttaaacactataagtattattattcttattttacaaatcaagcttagtttacatagtaaactgccagagttcacaatgctgagaaatcacagggtcaagtttagaatccaggtctattgcattaaaagactatgtactttccactatacactccattttcctaacatgctttttcaaaagaaaagaacaaattcttagtttg

SEQ ID NO: 47623 - DNA, 4621 bp, Homo sapiens
ggagttggactataacttttccctgaatctccaggctgcctgactgtaaattttgcactagtacctccacaataccttaaaactaaaatatatatatctatgtgcatacacacatctagctggctccgtttttctggagaacactgaataatgaagttatttatatgtcttttctttttttgaggcagagtctagctcttttgcccaggctggagttcagtggtgcaacctcagctcactgcaagctccacctcccgggttcaagtgattctcctgcctcagaaaaggtagctgggattacaggtgtgtaccaccaggactaattttttttttttttttcagtagagatgaggtctcaccatgttggccaaactggtctcgaactcctgaccccaactgactcgcctcagcttcccaaagtgctgggattacaggcatgagccaccgtgcctggcagttatttatatttatttgctcttatgtttccaggtttcttctaactttaaaattctatgactggaacaaatacatatgtgaacttggaagtagatctttcccctgtccagccttcagatcagaccacagccttagtcaccactccaattgtggcctcctgagagacactgagctaagggcatccaggttcttgacccacaaactgtgaaatacatgttgcttttaaaaaattccaagagtggcccttaaatttctttgggactataccgtgtaatagcgactgactcaaaagggtagtctggaaacctaatcttagcccctggtcacctctagctagtgtgcacagacctcagatcttgtcagtctcatttccctacctgttaacgtgagacagttgggcagaagaactttagcttcccttaaatgctacaactcagcgtctctattaatcataccgtttattcatcaaaatgaatactgataaaaatgacaagtagaacacaccctagatgttcaggcctctggaattggtggcagcgttccagcttcctttctgcctgtaactgtgagtaagtcctgctttacctccttcccaccccccgcacccaccaacagctctctatcataagctaatcagcttgaaataattgttagggcacttctgtgtatggcctgtgcatgtgccagtgtgtacaccgtgcaagctgagctgttgaggttctggatgtgcatacagccctggcaccggaaggtttgcctctagcattttgtggactaactctggcagtacacaatgggaagaaaacctctttccaagtgtgagcccttctctcttctcattcccaaggaggtgtgtccagatccctttgccagacagctactttacaggagcattggagagcaggcagctaactttccccaacaagcagctggatttacgttggcaaatcaatccctctcaataaaatgttatgtgaccatcttcccagccccccgttaaaatcccttcattttttcgagcaagcgaactagtcagagaagacagaaaagttaagtaaagaaagtggcagaaaagtgaagcaaagcaacagcccgggagcgtggcggggggacccgcgcggggactcgggtaggctgcaaacgctggggagatgccacaggagcgcctgccttcccagcttctcctttctctcgccgagggtctctggggttcagcgctcccggcgtttcggcgacctccgggtccgccctgtcccctcccagctggggagctgagcccggctctgcgcccatcgccgaccccggccactctcccttcgctgctcgctccaaaagcgcctgtcccgccccgcggggcgacttctccctttcggccctggggttgaagatcctgtgtggggcagctgcgccttcgggacagccccagccgcggagcgcccagaccagggcagccggagtcgggtcatacgccgcacgccgccggggccgccgcacctgagcccagctccagtcacgccggaagcgcgggcggagcgcacgggtccggggagagtcgcctgcgcccgcgagggggacccaagtacctagggtggtggccgagtcccgcctcccgccagcgggggcgaggacctgcgacgcgcacccctgcctggcccggtctcctcagcaccagccccacgcacaccctacttcctcagcttctcgccctcaccctgccaacttccctgcgaggagggacctgccgccagcctgcttcctcgtccgcaggccctgcgctgaacgctgccgcgcccagggttcaccttgcgccgtcgggaaagcccatgaactctccagaaacggcgtaaaggagggtcccgccgcggcgcagggctggggcgcctgggttccccctgggtggagcagcggcagcagagcgggaaagtggtggaggatgatcttgcggccaaaggggacctcggcgcagtaatgtcaacatgtaagtctcacctttcagcttggaattccttcactcttttatctgtgtccaccttctgtcgccccctccccgaccaccccaccctcaagagaaatgattttataaggacttcaactgcacggagggaataaaccggtttgtcttcagtttgcccctcgaggcactgaggagtaggactattgccaagtggagttgtgacatgtgtgtgtggctgttttttttcccccagcgaggtaaacctcacatttgggcggtgtaaagcctaataagaagggcagggcttcaagaatggggaaaacgtgttttcaattcaaattaaacaaggagtaacaggcaccgctcctcagtccagaggcctggccctgccaagaaggcgctctccggaatcaacacctgggggcttggaaggtactagtatgccgagaaaatgttgactttacacattgtcaccattgactgtagaagttattcttggatctttggggtgtttgaatttttttaaggtgtgcagaaaatgttttcagtgtgctttgtagtttaggaagtaattaagggttacgccacgttacgtgataggatttgaggggacttccatagacttatggggggcgtggggaattggggcattgaaacagagaaacctaaaaggttttgcctccatagaattgtcatcctaatggtgaggtggcgcacagcgaccccatgaaagggtcgccaagcaccgtctggctttccagaatgggaaaaggaagattgtactccaaagggccaagcttatttttgtggccaactaagaagtttctttttcttgtaataggtaattttccttctgatgttttagttaatcttggacggacaccgtgacagacattttatccccttccactaactcatgtacaacaatttctagaacttggtacttaacactccttcccccaactcctggatcttacatgaatttactctttcagttcagtacatggggaaagacctgccccctaggtcctgtttttccacactttcctgcactttccattccctacttccccactccccaacacacattttaaaataggagaaagaaaggatagtgcccacaagcctagcactctgtaactctgttccaggtactgtgagatgtaatcagaaatgaaccacttatttttactgaaactgcatgtgaaataattccacacctgggagttttaaagtttcatttatgccagtggaatcggcaaggtacaacttgaaaaaatttattttgggatacagccagcattttcatataagacttgttctcatatacaggctacacattttgaagtaatatgagcttgttttcaacttcagtttttcttgaaaatatactagggattttacagcaggtatttgcccagtttttttcagctttcctaagcatttagatcttatgagaaaaaaagcatattacacatgaaagtataaatacctgtttttaaaataaaagatgttaaacttatcaacaggtaatgtaaaaatttcctgatcatgaaattaagttatatagtccatttgaattcttcgtgattaaaaaatcatgtcattatagggtaaaagcgtgaatatgaaatcacatagaaaatagggcttgatacctagatttgagattcttttttgagctattttgactgaaagttttcattttttaccagatggtaagtatatttttttccattttgctatttacgattcatatggagtggtttaggatggcctgattctttttaggtattggtttgttagaatatatggaaagaattaccaacctttccaagattaatattcttactatcttgttgaaaaatgttaaaatgggtaacataagctatattatcctttaaattttaatagattcaagttcagaaactacttaagtgtattttctgcctcctccttgtggagaaagtgtatttgtatattgttatactcaggttctttaattatagactttacgaatatatttgggagttgtagtgactgcatatttttcataccctaagaaatttagcagatgtagcaagacttgcattaattcgtctcaagctgcatgaagctactgttccatttatggcttatataaattacatgacattgtgctttttcaatatgaatggtgaataaggctattgtctcttggcttatgggaaa

SEQ ID NO: 47624 - DNA, 1026 bp, Homo sapiens
attgttgcatttagcagcattctgacaggaaagggcttacacagagtgcagtagtaagaaagcaaaagacgtgtttaaagagctacaggcaaatattcttgtttattacaggtgatcggaggatagtattgagaaccaagagatcagaaatagtgttaagtcatggggaaccttgaatttcaggtttagatgtttggtttttggtggacacctgatttcttttgatggttttgttgtttttgaaatagagatggacatgatgtgaactttttattacacaattattgatcttggtagtggtggggaaggagtttttaaaaaggaggattggaagggaagtagaaaaagttaggtgagaaaatcgaaggccagaatataaatagagaatgaaaatggagaacaggggagcacaagaaagccttttacagttagaagtagtgaggattcagttcctgggaggacagagctgcctttcattgcaatggaaatacgtggagagaaaagctttggagggcatcagtgggaaaggaggttgtcttgtccactggtgtcccacactgcagaagtggtgcatggaacagaggtcaggagttgagatcccgatttggaagttatttacacagaggatgaatctgcaatcatgaagtctgatgaaattccaataggaaaaccatagggggtggggtgggagagaaaagagatctctgagctgaactatagacagcagcaaaatttagggaaaaaggagaaaaaagtaatcagagaagaaggtgttatagactacttaatgatgtaagaagaaaaaccaagagaatatttcttggaatctgagaaaagaaaatttcaagagaatgtaatcagggatcctttgggagcccctgtagtaagaagtaagaaaaaaatgtgagatggaagtttccatgggggatgtgaaccatcccttcaagaggtttggaactggggtggccatataattttgtaaatgtgaaagaacaaacagtaaaattacattagtcaaagttttgc

SEQ ID NO: 47625 - DNA, 4602 bp, Homo sapiens
gtaatttgtatatgatattggagggaagtttactgggaatttattcccacgctttgagcaaagtagcacccttatgatgactcaaggccacctcccaatttctcagacccatgcctgcccttctggcctgagaactcctgttacccacctgttcgtgtggtccatggcactcctacaggtggtggaaaggctgtgaagtgatgtcatttgaaagatatttccttgcaggatgttggaaagtagataaaccacaaccctgttccacaagggaactgcagagctttataagagctggtgatgttccctaagatcttctctcagtgttaggatagctagaaaggaccttcagggactccttgagaagtcttttatcagagaagaaattgagaaagtcaggtgtgtatgtttggtgtgggacagtgaagaataaggagagggaatggtgcacttcctgcattctgggtgactgtctttaattcaggggtctcttttcaccatagactgggacattattaagaagtcatagtatagaccattctaatatttgcctttttatgggacaatgttttgaagatgtcagcaaccaaaacaaatatggctatgttaataattgctaatacttatatttaaattgaacacacattttgtactaaatgtcattttaagcacttaacacatattggttgattacctacaccatagatcccatgttacgggttctataattgatcctattttgcaaataaggaacctgaggcacgtggagattaactaacttatccagtgtctcttaattagtaagtagccaagccaggattggagcttggaaagtttggtattagagctgtgctcttctaaccagtataaattagactgtcattcatcataaacaggattagatattagatttagtaccaggataggctaaagctcattcttgctcaggggagaagtatgaaggtccaagagccatctctctggccagcagtgcattctgtgagaaaacactaggtttgcagtgtgttaacatatttgtttcaaacaaataatatttgtttcccacaatacttcctggatacctaactatgaaaaagtatgattcagttttacagggattcctaagcttctctaagaatttctctagaccagaggttggcaaattaggagggcctgtaacaggccatgcatttttgtttacttgtttgtttagagacggggtttcactctgtcccccagggtggactgtagtggtgccatcagagatcgctataaccttgaacttctgggctcaagtgatcctcctacttcagctctcctgagtaggtaggacatcaggtgtgcaccaccatgcccagctaattttttaaaacatttattgtagagatgaggtctcactgtgttgtcaaggctggtcttgaactcctggccccatgtgatcctccctcctcagcctcccaaagtggtgggattacaggcatgagggattgtgcccagcacacatgtttttttaatacttgtttttctttttcttttcttttttttttttttttttttttttaagttggggtcttactgtgttgcccagactggcctcaaactcctgggctaaagcaatcttctaatctcagccttctgagtagctgggactaagctcccttgttcttataaataaagtttaattggaacacagccatgcccattagtttatatattgtctttgtctgcctctgtgctacaatggctgtgttaattgattgtgatcaatacagtatagcctgccatcctaaaatgtttacagtctagccctttaggagaacatttgccaccccctgaaactagtctaaagaactgagagtccgctttgctgaaccacatactttggacagcactagaaaagacctgctagatctcctcagccagggaaaacaaaccaatcacccacaggctagtttagccctacgacatgggtggtggtagtagcatttatttgttcctgttcatttacatttgtttcacacagtgcttttaattgatgaattatttccaatattaaacaattagatttcacataaaaatgaagttttggatttttctggtaaacagaatacactaggctactatatctgcatggccaacacagctggagctaaatggtggctgctgctttcaaaggagcttcccagtttactttagcccttagcaaccccttattcttcccactccagccccctttttgtctttagatggccatctggccctgatgggcttttaaatgggaatgctgatttatgccactccctttatacgggccaggaaactgaagcttagacaaaaaaaagtggcagaggcagttggtgggctccaacacgtgtctcctgtctccttgtctagtatttatgtctgggaatactcatttaaaaaattattttaaattattttaattgattgataagaactatatgtgtttatggtatacaacatgttttaatataggtatacattgtggaatggctaatatgagctaattaactttcattgttatctcatatacttatcattttatttgtagacagaacatttaaaatctctcagcaattttcaagtatacaatcattgttattaacaataatcatcatgttgtacaatagatttcttgaatgtatttctccagtctaactgaaattttccatcctttgacccatacattctcaactcctgtgccccatccacccctgtgcccctggaaaccactcttctattctttgcttttatgagttcaacctttttaggttccacatttaagtaagatcatgcagttctcataatttcttaaactctgtccctgagactcctttcccaagccttaagattatcggagtgcatcaaatacatactcatgtatcttagtcatctataagttttcaaagtaattttgtcaaaagggtaccgtgaacttaacggagtcaatatatttgagtctttctaacttttatagtgatcttcttgccattccaagttgacgttaaacactcacattccagacattcagatgtcctggactgtgtttcaggagaaatgatgggagagggaatttcctgctgcttaatcatcagctttgggagttgaagagtccaagtcactcattaactgacaggaaatacctgtaaacagagattatatcaaggcttgttagctaagcaaatctttgataagtgtaccctgttaacattttaacctttcattttttttccaggaaatgaaagcatcttgctgtttatggttataatttccaacaaactaatcagtacagtaaccaatgggagaatagaaatttatttctagcattccactgaatggacaatgtctgctaaatatgagcttttatttcaggattaatttgtgatggaaaaataaatagattttgcaaaggtatattgctaaataaattttagtacgaaagtaacatagtagaattgaactgactcaattcaacattaaaatatcctgtcatttttttcacatattaaacatcctagccttaataaaattgatatattattaataaatactctaacgattttagtatatgactttgttttcctatacttttctaaaaaatatttgggaattttaccttaattaggaaattttcagcagatttttaaaaacatggttaaacctgtcaatacttttaaaaacgaaatgtttatttagcagtaaatctgcttcattttatagcatcttcatttttctcataacaattttattaaatacattcagttttatgaccctcatggatagataaatttttagtggactctttaattataggtgcaagtatttatttgcctgtgtaatgattcaagtttagatactggctgatgtccgtcaattttcacaaagaacagacagtgccttctctactagttttatttattttactgattactactctttcctgagggagtggtacagtataacgcaatgaatagtctaagttcaaacaaattacatttattttaacaagcatttattaggcacttccattggttagctactgtggttgtagagataagacacacttcataaatactttattgttattcttttctgaaatttctggatttgtatttttgtttccctctctaggattttttacagagtttgctaaggtttcatcaactcttggatttttaccgtttcataatcattacagttctgttcttcatagctataaaacttcaattcattattggctcctcccttgcacttctaacaaatgattgaatgtaatatttttagattactaaatcatttttaaataataaaattaagataaatcattttatctttgcaaaggactttatactctgaggatgcccaaactctttatgaacatagatgactaaatttcactttaaatatatttatttatgaaaagttgaaaaattcatcttagtagcaactgcaaagaaaaaaatgaaaggaattactgtttttatttttctgttattgcaacttattgtgaggatttgctcttcagttatttggagtatcattaagtaggtatgagaggagcagtgggctacacatcagtctttt

SEQ ID NO: 47626 - DNA, 944 bp, Homo sapiens
ctggacttttccaggtaagcacattcattaaattattgtttttcaactgcaaatgaagtttctttgagcaaagaaaacaaaactttagattctgttgaaatatatcagaaggtttagaaaaatttactgtgttttcaaaactgaaaatttttaatataattgtttaaatattttatttcagataatatgctaattaacaagttgtatgtacttcaatttttaaaataattcaagtattaggctaaggcttgcattaaacaattagaaattgaattagtgaagaaatgaccgtttattattacttttattaaatattttatgctctccaatcatttaggcctttacagttaaagaaattgcacaccaaaggaaagggttttttttttttctttaatttagcagtaagtactgtttacataatgagcagcattcttggctttaatcagttttcccattagtatttcaagtgacctttggtctttacacatccgcagagtaagatggaattgtgctaagcacatattatcatttttattggcatcatttctagattctagaaggcccactgccagcaaacactggtgacctctgtttgcctttacaagtacaacctgatcgagagcaggttcgctgggccctttttaaaaaataaaacttatctattaaattcaagatatcattgcatattgaacaatgtgacttatataaaatagcaagtctcaaggtcagagaattgtttctaatagatctgcctttatatgtcatgtgtagaggagcagccaagtagagatatagtcaaggaaaaataataccatggaatccttgacagtagttaattccaaaatttaaaaattttatcaacaaatgttttaggaaccagctctatacaaatttggtgatttatatgaatgcaatttatatattttgtataaaacgtgtaattt

SEQ ID NO: 47627 - DNA, 1899 bp, Homo sapiens
aattataaaagaaaattcagtttccttccatgttctcttttttgcaaaagtgatagcaggcattctttcaaagaacacttattttttgtgattactcattcaggtatgtaagctttagcttaattcatttaaatatttcaactatgtgcatgttgtaagtctggtattaaataaatagataacagtaacaaaatttactcttcagagatgatttatatgaagccagagtttgcctgcccacgacttcatatggccagttccttcatatattgtctaaattttattatgagtttgtaattacgcattattttttctgctgctatctgattgaatggttaattatatatatatatatgtgaagataagcatcattcatgttctctttccattttctaccttgtctgtttttgtaatattaaaaattgctggtagaaaatcttttcagaacatatcctttttggtgatgttctcttatcttttcagtttttccagaccaccaagactttgttaagagtttttcttgacttagaaactctttattcacttgtataagatattcccagagtctgcattgtcccatgacacattcaccagttcaccatatgagatgctaaaacaatgcacctcatacctataattatatcttctggtctacaaatatttcaagaatttaatgtcttctgctacatttctttgtactaaaactggctttcatgaagattagtacattttcatattggctatatcataaaagttttcatattttcattctctaaaagaacaaaacaacatgaaattgtgtataaatctgtaaacaaatctgtaagcagccttatttaatttctatttgaaattctggatttaattgtgatttgcaagtcataggtttttcaagaatttgtgacacatcacttggcaatctctcaaaaccatgattcatctctctgggctgatgaatcattggttgagttagcctatctgtgaatcaagtggcaccaactcaaaccccatcccatgtaccctgggtgccccgtgttctcccagtgttttaagggattcctgggataagaagatagggggagccccctcagactctgagcctctgcttctgctgaattccatcacttcgtgcatggcttgatgttgcagagatactgtacctgttctttactgcatcagtgaaacctgaaactaacccacatttctttatcacacacacacacacacacacacacacacacacacacaacttaaggcctgtgtgtgagtagcagattttattggcattttgatgacagttaaaggcaatttacatatagaaggaaaaatcataaacattttctccataatttaaaacctaaaagtttacgctagatattcaatacatcccttctgtaagaacactccattttttaacatctacataaaggaggtacttttctcctccaaccaggattgagtgagtggtcttacctcaagatttattcctatcccaatcccccatttaaggcagaaaagaaagatttttctaccaagtccagacctgtaagtctcccttagcacattgaaattaatactttatattaatacactggaaagtatttacttctttccactccacaacagccccaaataatttaaattgtatcctttcagtactataggaataaaaaagtctatgacccccaaaagtcttaatggcatctcagttatgaaaataaagacagtcccacctcatacataccaagcattgaaataaccagggttaggagcctccgcaccacccttagagcctggcagtcacagcaccagcaccagcctctggctgagctccttgctacctggcaaggaacctaaaggcttgagggtttggccatatagactactgtggtctccatt

SEQ ID NO: 47628 - DNA, 1002 bp, Homo sapiens
ttccttctctctgaagtgggtttagacagtcattttgctgttgtgaaattcacatccctcttttcccaaaccacatccatgcctttctcagttcaccctccccagaaacacctactctcaggcaggattggcagtttgcaagtttagagtctcatagaagagatagatgacaaataaagctagaaaaaaaaactcttttcaaggaaattgtaagacctcttgaaatacaaaacctatttttccaggtttctgattttagccagtatgaagatcaatggaagcaaactgcattacaataaatgttgtcagtcccactgatattccttgaaactgtatgttcatggaagcccacagtctggccttgtttcagtgggatgcttacctgaagttcacctcactacattccagttactgaagcacatgacaagttgtgacttgtgcatagttttcccctgagttttgaaaagtagaaagctgttatttagctttgtggtttgttggggtttaaatttctgttgctattgcagctgtcttagcagtgcaaatcccaaagcaaagaatgatgtgaaaaattttgctcattttgaaagtgttagagaattttttttaactttgactccttgaattctccaggaaatgatgtcaatcagtttaaacaaacagcactttccacagagctcccaggcaaagtcacatggtgttctgtgtgcttggagctcaccaggttggtattatgagaggggacaagtcaattggtaagttatagcaaggaggaaagtttgaaaaacttggaggatggatgagttcctgagtgattacctaattcattctcttgaccacaaacagttctattgatgaacctttcccaagagatggctttctattgtgttttcaaatatttttagaggggaagctctgctctgcaggttagataaaatgggtaaactgtcaactctaaggtgggctgtaagtaggactaaagacatctgcttcttgtctgtg

SEQ ID NO: 47629 - DNA, 1494 bp, Homo sapiens
agcttaagctgcacttattatattttatatcatataaacagtctgtaaagagaccttaaaaggcaaatagattttttttttttttttttttgttaatcacaacaaggaaaaggatggttcaccttcacctccttgaggttgttatgctttgtttgccaagcaatccggaataagaattatgcaacagaattctaatagaacactctcaactgtcaatatcatgtacagatcatgtctaccagtggcattactgaaggtgaatagtgaatactgtcttcacaggaattctgcatgggacagtgatttgctttgctctcctgttacctctagactatttagatcttctcagaagaaatgtgatggatattgtctttgtctgcccaagttgccatagtaaaataccatatactgggtgttttaagttacagaaatttatttcttacagttctggagcctgagaaggcccagtcaaggggctagacagttctgtttctcctgagggccttcttcctggtgtgcagatggcaccttctttctgtgtccttgcttggcagaagagagcatgctctggtgtctcttcctttttcataagggcacgagccctgttggagtaggaccccaccttcatgatctctattaacctttatcatctactcacaggctctatctccaaatacagtcacattgtgggttaggccttcaacatgtgaatttgggggaatacaaaaattcagtccataacattctgcccctgacctctcaaattttaaattcttcttccatgcaaaatactttcattttgttccaacaattccaaccctaaaagtctaaattcattccaccatcagctctaaagcttaaagttcaaagtctcatctaaacatctaaatcagatatagatgtgaatcacagtatgattcattctgaggcaaaattcccctgcagcttgtgaacctgtgaaaccaaatgagctatgggcttccaaaatacaatggtgagaatagacattcccattctcaaagagagaaattgggagaaagaaagtggtgatgttctcaagaagacccaaaaccgaggagggcaaatccattagaccttaaggtttgagaataatcctctttggcttgacgtctgtgattattaatactgagtgtcaacttgattagattgaaggatacaaaatattgatcctgggtgtgtctatgagggtattgccaaaggagattaacatacgagtcagtggactgggaaaggcagactcactcttaatcaggatggtcacagtctaaccagctgccagcatggctagattataagcagccagaaaaatgtgaaaagacagactggcctagcctcccagcctacatctttctcccatgttggatgcttcctgccctcgaacatcaaactccaagttattcagttttgggacttggactggctctccttgctcctcagcctgcagatggcctatggtgggactttgtgatagta

SEQ ID NO: 47630 - DNA, 2439 bp, Homo sapiens
tctactgtccaatctacatgtatttgtatggccgggaggagagggtagaccattccaggcctgggaagccgtccagggaaacaggaggaagagagccagggaagtgtgtttagagtagagagagcatgattagactcaagcaaaggagcacatcacaggaggaaagaataattattttggacgagtgggcaggatagtttggggagtgccctgagagctagtaaggggtcatggtcatgacatcataggcagttgggagccctgccagacttagagtggtggcatctgaaagagactagggttaggcatgcagagtggattggggctacagaaatccatggcaaaacttattcatgtctttttaaagtctttttggttacaagcatcaaagccagcaaagtttggctaatcaataaacaagaacttactgtaaagatgcaaagtcatcctcagaagtcaatagcagatgtagccctgcctcttttgactcggttcattctttggcattgccttttggttttctctacacactgacttgttctgattctccctgcgtatggccaccatggctccaaaattcatgtctgagccaaacacagacgctgatctctagttatccatttctttaagtccaattccaaattcccaagagaaagatattgattgtccagcttgggtcagtgagaactctgatgcaatctatggccaaagtggaagagtcatggtggatgctcggttacttggccttcccttttgtggagagggggatgattccttgagaaatggtgtcatagactgggaaggaactccaaaagatgtttacaaccacctgccagaagtctgctggtgtattttaatactgccatcctgcaagctcagtgtcagtaagaacagaagaaagggataaatagaggtaatgtttgtcatatttctagaaaccggacaggtttaggacacattggagtgccagccatgggaataacatcaggatagaatggtctgggcaaagctgaatgggaagaggcatttccacaaaactgcccaaggcagtggcactactaggttcagaagaattcagagacccagggagggctgctatttagaatagctcagaacatcacaagtgtgctggctttccactttaatgtgaagctgggtgtggagtttttaaagctctatgcaagacctcactgttcccaaaacatggaaggaagtgtttgacctcagaacattctcatattattaatcaacacaccaaatatttacccaggacctagtctgtgcccagtgctgttcgatactgtagtgctcggtcagtgctgtagagacagaagggccatccctctgctgttgtagaaagtcccttcaggggttctggagggagttgggtgccaggaagtttcccagactcctctcagcctcccttcccaaactcaaagaaacgtgctccctccactctcctcttctgcctgccagagtttccagatttgttctgttttgcagttgcgtcaagccacactcaattccaatcctagcagaaggcataaattaacattttattatgcgtgcttgttagggtctcttaaagcagacatgcaaattcgaggctcccatagtaaattagggcatacccagattttgctgaaaataaatcaagtcgccctggccaaacccttggaaagcagcacttctctgagctatcctgggacagatgctcccctcagctcctgccccaggttgtttaccctggcccctggccatttcctgccccgtttggcacccaggtcctctctgtccagctgccactggctcataggactcttggtcgactttcacttacaaggaaccaatttcacaagcagctgtaggtgagccttttacgggcctctggcgagtgagtgagaggcctcgggccttctcccacaagcagctggacaaatatatctgccttggctttccagggggaccagctattttgaggctcccctttgattgactcttcctactactgtgcctttaattgcagtttatggatcttaaaaccttatagaacaggaacttcaagctagacagagcttgattggatttggcgtggctgtggcggaggaattcgaattagcaaaatcaaaagtgagaagtagttagtatgcacttaggctctactaggttccatttttaattgttctgtggcctttctttccagcatgctgattaggtcatataattttgtgtgtggttggagaaaggtggacaggggaaagagagaaagaatgttttccaagtcgccactttaattttcaaagtgtcctttcacatccctcattattataaattatctgcctccttgggagcatgcgtggatgatcccacccaaatagagaaggtggtaaaggcaaggaagccatcactgccctcctgagtcagcccacaggcatcggt

SEQ ID NO: 47631 - DNA, 1941 bp, Homo sapiens
aaaaaaaaaaaattctcacttgagaaagttagataacattctcacttgcaaaagctaaataaggccaacgatcactgagatagtgattgccagtaattacaagaatctaagcgaattctcttttactccagatctagtatttccacatcacctctcagttagcagaccaattcagctctcctgattatgtacccttgtataagtcacttccacttagtgggacttggtttcccatctataaaatggacacaataattcctgccctgctatcttcctgggttactgtaagaactaagtgaatctccatatgtgaaaacaatatgaaaatgaaaatcactagatcattgtaagatatgaattttaaatccatggcccttctcaatcacagttttatagatgtcccatcacaggccttctgtgtcatgacttaagttccaacatagttcatttgtattcatctttaaatgtaagtatatccttctccttaaagttctccacaagtccttttctgtgaaaacacaagatagacatctactaattattccatctcactgtgccatattaatctgtagactggagtatgaggccccaggaggttgggattctgtctgtatttgttaatatactaccagctgctgtaacaaacaaaatccaaaatgcataggggctcattctcaatagcaatctaaaatgtgtgttctgatagatgggtggctccatactgggaggaattaaaaagcccaaactccttcaaacttatggcttcaccatctgcaacaaggattcaatcttctgccatgattatgacaaaagcacagaagcatagagggtaaaccaggagagggtttgatgagtcaggtgatgaagttgcacacagggacttccccccacattccattcactagaactcagccacatggctcatctctctgtagcaaggcctgggaaatgcagtctaactgtgagtccagtaagaacaggacacaggtttggtaaacagccagccagtctctgccaccctcatactcgaaatttaaaggatgctttctaatgtatgaatgaactgactagtacatctgagtcttggccatgaagtaataaaggaaaaaaaaaaagaaaactactatacgtaaatcatgttcacagctctaattcacttaatttcacaaatcactgtttgcccttctattcctaatatatgcaaacccaattttaaggatgaaaaatgacattgctaaaagaaaaaagaaaagcatcataaacaaagcttaaagtttctaaaaaagaatcactccctaataagggaatatcatggagagaagagaatcatgaacagatagaattttccagcaatacacaaagaaaagataaaaataatgtgatagcttctacttgctgtgcaatttactttggaattttacatttttatactaagaggtaaagtcctgccatgtttctgtagctaagctagactttacaacataaaattctgattttgatggtttaatatctaagttgttttaaaataaattgagtttaaagactgaccaaatgtatgaattaaaaaaaagatctttggcatttttaagtaaagtcactaagtacagcaagaatgaatgcagggtcttttaaaggcatcatataaaactctgtagtatatacttttaaatgtctgcatttgaccaggtcaagattgctagtgtatttaattcttactaaaagaaatctatgaagtataagtttaaacttcatttggtaactaagtgcatatgccagcatttcatcataacctagaagtttcaggtgatgaaatgctacagtgaatgctccaaccaggaggatctctttactttagtggaatttgcttcaccacacaagctttcaaaatagatttatttctgctattttttctgactatattttaaaagagaaatgacatag

SEQ ID NO: 47632 - DNA, 3850 bp, Homo sapiens
aacttctgctaagctttttaatgttttccaaaaggaaaaatacttttgtaaatttaagtttcacatacaaggaaatccatttcatatataacagggaagaagattcatatattctactataaggtaacaacttgataaggagacaccgaagtgaccctttcccatgtttctaataactattcaggatgttaacagtgaaaggaccatttagaaagctaatttccttttcatcatgcttgttaagtgtttactttaattcacatcctgtgtgaccctatgggaaaatttttaactaatactggggaaaatcccatagggttacacaggatgtgaacagggcctgtactgaactaccttcagcttgaaaaataaaattagataggtgagtttcactttctgtttgtcataagttccactttctggctcccaaagcttagatccacagtacatccatgtccgtgcaataaaatcccaagattctcactctctgttaaaggaaggatttcggcgtgttgtatagcaaaatcctttcagcagaaaaatgcaaatctgtggtgctaatcaaggagaggcggctggagcactcccaaatgctcctccatacctgggctcacacacagttcagctgccgttttccatttcctgtggggaacatacatcataccacttcccctatagaaaaaagaaagcagcccgatttaattgctgatggaaacattgtcatactttccactggccaagcttgaaactattactgatctaaccttcattaatttttccacaacaatttgcagaaatgtcaggaagcagctgtacgaagactgattaattgtccttatcaccactactttaccaggctcgctctctcttctctctctctctctctctctctctgtatcctcaccacctcccctccctctcttccagtttaaaaatataattgggatttttctgttttggttggtattggtggtggtatatcatactctgaaatatccagatctatttttgatgtctttcaatggcccaaacattttcagatctggaggagaccccatgaagtttgggacagcatccacgaaggaaaaggttgcttcctgctgattactcagttatagctgtttaaacagacgttcatgaattcaagtcttacagcaacactgcatttattagtcaatcacagacgctaaaattcacttccgaaatgtgaattagaaaatcaaatgccctttttctatttttttttcactttcttttctccctcatcattttcatttgagctataccatctgtcccagcctatcaaataatgtactgtgcatgcctggcaaaaacaagtggaacagtacacctcataaccccatgtaggcaaccactgagcatctataaaagtggtacataacagaatctggccatctggggataactagttatagcaagcttagcttctcagccagcactcagatttgcagacttttaactagttggcaaagcatcaaccagtgttcaagaagagaaacactaacaaacattttttttttcaaaacacaagaattcagatataaattttcaaaggtgtacttgccaatgttgctgacaagaaggcttcaaaagcaaagatcaaggcactgtcatgtccttgaaatggagccagagtcaatccaaatctagcattttgcagcattactaaactttttgggtatgaacatatttttccttccccatattgcctgaatatatacaagcaagggattaaagccgaacagactttgaaccaaatgacatagtacctttcagagacagctccagcagactgggaagagttcctcctaggactacatttaaaaaaaaaaaaaatccaaaggctcttcatcccagatacactcattcgtagtctaaccccgaaccaaagaaagacagattggacaactatggcttaaagcattaaagtaataactggacatgtagcatagtggcccagatcatggaccatggagccagaatacttgctttcagtcccatctctgccacttgccagacatacaaatattcaggcaagttacctaacctctccgtgcctcagtcttttcatccagaaaatggggatacaaataatattgttaacagaattatacagcatttaaaaatggcacgaggaagtgaactctaaatgctagctgttaactgtatatttttctgttgatatttcaggtatctattagcctaatagtgaggaggaaataatgtgacacgagttcctaaattaatttaacaaagcccactgggttggctgaaagatttcccctgataatactcacattgcttgaaacaccaccaccaaaactaggtcaagcaatcaaggctaaatattctattgtttctgttgactatcccctagctgtcacaggacagcatgccttgtgatgccatgggacatagaggcaggcatggctggagatgaccacacctcaccaccacctccaggcctggaaagcaggggtggggagaaagccaccacagaccagcaaagtgcaaacaaagacagaagctggcttggacttcgtcataatcaaagtactcatcaaagaagccaaaggcactcattcccttggcactaagaccagggttgaggtgccaggaggccacacagtgcaggaaagacgctacttttaattccggctccaccatatgaccttaagtaactctcacactctaaagccttaatctgcagtaaaacacaggatttcgtctacatcagaccttttgagtcttttggctgccatgacctccttggcagtctgatgaagcctgtgggctcattcttagcagaatgttttaaactacactggattacaaaggaaaccaattaccatgaatataggtatctcaaaataactttcaaagcaaacttgttgatagtaatatacataattctttattaataattaaaaacaagatatagtgcaggtctaatattcaccataattcggagtagtcataatcataaagacactttgagatatgaatcacaatggtaatgtgatatgaaactgtctgtgatttctattggtgacaacatcactgacactgctgaaactactgtcatttgttgcttacatgaataatgaaggaagtgctaaacttcagttagagattaatgaaacagtttttttctcaaccaaattttctgaattctgtccatttgtggttaagagccccagcctaggtaaataataaatccctttataattccattatctcagatcaatgattgcattgtgtccctggctccctccacagagaagattcacaaagagaaataaagcaattcctattctttccaactgtgtggagaaaaacagatttacaggatagaagtgtctttcctcatccctctccaagtgagggaaggaacacttattgacttggaaatgagttacccaaacactatcaagccctaccagcctacaggcaaatacataagaagtgacattaacaccaattaaccacagctcctgttccagccccacctgctcacacaggacctccagtccccttaaaaagtcccaactaagtatatctaggattccagcaagggagacttacaagagcccacaggcagtctgacagccagtcacaacaccatctgccatggcttctttcctgcaccagctccccctagcgtcctcaggaaggaacccctctgccgcctctgcagatggcgccctcagtaagaatcctaatgcccagttgcccccacagacagcagagtccatacttccaggaaagaggggtccttgtcatgggtcccacactttagaaagcctgcatatcacaaacaagcacaaat

SEQ ID NO: 47633 - DNA, 2980 bp, Homo sapiens
tcatttaaacataaaaatggtcaagaagtcttggagataattcactggcatggatttccaaatcattctgagaatgttacaccttgtctccacagaaagtgtttactctcctaaggactcacaaatagcttaattattatttataaataatattggtttattccattcactttgccagtagaaccacttttcctgaatttcaaacattaaattactatctcagctctaagagaaagtttgagagaaagcaagcattaacttaactagagagagagcctaaaatgaatgctagagggttgagcagaagagtgaaatagaaaattggacagtttctagctactcccaaattaggtcttcccaaggtagacttagtatgttcaaacatactaatatttcaaaaagtctctgaacatcaaacacaatcatattcaagtgaaagttcaaaaacttattccaaagccataagcacaagattttttaattgtgcaatttgaaattggccatgcactgccactcccccaaacccactaaccacattaacaaaattaattgataatctcagtattaaaaaataaaggttgaaacagatgttatccactagtattagaaggtagttgctccagaaaagaacaaaacaaaagatgttgctaacaatagagaagacaaatagcagtaactatacatactaactagaaatccatgtagtcatgggaaatatgttttcactttcaagaaaacctgtgtctagattctagtcttactgctattcaagaaacaattatttaggaaactcatttggacatggtctcaaaagacttcttcattaacagagataaataatctttattccagggttcttgccataaacatgacaagacaaatgtcaaatggtttggttatttaaaattacactgaatcaacaaacacaatcacctgaacaatgaactgcaaaatgattcaacacacacatttttcgcatttgaatatctagagcggcgaaaatatttctgtacttttcctaacattttatgcaaaagttacaaagcctctctcaaataatatttggtagctagcttcataataccacttctcaatacttcccaggatggtttcgtgcagaagctagcataacttttctttctgttagtcactttccaagaaagaggtagggcactcccttcaagatgcaggacaaacttcaagattcttaaaaatcctttctcattgatttctcgatgtacaatgtaaaactgacttacgcaaaagtctttttcagtccctcttcatttcttaggtagggtattgttttctaaaattatgtaattcttgcctcgtaagaggtcttccatttcctaagacaaccagtcattaagcaatatgttaaaaggtttttcacctgtattgcagcaactatgctctcatttctaactggttgtctaagtggtcagtgacttcaatctacttaggaatttttcagtgttcccatagagtacctaaaagtggtagtaatggacacctcatatcaaagttcaaaagcactaagtacaaaatatattagtcacccatatggatgattcagctaaatgactgtactgattagcccagaagaagcagatctgttgcctgtgcaacaggtaagcctcgcgtacaaaccacaatataatatttatttagaaatgttcacttccttaaaaataaccacatataatgaaaggaaaataaacacacgatggtaaatggcctacaatcgctacaccatacagcagtgcaacacctcaaataattttataacctgatgaaagtcactgactctaaacttccttacttttaatttgtttgtattgcctgccttaccaacctgggcaggggttgggggttgggggagggactcttagtgttttttggctctatcagaaaatctaaggacatctgacctttgtatttcagttatatgttacatggtctaaacaatggagcaatttatcattagctaatatttgatcatgcttgtcaccaattggtttgtttcagttattcgcatgtaataaatcagatgtacacacaatgctgggcttgagtgactttctctagctgagtggtctaccgggagtagtacacaggaaccatgctccctgagttcaccaggacactccctgggagcagttgaattgatcatactgttgcaatactgatcacagtaaatgagctttttgaggagccctctagagtagcaaccacactctcgagtaagcctgtgtatcataatgtctctatagacctaaataactcttttaatagtcatcaaacactctcctttcattgacaatgaaactgaagcccagaaggtcacttgcaaaaggtcatgcaactagaagcagttttcctgaatactattctactgttttcccctttgcatcgtagagccactgtgcctctcataggcaaaaattcaatcatggctagcaagagtttactgaacagcaactatgttaaacttgcttatcagcttaggatgggaaggaaaaggggagagtaatgagttcagagtgagagagaacagacctcaaataccacggtctccagagtacccccttcatcatggttacaatcaactcgtctcttcacaaacccagtggagaagtggccaattaaaatagggaaatcaagaataccttgacaagttatacgcccaagacatcttaactattttgtagggtttcaaagtgactcttgaaaagccctccccttgtggctaattagtacagctatccttatttatttttttttttttaatatttttttatttattttaatattaaatattttaatatttaatattttattaaaatattattattttaatatttttaatattatttttccttataaacacttaaaacattgatgacatttttaaccagaaaaacaccatttatcccattacccaaacacaatcttttcatttttaaaaattttaatc

SEQ ID NO: 47634 - DNA, 3737 bp, Homo sapiens
agtattcaggatgtaccaacagagtcaccttccctcccgtcaatccaatgcacacacacatgcaaacactcactagtgacaagaaaaaaaatattaatatgagaatgctaaattactgctacttatgaatggttacaaaaacaataaacacatatgaatggttgcaaaaacaataaacaaaatgcaaacaggcacaccctagtgagaccacgaagtgtgtcttctacaaatctcttcccctttctatcctggtcctgttcaggtgacctggcctaacctggacatggggtctttgcaggctgcacgctgcatctactgcagaaaagagctggtaagatttttcatgctaggttgtcaaaaatgtaacgtgttctcattatgaaaacatttacattaagaaaacagcaaaaacaaacaaaaatcttgggacatcatgaaacttaatacaaacaaataactgttggtgaagagacagatttgggggaggggttttgcaagaatagaagcaagacttcctcctctgtgggaaatattagtaatcctattaaggcacagtgcaaggtgtgtcatagacactagaagcagatatggtttactttcagttctctgaggtgattcttattggaattgaagtggctcttctgaaaacaattaatcaacaataagttctctctccctccctctctctctttctctcttcaaagtgtgtgtgtgtatatatacgtatgtcttttgactaattattaggcgtagtcccatttttttctccttggtacctatcactataatcatctgtgtttctgtgtcacctgcttttagaattacacatggatattaccagaagttacagagttaaatttgcaacagcacagacttctaactacaagcctgggaccatggtggaaacaaaggttcagttaaggaagatttcccgagccagaattgatgtcctcactaaccaggctgccaggcttaaatcaaatgaaggtcgatgcaatgtccccagaggaagctgttcaactcgccgggtcggttccccagagccctgccaaggaggctcctcagattgacagcgccctggcagagctgctgtcttccccaggcagagaggccctcccccggacaacaagctgggtgcaaactcgtcttccgcagacaccaaaagagagcacagcaaagctaagcgactggggacagccacttgtggctgagacaaaggcaggctccccctgccgcaggacgatcactaggactgtcaggctgtcgaaatgtatattgcagacaggacatccctcctggcatccagtgtgagcgaagtccaggccacggcaacaacagcctggcctgaggacagcctgcaccacacatcaaagccagaggccctgggaggctggccagccgccaaagacgcctgagagcggcaggggagtgtgttgccttaggacaatagcaaactgggacgtggtagagtctgtaaattccaagcactggggaggtcttctcagagattttaccctctcctgtcagggctgtgatttaatttcctttgaagaaaaaaaaaaagaaaaaagaaaagaatatacattcccaaatcttctgtctgcaaaggcagacaccacaacgcaagcttaatgcactctggtccttcccggccagcggccactgtctaacacaatacagctaagtgagatgtgacattctcccggtccccttaatagggcattaagtctaaggagtacttaagatcatttaaatgcaaacatcattgttccattgctactagactcccagatatttcccatcaattctgtttaattagagtagcaccacacgttaattataacctgacagttttattgatttcacagggcacatcatacagtcccattttaggtaccaaggacttaaggtgaagcatgaacctctcagtcacaaagatgactcagcctcttgggctgatgaggttctgattcttctaccaggagaggtttacccacttgctcaacagaaatagttcagtaatcatcttatgtcctcacttatttcacagcgttttgcaaaacaacacatcaaaaacaaactaaggaaaaaaaaacctgtaagagtgtaaaagaaatatccatctccctctgttctgtggtcttaatctgcaattcttaaggaccaggatgaggtgctgtgaaggctacgcaggtaaagctggcaccaaacagaaatatggtgcacttctgcccctgaagcgactggccccactttgagaagccatgctgtaaacatgctcattagaacagagaggactggtcagttttcctttcagaggaaatgaatatgagttgagatcactcaactctaatccaccctgtacctcagggttatactcccagcagcacatgctccactaagccagcagtttgtcatagcccagcgtgtcatccataatggcatgttgggggtggaatcacttccaattcctcactaatctggtgcggggaatgccaaggtacagagttttacttgattgcataaaacatagagctattttcagcttccaaatcatcgttctggctctttcaccagtcctaaagccatattacaaccctttaaaaacatcttttctattcggttttcccttattttaatataagcaaacacttaaagtaatcccactaagtctctgaaatatgaagccatgaaatgttagaaaaaaaaaagacgaaaaagagtttaagagttttacacatatttgcgatttaaaatggtcactgctgctatggtagtgggacttgagttatctccaaactccttataaaaaccctgggcaattaacacttagcaggacttcggtgcctgatgacaaaatcaattctgttatagtcacacttcgaaaaatgactttgaagagtaacaataaataatgaaaattaaacaactgctaactgatataggaagaacttcagctatttctgtaataattccactgggatttgtgctgaacattataaaaacaggatgttttgtttgttgttcttcataaaagactactgaaccagtataagactccaaaatatatgaagactacaaatctacatgaagtctactaatattaaaaaaaagctaagtggaatttttattcatgtatttaacatttttgctcaatgtaagatgacctcaggaaacatgtttcttatttttatgaaagccaaaaggaaacacagttatataacataattctgcaatggttcagcatcacagtgcagagaacttaatcctaaatataggactgtcacaaatcagtcttcactgctaagacttcttatatttaacattaacaacggattatcccatggtaaccagatacctgttccatttagttagaggctaatcctaacaacataaggattccaatagcaaacttttttctaatgttaccatcaatgaactgtgatgaagctactgcaccaagaatgaacttaatattagtggatttagagataacttaaagtggtatgattagcacacaaatacagtcttatctatggatgtgggatgggggaaggtatcacttctgtaaatgaaaccattattttttactgcttaagtaaatgaaaacattcatatcctcttttcctgacacacacagctgtatttggaagtgtagaagaaatagggaggaagtatgtttaggaaagaattgcacctgaatattttcctaaaggctgggcatggtagctcacatc

SEQ ID NO: 47635 - DNA, 2865 bp, Homo sapiens
agtgctgggactacaggtatgagccaccacgcctggcctagagtgggtttctgtaaaacagtctgaaaagctacagagagtggcttaagggttgaactttgggaaaagcctcaaagactaggaagtgtgcaaaggggctgagaacagagacaggcctactaagccacagcatcacagaaccaagtggcgaaaaaattaaatgataaacagagtcagacacaaatcaggtcaaataagtcaaagacccaaaagatgtcactgaatttcaaaattaagaggttataaatgttcctcgtgaaagcaggtggtcgaaactgtgaagcagttgggacaggtaaagtagtagctagaaaagccatcaggattattggttttattgtttgcttgttttcaagatggaagggattggagcatatttaaatttttctagttgagagacctttaacagctatggccctgaaaaaaaatacaatgtcctaacaatattttactggattaaattttggccacagtggagagataattatgacttgattgtgttaatataaaagttcaaattctcagcaattgactactaatgatgatataatgatttggggagtctttaattgaaggaatatgctgctgttctgtcgaataaatcaataaggaatcgcataacactgtggggaaatcttgaaaatgaaactactaaaagataaactttgaccatataattttcaagctgaacaaagctttagagatcatccacttaaatctcttattgtgaaacagatttaaaatcaatgcaataataacaacttccactgaaaaatatcaaaactaagtttaaattgtgcaagaaagaaaatgattatgacaaagaggctgcccaaactactctgagaaacttttaaacattttattcagacatctagatgggagggaattcctaagcctgacaattataagttatcagtaagtccacctagacaatttctgaagaagcaccctgaaagaattcactgactgctcacgctcctagcacataatgactaattcatcctgctccatctggggtcatacctcaccgtggttctcaccctgaacactgtcgcaggacaagaaaacagtcactttgaaaatagtaagcaagaaacccaactgaaaaatgttagttttacagtctggtggtttgtgttgtatgatcataatggaaaacccagttttattcatgtgatgaaaaattcaggaaaaaaagtgtttctttataacttaggaaatgacttctagatggttagtttctgggaaatatacaaataatagaagcactttcatattctttcataagttgaatttagagttttccaactcccttaagaggtgagaaggaaaagcaacaacaagaggaagcaactgtagccagcctggaatcaataaggcctagtaataggatttggctcatagccaagagtggggtccacctgctttcactgtggtaagactcagggttgaggctcttttatatacagacacacaggtacaccccaagcatgatttaatttctctataagatgtagcaaatagttttggcaaactagactctttaggctgctatgatttccacaaagaggaatgttaaaagtttgggctgactactgaaaaccttaaggaaatgaaagatctagaaacggtaatggagtttgaaacaatcatcacagagaaaaataaaagaaagcaacatttactgagtattttcccatttaatcttttatgaggcaggtacaattattaccctagcttacaaaggacttgaggccccgaaaggctcaggaacttgtctacagcctcactgtaagtgctggagagagttttttaatcctttaagcctgagtctgaaccatccctcttgaaaatagacatagtggcaatgtaaaaagatacatgggttgaagaaatctaaatatcctgccatgactggcactcaattttcagttctagtcataatgattctgacctgacaaaaggatcaccatgccaaaagaatgtttaatgtattgaaccattcctgattactcactatttgagctggtatgacagaacctcacggtggaagagtttcagtggggttcactcatgtctttatacaacaatgatatgctgctttcacacttagaacgaaggtcattgctttaaatttggcaagaaaatcaaagtctttcttatccagctcaagagcattattttacccagatcattgtcctaatttactttggcaataaaaagtgtttattactataaagtaaggctaaaattgatgggtttgggagactttacacaccatgttccactaggttaattttggagggcatgccatgctttctatctttaaaaagtatagtctatttcttccttcttaaagccacagatttcccaccaaacttaaaacttcagtccattatattattttaaattttgttttaactttattattgggaaatgactttatttaatctttctatcaagaagtagcatttcgctttttttaataaaatgctcacaataaactctttttttctctcatttattcaattatttattcaacaaacaattgtgcattcccataagccatgattcttgtcttcatggagctcaggggctagtgaaggtcagacactgaaaatagattgttactgtgtggaccccataacaaaaggcatgctgaataatcaattacataacaatatttgagaaaggcagcactcttctaaattctttaaaacttgggagctaagtatccctcctatcatgacctgaaatatagagtaattcttaaatccaccacagatatactttatttcaacaactcccagatgtctcaggaca

SEQ ID NO: 47636 - DNA, 630 bp, Homo sapiens
ctaagaggtaaataacaaagtaagaatagcaagacacagatgggccaggggcatcagtaggaagaatctcagtggctcttgtcttttgtcagggcagcagtggtggtccaggcattggtagcagcagagatggcagaagaatggaaaagaaaagagggcagggaaaataagtgaatcagaagctagagcagcctttgaaaagggagtgtcctagaattgagggcaagagaattgaggaagagaagggaattcctaccacaaggcaaccggggaattccctggttggggttgccattcactctgtcactgactgggaatattcactgtttagtcacataatgttctcagtctttgtttcttactctggtttcttaaattcaagctctgtgttgttcataaaaacccggttcaggctggtggctgtgccatccccctcagatttattgttagcctgtggtagttctcaattagggtgattctgcccccttaagagacactaggcaatgtctgggagttctttctggttgccaagactgggagtgggaaggggtatgctattgtaccctggtgggtagaggccagggatgctggtaagtattctacaatgcacaggatagtcgcccacaacaa

SEQ ID NO: 47637 - DNA, 1934 bp, Homo sapiens
aggagagaactagtgcccagggttcttgcttattcattctacaatgaaaactgaaattttggaacttctgaaggactagaaaagaacacatatcttgtgattccaaaataattttgaaatattttccttttatgcaagaccataaaacaaaacaaaacaaaaactttattaaaataattctatctgcatttttatattataaatataatcctagaaatacaaaatttaccttatggagtacattgtgtgaatagatcagaagtaaaaaaaaaaaatcacaaaaatacataagtagaaaagtacaatgtttgcattaataccctatttggcccccatccatttttatctctcctctccctaattactactagccactgcaggcagttataatgacttagtttgcctatcccctccaggcttaatacaggactttataagggactcaactaaggcatgaaatggttaattgatggaaattaggtactataaaataaatggcacacagacaagccaccctaaattcagctgaaatgcaactttgagcaaaagcaaaccacaaatttaatagcactacaacaaaaaatgttccttttgaacttgacagttcccagtcattcagcccagagtaacacacagggaacagtcctcagaaagttctgtggtgtcttctgaatcactgccattacccgagaaaaccccaggaagtggtttgactgagtagctggaccagtgcgtaggtatcagctgatgtctctcacacatacaagtcagtaacaatggggacactgtgaaaccaggaataaccttccttatctttagtagttggggaaatcatttctaactcagtgagtatataacttgggaacaggtcaaatggttaattattcactgagagcttagtaattaatctgcgttagatcaaatatcatcagacctgaataacataaggatgtccgatgtctggaacaatgagtctttggaatcgcttccataaagcagcaatctttcctaaacagttatgtccaacaaagaacaaagcctaaatgcaggcagctgttggcaaaaactaatcaaaatggaccgtgatttcataaaacctttcaaagtcagtttattttaaaatataagttgatgccatctttttctgctccagcaaatggttggagcaaaccatactattaggtgaaactccagctgctgataaatctgggcggtggcaagccagtgagctcacccggaagaaaaccatgcagtcacagagtccatcctcacatgtctttatctaacaaccaaaggaaaccaaaggaaaaggtccaagacatcctgccaaaccaaaactaagagagatactgtgatttatctaaacccagagatatgaactaactagctacctcttttctgtaacagaagttagccctttaatggccacgattgagggtcataaaaggaagttatgatttcatgcagtattgggttttttacaattcataaatttcccactggatgcttttcagtgtattatcccaatggttagcacctttttgactgatttgactattgtttttctacattcccagcatctacaatcccaacttctggaagttttaattatccaaaggatctaacaaggtcacaagggcaaccataagacacaacttttacccataacagcaatattcccctcacaagaagaatctgcaattccaattctaaagcattacacagcaacccttttttacagacaccacacagctttgaccccagcaagagcccactgcacagaaacatagaacagactcacctgccttcaacactcagcagtatatgtaccaagagctctccagctctcctgtgcgaagccacagccaccttttgggaaatcctttatatctactcactagaaaaaaaatggctgtgtgcccccaatccaaaca

SEQ ID NO: 47638 - DNA, 1171 bp, Homo sapiens
ccaaaagcaaatgtagctgctgatgctagtgactaaatctcactacatccagttcaggaaccttattcacacgtgtgtaagaaagaggtggggaaaaagcaagacaatgagaaaacatttttgtgcattcagttataatgcattttcacacacatacacaaatgcactgctctgctcctcaaagcatgctgataagaggtgcacgttaactttcaaaatcacctccagatagatacccaagcatatagagattaaaaacgacactaaattcctacatagcactaggaatgctggcacacctttaaattcaaaatctctgtttttatacaggattgtaatagtccagttgctcatggaccaatctaactgatttggaaaacaaaatcttaactaattgaagaaaactcagtgccttctccagtcaaccccatggagttactctgcgcagcccatggcaaggttctgactgccagcttctttaggtccaggaaatgcacctttccccacacacagccatggaggagggctaagaaacaaactgagccagaattgctgctgttcacaaaaggaattccccctcccttcccctccttctccctcccctttcttctctcgtccctcccccatcatcgctggagaataatatcactctgctacctgccttgagcaacaccgtgagcccctgtcttcaagcattcagggaatttaacagcctggaaattcctgttgtccattcgctgaggtcacagataaagctaaacaacaagccgtggttcccatcaatcataagtcactcactgatagaatgtatggtaggagacctgatggaagcgagtcaccagagaaaatacccactgatgacgcatatccaggcataaaaatagttacagggccctcaaagggattattcaacagcctacatttagactttcttacaagagacctgaagtcaacgtgctgcagttaagtggctggagagttgaagtttaagcttcctcaacagacataaccacagaaagctgttttaaataagctcccacaataacaagctgtttagtaaattttaacacaactttataagccgtaaacagtaccaccaactatcttataaaatgccgcctaatcttctattttattcactttctccttcaaataatgatttctcttcttt

SEQ ID NO: 47639 - DNA, 512 bp, Homo sapiens
atagaatagcctttttaagatagtaatattgtttagataggaatttttcttcttctcttttgatgctttcagaacacctcagtatgacatcttcaaatggtgtacacttcagttttttctttgctaaagacagtgtgtatatttccactatgactagcaacaatggtgcttgtattgattgttctggcagctatttaaataggcttgttctctccctatctcaatggcctcacaatgctgatactacaatgctcaggaacttctgagcaccctagccagatgccccttactgcttgtggacaggcattccccagcctcttggctgggtgacagcaaccacagcagcccacaagacgggtggagaaccaatgagtaaaatgataaacatttgtgatgaaacaggatgttggagacaggggggtgaggagacaaaatatctcaacgctgaactactaacgctactttggaactcctaacagtgttcccttgttgtaaaactaggagcagtaaac

SEQ ID NO: 47640 - DNA, 2816 bp, Homo sapiens
acttgaactaagctcagataggaaataggatcgttgtgttatattttgtcaaggaaaaagggaaaagctaccccaaaaagacaaatttcaaaaatctaaagctattattccagatgtactcaaataaccttaaatttccttattgcataagtaagctgaaagtttcccaagaaaaatgacatcgtactatatgcacatctcataatcctatggggacttcttttaaatgagaacatttaggcaacactactgaaagcatacataagtcagcggttagcttcatgactcagtttaacttaaacatgtaaacatagtgtatgttccaatttggaatgatttttgaggtttactagaaactactaaataatattttcatttagtaagtcctttctctgtcaactctttgatgtaagaaaccttagcagacctcccagtgaactttagcattttggctgtgtgtccaaaagaacaatctaccattacaaagcctattcatgagtcaaccagggacgtaatcacaatcacgactgctcagctgatacgactcttctttatcatacctgcaagtatggaagacacgtaagattcaagttactaaattatagattattagtactaaacatcgattcttaaatatagttctaaagatgattcatgcaaatttaaactttttttaaatttaacagcttgggttaacttgcttgtgttcaactttttacgtctacctctagcaaaataatattattataaaaacagtaaaagtccatctaataatttcagtataataaatccagggctttgacactgtcttcaaattcacaagatcattagtattcttttaaaccaaattaatcatattccctaaataacaacagctaaaatcatgaacactgagatcattttcttgtaatgattctgtctggaagtgtattaacggcatgatgtttgtgctttgcactaaacattcatatctttgtttccacaacaaagtaaaaaggtggcagttagagggagagttaaacaaggtttcctgtgagggctttgtgaaaagaaagagcgtatattctatccgggcaatgacaaacggactcaggcctcctgaggtcagcgctcctgggcaccatcaggccccacttcgggagcccccggtgctccgggcccacctgactgggcgtcctctgagtcagggaggtgccagtgctgtggtccccgcgagcccaactgtcccctgacccccgggcttttccgcaccgtggagtcccccgacacgctggggccagtgaacccgggccggggcgcgcgttctccctcccggaccagctcccggcgctgggcccgcggccgagaaactaggtctgggccggccctgcggcggccgccgggcgcggcgagccccactttctcccggcaggaaggggggaggccgagagcatttcctgttgtgcagctgagccctgcggagacgtcattgcattcatgctccctcgggtgtcagcggacggggggccaaagttcaagccgcgtccagggcaggcagcgcgcggcggcgcggcggcgcggggcgggcggccagggctcccctctcccgctggcgctcccggcgcctccgtccccggccggcccagcgctgctaccggaggccagccctggggctccgcggggaagagctgctcttcctcccggaggaaaccgagctcgcaagcccagcgctcccagccgcagactgcaggctgccctcctccaccgcctggatttcccacggggaggaaaaggcgtgcgtttccaggtgtttggaggacgcactggccgggcgcactttcctcagcgtaattttgaacgcagtttccctaaagatgactcttttttccactaggattatttccaagtcatcaaaagtgaaaaatcacgtaagtgttgttgcagttgttttcccctcgttttctatctcctttccaattgtgaattccgtaaataactgtcagacataaaacaggaaaaggaacatttcttcactgcagagctccagtaaggtgaaagtaggcaagaaggccccctgagacgtttctaaaagcatattctatatgttttcattatgaaaacacccactgcactccttttatttattaggaccttaagttatcctatctcaactaatacttttaacaatcagaatctcttaagaatctttcaatcttatacttatccactttaatagccaacaaaacctttagccagagtgttttaaaatggaaattacctgttcatgtttcttaaagatttttaaagtctccttctaaatttccagccttccatttagtttcaagccataaaccagattataacaatgtgtaattgtagagaagctgtggcttacggttaataacgattaaaaataaggccataaggtattttatgatcattttgaaataaaaaattgaaatagtttaatttcagcttgtgcagtttgagacagatcgtcaactacaaaacaaattgtagattctgttctcatggtgaacaaacattacagatgttttactgtgtcaacatctctaacatttgaactaagcaatgtttcacatcaggacatgaattaaaacaatgtaaactatggacctggggtgaccatgatgtgtcgatgtaggttcttggattataacaaatgtaccactctagcgcaagacttcgatagtggaggaggctgtgtgtatgtggggacaggaagtacatgggaaatctctgtaccttccgctggattttgctgagaagctaaaactaccctaaaaatataaactctatttttaaacatatgttta

SEQ ID NO: 47641 - DNA, 5002 bp, Homo sapiens
tgctagaaaaacacagatctcttgtgaattattgaggtccagctttagggttgggggcgagtaccaatattcatttggaggtaaattgagttatttttaaaatggcagaaaaggaaggagaaaaatcagctcaaattttccattataatgaaagtacaggaaacaagcctttctatattcattttaggcctaaataactctgcagagaataagggttttgcaatgtcagttgcacacacaacttcctgtgtgaatgctaagccattacaggtgtcctaaggcctccagtgaaacctattatcaagagattcctctggtctcctcgaagtcatccccagcgccccccatccgccgcccacacattattgcttctctcctccaagtgtcttgattaaggaccctctctcttctccgcactcccgaggttaaagtgcccccgttcccttggtgtagctagttacaagctttcccgttagggaagactagtgcctgcagtcctttttagttagatgcttttaagtcagagatgagaggagccacttgaagaaaccctccttcccttcttcctttcccccactgggaaccaagtccctgaaggacaacacccagggacgcttcctgaccttctatcccctcacccaatttgggcttggagggttggggtcgcattttctcatgtcctctgctgcactggatgtgttatgtaagagggacagaacgcgggaggcacatgcgtataaagcgcaccgatctgtgataacagctggggtagcagagcggatctggagtccaccccccccccccaccaaatacgacagaccccacacatgcacatcagcaccccctcccccacacacccacacacacacacacacacgcacacacccagagcaatgttttcctgtctcacccctaccagtaccagaggcacagaatggaaaggcggggggtgggggtgaaaggaggtgaaagaggaggaggagcagcagcagcacatctgctttgatagcagccggcagtgccgccgcggcagagagcccctcgttaacccccttcctgtggctgcaccacgtcatggaacattcccggaacgggccaacgttccacccacttcagggaacagacataaaggcgcagacccagttccccacagtgcacagcccaaacacacatgtcccttcccgatcccccgccagacggacagacaaacacgcatgcaaaccgcccccacccgtctccacgcgcccgggtccagccggcagcggccagagccgctctgcagccggtgcacccgcaaggcgagggcgcctccgcctgaaccttccatcgagacagtcccctccttcctcgcttccttccttcgctccttccttccttccttccttgcccgggaggtaaagggagtcactgaaatgcccagagccagcgccttcgctgcgctcgctcggccgcaggccggcggcccgggcctcgcgccgccagcccgcccggccgcctgcgccgcgcgccgcggccccctcccccgctacctgacaacgggccgccgccggccgccgcagccgcagcggtggccgggccgtgcgcgccggtgcacgtcgctcattagtaagcaggcacattcctgcctccagcgctcccgcgcggccccctccccccaggacattacgcaaagcagcctcccctcatctgcatagatccgcggccagggtattccccgcatttccccacgcgcccgacacccctcccgcggtctcccccatccccgccccctccgaccctcaccctcgggccaccgggaaggggctgggggcacacgccggggagcgggggacggagttcggcggcggcgattccaatataaagtgaaacaagctcccagcgccgaaggaggcaggaaaaacccagcgtccaggccacttaccgagccgaggagggacctagattcccgccgctccgctctcgcggtggccggtccgccctccgcgcaccccgaggctgcacccagcaccccagacgcgagacgtggaggaacgctgtgaacgagccgggagaccctccaagttgctctgggctccgtggagcgtcaaggtccaagacacaacttggcaaagacttgtgccacagtcaccgaagatgtttgtgcggagaccctcctgcggggaacgacggcgctcggcggcgccccgctctcctcctctccaccccctcacctccagcccgcctcccgccggccgcccgcctccgggccgcgagcccctcgggcggctgtcagctcccggccgccgccgggtgacaggggcgggaggagggcgcgacgcggcggcccgagccccagcgggcgagggggatcctcgcagccgcggcggccgctcacctggaaagtcaccgctgaggaggaggagaaggaggacggggaggaggagggagaggaggagggggaggaaacccccctggtgcccttgttctcgctgccgcggcggccgctcctcgccaaggctgagcgtgtctggtggggggtgtctggtagcatttccttaaggacagagggagggcgggcgcggagggagggaaaagatcccgaccgccagcccaggctcctcttgcctttatttatttttctgacactgtacggagatgggcccggggcaggggccgccgggctcaggcgggagccgcgaggcccgggccgcagctgtctgcgtgcgggagccgcagcggccgcctcccctcccgggctgtggacgcaccgggttattcctggcagcgcctccccgaacagaagttactaggaggagtgcgcggcgagggcggacggggggagaggcggagggagggagggaggaagagggagagactcagccaacgacgtcatcggatcccccagcgcgtcccagggagggaggctgaaccagaaaaaccagtctggagccagtgagcgagagagggatgtgcggcgcgcggggcgacgggggagggaggcggtcgggagggcagggccgggccccacggctgccgctgcgggcggggagatcgcggccgcgcactcgctcggtcggagcggggaactccccggagagctggtctctacttgtcatgcaaaaaaacttgggcatctctaggagcctgagaatttcctttaaggatgtggaaacgtcctccgtccccaccccttccccatttcccagagaatcgttgtctgccttcctgacgaacggaattgtataattagtagtgcccttagatttggaaccagtactccggatccctggcctctcctcgccccctgcctctactcacaattatgttatcggtcaagaaaagcaaaatcagactgtggctcccggctgggtttctggagctttgtagggttttactagcactttccgtgcccctgcgggcgcgcgaactattcacgtgctcgaaacgcccggattaccttccctgaggtcactcaccagggtgcccccggcacccccagttcggggaccgcggcccgccctcgccaggggattcaaataggtgtgggcagcggcgcgaagagcagctgccggtttcctggtgggccgcgctggaacctcggggcgagctgccaccttcagcctgtgcgcttccctctccacggaagggaccggagttgaaatcacaaccaaccctgggagagcggggccgggaggcgggggaatcccaggcgagtgggagccgaagctctgggcttcctccccggccgggcgacacccgggggacaccggggctctctcgggccgttaccctgcctatgtggactggtgtgcaccctcgggggaggttcctagggtgccacggtgcccgagcgcgacgagtgactgctggggaggggggccgggtcccggagcgcctcctccgggtggtctcccccccagcggggaccgcgcgcagcacctcgcgggcgccccagcccccgcaccctgcggagcagagccgagcgcccaggacgccgcgggccccagcggtcctccccaccccctggccgcgccgccgccctgcccggggcggagtaaacaagagacgcgcaagatttgacctggcgcgacccggctttctggccggggttccccctgagcaggtgactccgtgggaggggtggaaatgagtctctggaattccgggccaaagacaataactgtggttctgcttttaaagcaggtatttcaccagcaactgcggaatgttttgtgtctccagtttcaaatttcgcggaaagggaccaaatgtgaggacatataaaatatccccttctcttttcattaaaaatgagtgcattacaaaggaagggcagccccttaatgcctgcgagaatagcgctgctggtttcgtttttgttttgttttgttttgtttttcattctgacccacaatcagtgtatttttgaggtccctatgcaatggcgacggtgccgtgaagggcaactcagcaaaataaagcggtgatacattttttaaccgatttttttctcagaggagaaaaatctgaacaatttggcctaagtttcactttgtccttctcttaggttgatctcatttaaattcagggcctacttccacttaagcaacttcttctttcattgtataggttctttaatatccaacctttttaaacttaacttgaagcctttaatttaaaaaactgtcccaatcatcattttcttttcaatgtatgcagttgcattttaaacatccatttaacacacaaaatgtgatttttgaaatttttttcactttcaaacccacctgctacatactcccagagagcgttttatttaattgcttaatagagaagattaagcagtttctttaagaatccaatttcccttcaacaagcacaacagcagctgcccaagctcccagaaactaagcaaaggcaagtagcaggcagcgttttgcttcactagaatgaatgttagttgaaaccttaaatacctctttaaaagactagattaaagagaataatgggaatattaagatac

SEQ ID NO: 47642 - DNA, 3465 bp, Homo sapiens
gattttaaaagtagccaatcgcagggaggactgaaaaaagggcactctcataggacagaaacagaacactggagaggacaataagggaataaaagctggccaccccagccagcagcagcaacccgctccagtcccctttcatgctgtggaagctttgtcctttcactcttcacaataaaccttgctatcgctcactctgggtctgtgccatctttaagagctgtaacacttaccaccaaggtctgccgcttcattcttgaagtcactgagaccactaatctaccggcaggaaccaattccagacacattattaaggtaggtagatcttcaatagatctactcttttttatttttatttttttggcagtttataaccatgtaccaaggatgcacaattaaaaaaataaagccaacttttacattaagatttaaccaaaaatcatcaataatacatcgttttaatgctagtagaatcttcttctgacatcagttctattagcataattataatgccaattaaaaaaatctagtgggtctcttcattttagtttagagcttgattggaaacattcaggaaaacatccatggcttgcttgctactttctctttacctctagcactatgcttctccccaccagccctccctccacatcctctgactcagagactatttgaagaggacacctgttttaaatggatccacaggaaatacctatgttgccttttcataatccgaacctgcaactggttggctgaaatgaaaatgttgcccacagactgatgcaacttcagtgtgacaacatttactggaaggcaggagggactccagtttatatttattttccttccattaagccctggtagtgtagtgtaagaaaaaagtaagggcaaaaccagtttaacaaccagatgattagtattaaattacacgcaggggttttacatccaaaattggaattttttaaagctgaatgcaatcttgtggcagaaagttatttgaaaatcctttctttatagctttttatctataaacctcttgtccaaagttcatattctagctgatgttatatactgatatgacattattcaatctgtcatggaaaagtgctgcgtagcctacccattgaaagcagaattgagagagtttcctagtgattgacagtcgtttgtcaacactgaaaaccttattgccccaaaatactgaaagtcactcgcggctgcctgtgctcgggtttacaccccacgttcacacccccaccggatccctccgcacggggcaccagctctcggccaactgcaactaccccaggaagcgtcaccgcgattccggggcgggaacatttgtggacactggggtccactccttcagtctaggttccccgccccctcgcccggcccggcgcccactagccacagggcccgcttccccctggagatcagcgcgcacttcccgagccctcgtagcactcagaggtcgcatccacacctgggatgcctagggggcgcctcctggccgggtgtcccgggaccctgcgaacgcaggagcagaatgacgaaggtgacgaaagagatgacgacacgccgcctgccaggccgcggccggcagtggagagcgtccgcaaaccgcgcccggccagtacaggtcacccgggcgctcgcggccgcgccagtccccgggggcgcgcgccccgcccccgcccccgcccccgccccgccccgccccgcgcccgcgcccgcgcccgggttcccacggcgcccgcccccgcgcgcccggcgcctccctcacgcccgccctccttgccgcccagccggtccaggcctctggcgaacatggcgcttgtcccctgccaggtgctgcggatggcaatcctgctgtcttactgctctatcctgtgtaactacaaggccatcgaaatgccctcacaccagacctacggagggagctggaaattcctgacgttcattgatctggtaaggccgtcccctccccctgctcgccccgcaccccgtgcctgtgtgtgcgtgtgtgtgtgtgtgtgtgtgtgtgtgtgtggatgcgcgagcacctgcgcacgtgcgcgcctccagcatccacccgtgtcctcgcctcttccccagtgattgcgtgtgaaggcctggctgcccccgcagcggcaccttctgaaccactcaccgttacctggtagctgggtacccttacctggcaactgggggacaaatggaggtggggcgcagccaggtggtgggctctttggagggggacaccgaactgcttctaagaggtgacacgggaagaatcttcaacaaaagcatcggacctgatcctgaatggcctgagacccattcgccctcaaggtgcttttcagagcacccaccgtgggatgaacttgttgcaactgaaggaaactgggtattgtctagtgatttggaacttcacctgaaagaaccaaatccttctcataagggagagaaagcacctaataaagttgtcttctttgcatctgtttttttcccccattgtcaataatttactttcaacctttaccccgtacatattaggagacagagatgttcaaagtgcatttccaaggtgactgtacacacttctctgtcttcccatgtacaaatttacagtagtttgcataagcagctcctctgttggcacaatatgataatcttgacaggtgcaggttattattagtatatcattttgaaagtttttctatttctggcactaaaaggccctcttcaacctccctggagaacagaacatgggcataaggcccaataatgaactcatggatggacctaggaatttcagggtaaaggtgactaagacacacgctaaaagattattaggaagaggcttaaaacaaaagcaatgaagttctaaagcactcagagaaattgtagaaccaattcctgggactccctgaactgtttatccaagactatacagttggttggctacaccagcaagattataatctcttgttgaccctccattctgatgaagagaacatgatacctgttttaaaaatttccaaaggcttaggatgcctcaaagaaatgcagagaggcttttggtttaaaaataacaccttatatttgcattatattagatactttcagagtggaatttcaattctgttgcccagcagtctccaaactgtgcacatacccttaggcccacaagacttcacagggtatagaatgttgcaagggttttaattttcagatcctcatcttccaactctgcttgaaactaatttccctctgaacatgcgtgatgcctgccagttctcctttcattctccccattcatccaagtgaggagcccgtgacaagactctgaggtgtgcttttctgtctgttccttttagcttccagaagatagatggttgtcaccagggctatctttatatttgattgaacaacaatgtcggagttgccttgacagaaagt

SEQ ID NO: 47643 - DNA, 1245 bp, Homo sapiens
ttcttcgtctccctaagtcccatcaattaccctcattatactgtatttaaaaagttaagcctaacaactttcatagtatccacaggtaaatgaagtttttataacgtagcactgttttaggaaagccttcattaaaagaatgtgtataggcagtatcaagaatttgattaagattttcttgagaagaaaagaaattacttaattttcacacaaatgaaggatattttaatataaagatacctactcattgtgaagacatgtcctgaataaatatggaatataagtggacaatttatttagacagataaaagtctccaaaacatattaccatagatgcagacatctgtcttctagattgtagaagctagctgtataaaattatggtgatatacgagtgaactgagatatttttaaactataagtgaaaatgtaggtccttaaaagtaaactagaataaagcttccttcataactgcaagcaaaaaaaaaatatgccaactggctatatctggaaacctcagtatctatttacttgaattttaacctttgtgctaaaggtctgggaagcagagggaaaagaggctgactggaatgagatgacacaggacaggaaagaggggaagaattctaggtcagaggtggaagggacatattctgtaatagttttctgggccctcgagttataagtcatttctgaaagcttagagatcaactaaaatatccttccactgtgataaggtggaaacatttttaacttcatttatcttttgtgtgttccattttctgtggtttcttgtgtttcttctaacagagggaaaaaaagaattctttattaaattcctgatctagttaaatatatgacagacagcatgattttacataagactttctctggaaactgatttgcttgatttactgttgttttaagttggcttatatgttttgcttaaacgtttagacctgtcaaaatggccacccaaagctttgatgccagattgcatctctcaactgacagttaagtaaaacatagttttagaatataggcaaggtcttaccctatgtaacagaagcgactctgcagcacttttctctactgtttgtttactgcataagcacattgtaacgggtgtgatttagaagcactagactcaaatctgtttaaaaatcattccagatttactctactaaaaatactaagagaaaatttttctttaagatttcttacttgcaacatagcatttaagaa

SEQ ID NO: 47644 - DNA, 1217 bp, Homo sapiens
gaatttaaatcttttcctatcagtatttggtagagtctgagtactgacttatcagaatatatataggattttatccagttgaagctgcagactttaaggatgtatccatttcctcccctcttccctctgtccttccctccctcaacagtgaatgtttgagatgatgctatccagcctttatagaccaatctatagataagtgactcttctttttagccttcttcatggcgaatttctctccaacattctttgcattctaattggtcttactcaattccaaagaatttcccattaatcaataaagcttcttcttagaagtggactaaagctgaagtttcagcttctgtcagactccatgtgagagactcctttcaaaaagaggcaaactgtaaatccagttttcttttggcattaatttcctagtagttctgggggttcaaatgagacatcagtgactagctgtcactcaagtattttatctcaaagcttaaaggactggaaagtgactgtgctccttccactctcagtttaagtacagtattctgttcctggcagccaagaagcagcaggtgtaggatgaggaatagctggccattgctcctggccagagaaggtgcttcttcacaacagtggaaggtttcagtatcgcttagcctgtccaagagaaactatttttgttccatatccatgccctggtaggagagttcaaatttattttgggtttgctgatggctatactatcaggaggatatcagtgcaggaagccaagaagctaccatctgtgctgtgtttatatctaaagaattatttagaagactgattactcagttagctgggcctcctgaccttctagtattacacttagaaaggtaactaacactttcttgaaagtcacttcacttttaataacccatataattccctcaatataaggtagggatcaaagtattgaccaaagcttcacactgagtctcatgtgttgtggatgctatgaatgatcacttgtggttaacagatagtgactcctaacagtgatatgttagtaaatatttaacaatgggctctctagggaaaaataactgattcatagcatttgccagtttccatgatggaatagtaagaacaattttataaattcaaaaacatagatgaaatatagaaattcctcaaaagacaataatgaccaaaatcaactcaagcaaagtaggaagcccaaa

SEQ ID NO: 47645 - DNA, 1649 bp, Homo sapiens
tttgttaatgaattaattttttttcaaatgtaaataatttgaaatttggaggtgttgctttttgaaatgctgtcccctctaagtctttgtccctctcttcccatctccctccccagccccacttcatgcttacggcaacagggtctgaattatatttgtctgtttttaagacagtgaaaatgcactgcaatttggtttaatgtacttgaatgtagctagtaattttgataaaaatttaattgcatttttttaaacagactctcacttgaagttcctctatgatgaaaaggtggacaaaaattgaataactacaatttataatgttctgttctatcaatgagccttctttttaacagaataactattttttataaataaattgtgatttattttaaattaaattactggaaatcagtctagtcaccagctttaattaagaaatagactaccatcataagggctgtagtgttgattttaaaattgcaaataatttttaggggaaattatgatagccctcataagacctcctcctcctcccgaacgtctcctgcctgccctgcctcttctgtgttacgtgcctggccactgcaggaatctgagctgtgacctttgtcctgcagtctcgtgcttggtgatgtcatccggtcccagggtttcaactcctgcatctgttgatttggaaggcacacaaatctgtaactagagggtgatttcgctcctgagttgtagccaatgtcaccaactgcttcaatgtctttccagcgccttaagaccacacatccaaaccggaactcctcatcttttaccctccctttcctcttcccaacatccctatttcctttaatgggcatttcccacccatgacctgccattaagttgagggcaggaaaccaggaatagtaggaggttctggggtttggaactatgtgggtctggattcaaatccaggttggccacctcttggtcaagtgccattaggcaactcacttctcagatcttcagcttcttcatttgtaaacagagaattgtttggagaaataagagaagaaaagtatattaaaatttggttgtgtaatgtattatccaaaccagagcatattgacagtgaatgtggctattgttaataattattccatgaccctccaaaaaagacaaaatcttaagctgcaccaagcaaaacaggatgtgtgttcattctacgtgtttagtgctatgagtaatgtagtaggtcctcaataaatacatgttccctttcccttccttcctgttataacaatgtttgtcttcagtattttctgaatctgcctgtggtttccatccctcctacccctacagctgtcctcagtccctgacattaagaccattgtaatgttctcccaaccaggttccttgccttccatttttcccgtctaatagattccatgtacgtttgccagattaatcttctgaaaccacatctcttaaaccattctctgcctcaagaccccttaatgagtgcccattgcccgcttaataaagttaaaactctacagcatggtatttaaaagtcttcctgcttggagtccagtagctttcctccgacttaattccaagcactgtcctttgtctataccaggttcttggcaaactctaccatttcccaacagcct

SEQ ID NO: 47646 - DNA, 529 bp, Homo sapiens
agacaaaagttgatgagcagtttttgaaggtccagtctctgttcatgagggaggctcctggtgaagagatagaaatgccactcatcactgtgtacactggggacttttccgtttacctgagatagtcacagaatggagacctgcctcctaggggtcaaccaaagtaggtacgaggaaggatctgcagctggtttaagctttaaaaatgtgcctctacccaggattaggctgcagaggctgatgaaaatgtcaggtttctttgatttggctgaactctgtgagcacaatgttgtaatactgttgatctcatgctgatctgaagctggccaaaatatatatccatgatgaattataataaaaatagggaggattatgacttgatatataaagtttgggaaataaagccatttaaaatattggtctgtgggtgaaaatgacaaaacatagggccataaggaggaataaaaccaaaggttggttgtgtgatctacatgtggagctcagagcatgtttcttcctccagccccct

SEQ ID NO: 47647 - DNA, 1835 bp, Homo sapiens
agagatataggagaagttgttcaaataaaatgactgtttggggtggggaacggagaggcagtgtaaacatggctaataacaagcgcagagagaaactcaggacacagtgacatcagcagagccaggcatctcaaagccggtgacagtctgcaccagcagatttcttgtggagctctagatatttctgttctgactggagtctttatttaacagtcttgatgagtgcattaactgtgacttaactctgagtttgaacgaaaagtacaagtatttgacgtgtttcttggcgacaccttttgacaaaaggatgcatatatccctagttttgtgctagaattctttagtggggactctctggaactaaaacatcctctttggaggttaaattttaagccttttcacagcttctctatcccacagcctcctctctgcacatacactcatgcacacacgtacatagaagcaccaaccccgggggcggactcgcttagcctagatgcaagctgctggcctgtgcacagtgtattttcccacaggacagaggcagagggaacccagtgggaccaacacaggaggcctaagttgggtctgaggtctcccaacctcccagaaaatgtttctcctggatcatgctctttggtttctttccttgtttgttttctacttgagcggcagggacgcaagagaaattgacagaagaaagaaaccgcctgagcatcagacacaggggtgatgggaaatgaaaatgatttatagagtttcgttggcctccactctcgccttttctgctttttgtagctcaacatcccacaggtgtgaacacagcaaactatgtagccctgttttattgtgtaattaaataacaccctacactgagtcaagctgagttgtgaaacctcaaggttcggaacatcaggtagaggatgtggggaaatgcctgccgcctgaggtcactgggttcattttcctggcaccagtagaggtgaggcagctgccttgtaatcagctcctcctggaaattactacacccacacaaacatttgggtcccatggaaacggcaggaatgcggtctggtctaggagcctggaactggggcctgaacatctagattggtttggccccaccaccgacttcctgtgttgtcagtttacacctcgacaccacagttttgcctttggaaacaccaaagagagggtcctgcaaagagcaaatctgcgggaatggtgtgaaagctctctatttgcttaggatgctttagctttgttcccgcccaaggcaggaaaaaagatgaaatgactaaccctattattctactctgtaattctgctactgtgctgaaaggcttcgcagcgtcttgcctgtggtgggagtttggcagagaagacctccacagcccttccaactctgagattcacaatagtcagtgacttcactgaaaaccatggaattgcatgctgtcatcactggagagggcaggccattctgaatggaaacactcttattgggcatttttaaacgtaggcagtagacaaacattcctttgttgcttttctcaggaaagaaattactttctgaagacaatggcaggcacatttaatagaagacacacaggtagcttcagctaagaaataaaaaaaaggccaggaacagtggctcacgcctgtaatcccaacacttcggggggccaaggtgggtggatcacctgaagtcaggagttcaagaccagcctggtcaatatggtgaaaccccatctctactcaaaatacaaaaattagccaagcgtgttggcatgcacctgtactcccagctacttgagaggctgaggcaggagaat

SEQ ID NO: 47648 - DNA, 1540 bp, Homo sapiens
ggaaaaatttaaaagtatgacaacacattctgttggcaagaatagagggaaacaggtactctcatgcattgctggtgggaatacagattggcacaacccttttagagggggatttggtgatgactaacaaaatgattcatccacttacttttcaactaagcagtcctacttctaggaatccaccctaaatatacatctctaaaagtacaaaaatacatatacacaggttatttattatgatattggttggaaagagcttgaatacttaagagagtaggtgaataaactatagtacactcagtggagtactatgcagccataaaaaatgagtgataagggatgcctatgaactgatatgctgtgcttactagggtatactgttaattgaaagaagcaaaatgtgaaaaaatagaaaagcctatcttttgtgtaagaaaaaaaggaaataagaaattatacacatatctgctcaatagtgcaaaaataaatagagaaaaaataaaccagaaactaatgactagttacacataaggagaagggaatgactcctagtcacatacaaggagaagggaatgactcctagtcacatacaagaaataggtagaattgggttggaaaggatgggaaaatgagagcaggatagaatggatagtggggggcagaggagtgactcttttctgagtaacccttcttataaaattctgacttttggcaaccatagtagtgatttatgtgctcaagatatatagatagacaaaatcaacagggatgatgaaagaaatccaaaatggaatttgtatcagtcaagaatccaagccaggaggcacaagtcatgcagtaatttgaatagagaagttcattatgaacagggaaataactatgaaggtgtaaagacagccctaaagaatattctagagctgagagtacaaaaagaataaacaaatttggaagtggcccctctccaaggatgcgactgagatctcatgggaggtgatggagatactcaataaatactaaaaattaatgggttttctgggcccagagctgtaccacagccatcaggcaagtaagaaatacaccctttggtaggcatgccaaagctggcaggaagaaattgcagccagggccagcaagccaaaagcaaccctctggagtgcaagcagtcaagactggcagaagggcattgagaatgactcagcatattaggagcccactcatcagcagggcagcatgagacctgaggtgtgcagtgtttactttaggagggtcacatcgaggtggtcaccaggccaaggccagagctgtgagctcactaaggcaccatgtggtctgaacaagcagctgggacaaagcagcactaaattttttcccgcacactgctggccaccgtgtggtaggagtgaagagataaaacggcagcacatcagggccgggtgcagtggctcacgcctgtaatcccagcactttgggaggccgaggcgtgcggatcacgaggtcaggagattgagaccatcctggctaacacggtgaaaccccgtct

SEQ ID NO: 47649 - DNA, 2287 bp, Homo sapiens
tgggataaaagtttgtttgtaaacgtatgtaaatgtatttacatgtgctagcccagggtcaacctaaaaggtagcgaaagtgtttagcccagaagtctacatagaaactagggttgtctacctccataccaccctgaatgtcccccgatctcggaagctaagcagggtcaggcctggttagtacttggatgggacaatagggctaaggtgagtagatttaatgctccaggataacgacctttaccgacaggtcattgtgtggcacgtggctgtatgtagttattaaaatgtaaatacatatatttacaaacaaactttttttcccagttaagaagctcgctagcacacagcattctgttgaaagccccctttatttcgcagtcctgaagggagtgagggaaggaagtaaaagggcagaggaaataatgaatgaatgcgagacgccgattgtacagggacttgtttccatactgctctctaccagaaacgttctcagtttccttccttctgctggacatgttccaagggccaaaacctcaaataatgtgactttgtagattggagagtgtgtgaccacagaaaggaaagggaggcagcacgtgccagccggcgacagaatgttaagtctgcagcatactccaccgcaatgaaacaaataatttgtgtatttcctccccttccttcgcccagagccactgtgagaatgggctacagaaagtttcgaggcagtaaagccagttgttcacccagaacatctgactgccataaaaattatggtgacgagaaagaacgtttgctcaaatgccggggtcgggttgagggctggagaaaggtcccaccccgcagcatctacctcccgggctcctcaccatgtgcatcgcctcctccatccacttttcggtctcctctgccgacaccgagcacgcgccgcttgcagctggcttgggtgccgccttcgcctccatacccagccaccactcagctacagagcccgcggcagaggaggagcgcgggcagcggaacgcggcgggcccgggaccccgtttccgggggtagtctaatgaaaaggcactcgggagctatttctgaacggacctgggcttgtcggaccagtgagcggcggcggctgcgcggcggcagcggcagaaagcgtagctgctttgctgtagtccacgcccccttgccgctccggtgacagtctctgcggaaagtcacgtttgtgatttcgggagagcacagaacgggacgacggcgctcttgctgggtcatctgggccaggtgacgaagaaacagtttcctggtgaagcagtccctcacccctagtcagcccacacccctagggcctaaagatgctgaggtctgtatggaattttctgaaacgccacaaaaagaaatgcatcttcctgggcacggtccttggaggtgggtgacaacgtgcttgaaagggggcattgggagaagggggtgggagaggtgacttcttctaaaataaggacaggccgggcgatcctagtctgggatatgtagagggagttcgatcaaccatgggatgaaaagggaggtggccaacctccagggttctcccatctctgcagttgagaaatgcctctgtgccctttgccctgtcaccgactcttaactctgtttctcacctatccttttttctcacggacctttggagaactcatcacagtttaagtttctgtttcaaggcaccattctcttacaggaactttttaaaaaaaattctgctttcctgtgagattctgcatttctccttggcactcttgatactttggctctcacccttctcaggagtttaataataatctagggaagttacctataggctgcacttcgggtggtggttaaagtcgatttgaatttttgaaaacagcgcagttgtcctaaaggactgaaagatatggattagataaagaaaaacaaatcaatattttagctctgtttctgccattttagaatacaaactatggcagtaagaaaaatgcttgagggatgttgtgcaatcttcctcaggatcttcaaggttgggatcattgtaatctagctgacataactgagttgcacaggcccagaggagatttagaaacagataagataaaaatcttgagacgcttttccctcatacaatgctcatgtgataatattcagggatttgaaggagggaataaaagttttgtgaattatatgaaaaggacatctaggaactataaaagaggaaatttgttagaacttgagtttttgagaaatagtctcatcacttatt

SEQ ID NO: 47650 - DNA, 1565 bp, Homo sapiens
tagcacctttcatacggcagtatgataactgggttgtgttaagagtaccattctagaacctctttaaaaagttcctagagccacacatgggtaacatgttaacattaagtagccaatggtgttcaatgaacagtcgtttcacatactcatgactatgttttaaccataacttcatggcagaacgactgtaaattggcaggtagcagcagagcaaccataggccattgtgcctgagtcaccgctcgtgtgatgcccctgcacaaactgatgaatgtctgtagtagctcgatgttgtagtgtcataactacagcttaatatgcgcaactatgaagaagctgaggagtcaggagtatctgaaaactcttacagtcacacggaagaaaaattccctgttcatccagcagaagcacttaggcaggaaaccacatattcgacacccggaagtgcgaaacgcgggtaacgcagtgggaggtgaaaccgacgagggtgcaggcagcaccaggcggcgaaccaggcccgctgggtggtggctggaggctgcgggtggggacaaaagcgcggcagacgagacaaaagggagcgcactcaccagaaccactcgctaccgaagctgggcacggaaaacactccccagtggatgaagatgccgaacttggcctggtcaaaccacgcgggcagctggcgggcgtccagggactcccaggtggggtcgaagcgcgtggcgctgtgggcagggcacggcggcggcggcagcagcagcaacagcaacagcagcaacgggaacgcgagcctggggagctcctggggccgcatgtcccggcgcaggccggctgtcctctctgcaggctcccgcggcctcgggagcgctgttcttccgtctctgccgctgagtatgccgcgccgcggtcacctgaccaagtcggacttggaaaccggccacccttccccctctggggcgggagtggccactctcccgggcgttccgaatgacctcaggagggctgcatcgctcagcataactaaggccagcattaccccaaagccagctgggacggctttgctaaggctctgtcctcttgaggggaaaatatgagtctgagtcagggccttgtggccagcgcctctgccctcaagcagacacgaccctgaccaagaaactgcccaagaagacaatgcccccagcccaccctggtggctgctccacacgtccgaagcgtgcacgagaaggtcaaggcaggaacttcagccgggtctcgccatgatggaacatggaaagcaacctagatccttctcggcctctgtatcagctcccaagatcctgcatgttagaaccgtggttgtcaaccttgaatttgtatcagatgaaattccaagagcttcagattcagcagttaggttggggcccaagaatttgcgtttctacccagttcctacttctaggatgttctgatgttgggccgggcgcggtggctcactcctgtaatcccaacactttgggaggccgaggcgggcggatcacaaggtcagaagatcgagaccatcctgactaacacggtgaaacccc

SEQ ID NO: 47651 - DNA, 521 bp, Homo sapiens
aagggacgttcctcctttgccatgaactttcagaggactgatgactcctgagcctgacttacagtcttttaattctgggcgagtcacaacttgggggcctaatcgtgagattgataaagcttaggctttgaaatcaccagctgaatcagcataatctccactgctcattctgcaaaatcctacaaggtgtggcattaactaagatatttctaatcaatgcagctgcctttcctttagaaagcattgactcagacatcaaatctgtgatatttatttagttctcggaagactggctttttaaacatgacctttgagtatttacttatgaaggagttcagaaaatgctgctccaaaatacgctgctttggcaggctggttacttcaaactgagggtgcttggggaaggcaattgcaagaaggagctttctccgaacttccttttatctgcctaaagacagatccttcagcctgtaatcccagcactttgggaggcggaggcaggtggatcaccctgaggtcag

SEQ ID NO: 47652 - DNA, 1469 bp, Homo sapiens
ggcacccccacccaccacaatggaaatgatatcgttagctctgaccttgcatcccagctccagaagcccaaactcggcttttctgcggccggattgctgggtgaacagagcttcgcggaggggaccccctgctgccatcctgccgggggccagtgcccggggcttgggggaggagcagccgggcaggttcgcgggcaccgagggcggcccagctccgagccctgcagctttcgcccgctggagcgagagccggctgtaggcggctccttcctgtgcaaacttttctgtcctcttcctcctcccgccctccgcaccggctcctcggcgcccggcgtccacctccccgcccttctcgctgcctccgggtcgcggcgcgcggggcagagccgggcagcagcgggcagcgcagccctcggcgccggccccacccggtgctccggccccgccgccgggagccgatggccgaggcgggctggcgccccgcggcgtccccggtcgatccggccgggcaggcggcggcggtcccagtccccgagcccgaggcgcccgccccgccggcggcgcctgccctgcgctggcttcccggggacccgagcccccgcggccgctcacagagcgacctctcgtcgtcctcgagcaggggccgcccgctccgggtccacatctccggctcaggtaagagcggctcggggcgcgggccggggagggccggccgcgggcaggtggccgcgagggcgacgcggccaacccggggcgcccgcgggcactggcccggcaggctggcggcggggtgggggtgggggacaggggagggcggaggctgaactccccacactgccgcctcctcggccgcccgggctcggcgaccctaggcggaagatgctaaaagcaggcgacggcttggtgcgccttgcggggcgagtgtgcagcctgggttggggtagggagcgctccctctcggctgcacggcgccaggcagcaccgcagcttggcttccgaggcttttccatcagaaagaggaacattctcggtcttcggcgcgactttggtccctcggaagggtgcggttccctcactttgcgggctgggaccagggcaggtcttgggaggcttcccaactaactgcttatggttctgaaataaagacgccttttgcgggttgctggtaagaggacccgggatatgagtttttcctccttgcaaaaacccatgaggttaatgggggagagcaggggagagtttggcgggctgtttgtgcctctcatcctttaacatgttttgaaaaagcctcggccaggagcggtggctcacgcctgtaattccagagctttgggaggcccaaggccggccgatcacttgaggtcaaaagttcgagaccggcctggccaacatggtcaggaaacttcgtccctactaaaaatacaaaaaattagccgccgaggcggcgcatgcctgtagtcctagctact

SEQ ID NO: 47653 - DNA, 508 bp, Homo sapiens
aaagctagaaaaaaagacctatcactctcataaaaattcataaccatagtccacaccctcacatagatttggcactagaatttataccacctgtttaggtctgtaaatgccaagccaaactaataattgaaagtggttctagttggagaactgtggggcacccagcacaattcagagcaaatcgttttggaaatagaatctcagcccaggtttcctgcaattcccatacattgctcaactaaacatgagttcagaagtcaaaattacaaaataccctaggaaacacgccactaggagagtgagtcagaaggaaaataagatagtagaaaaattagattctaaattaccagagacaagcaggataccaggaagacaggaagcaggtgatttgacccagtgacaggtacctggaaacagtttggttgtttagttatgaagcttaaaaactgtcattcatttttatttagcaattttattcctgcaacttttttcctgaggaatgatcagg

SEQ ID NO: 47654 - DNA, 492 bp, Homo sapiens
aaatgaaatttagagatttctgtagacgttttctatgttcattagtataacttgttagctgtgataaaaaggccacttaaatgccaagttccatcagaagctctagaaaccaagaacaagaactgtcccactcttagaaagaaaacttagtgcacacttcctgcagttttggttgacatgcttcaaggataatgtaatggaactggaagagtttcagagaaaattgcataacctggttagggtattataggaatcccagatgaggctgaagattatattaactagcaaatcatgaaaggtcttgaataaggtaaatatagctgtattaagcaattcctgaaaaactggaactatagtgcacctccttgatctttgaaataagaatttatagaagtaatagaaatatgctattgtttctcaaggaaaagaagaaatgatagcaaccttaaagtttaacttttatcagtatttaaaaattattacagttacata

SEQ ID NO: 47655 - DNA, 1710 bp, Homo sapiens
tgaggccattagtgccgtttttaaaaaattatatttgttaaaaggaagataatttttaaaacgagaaaaaaatgggcacaagacatgagagtgccacaatactgcaaatagaatgtaaggaaggaaataacttttaagaaacaaattttgttaaattaagtaccgtgactaaatactttaattccttttcttgtagcccgtaaggatcatttgactttgaaccttttaagtcaaagaggagtagtctgaaagcctgaactccctaccaccctgagggggtgcgggtgcggcggggccggctgggggcttcccccaccccctgctcctgcgccctccccccgcttccccctcctcccctccctatcgccctcaccccccttcttcccccgtgacccctgaccccagctaatctgcatagaggaatgacaggcatccgctgggcaggatccgccgcgccggctgcggccggccgggctgggagacccgcgcggggtagaaggtgaggggacccggcgggccgctcggcacaggccgggacatgaacgcctggaagtctggctgggagcggacccatgatcgaaggaccaaaggagccgcttgatcgctggacctggccctgcgaccccagtcatgggccagacctcggtgtccacgctgtccccgcagcccggcagcggtgagtccggggcgcacgcgatgcgctcccgccgcgcgggcgcagggctggcggcggggccccggggcaggcagggttagtcgtctggtcgggttccgctcggacccgccaagtccctcggagaaaccccagaggtagcgctcgccaaactctttgtcgtgaaagaggaatgccttttgggatccagccgattttaccttaaaggcacaggctccatttttctgtgcgcgatgcctcgctgtggttttttatccaaattatttcggagccagaaacttacgggaaacgccatttgcgtattacagtgtttttaaaaacgcgaaacttagagagcaagagaaacatgccaacaggtttttctgtatttacgcttggcttccgaacagactaggactgaatgctttcaagcttgtcaactgatttatggtttgttattcggagtagaagcgctgatcgccttatcctggcagacgctgaatacttaataactagccccgaaatgcgtaattgtttcaaatgagacttgttttgtttatagtagatacagcagctataacatttagggaaacatatctcatgaacttagttctccaggactaaagttagttttatggagacgtgtgtaacgtgtctgagttctaatgctctgttttaaaagtttcttttttccattttcttaaacaaaaagagggaaggaaggtacgtctggcatttccccgacagtgtagggataaaaaaaaaaaaaactgtttggtggtgttacttgtgattggataaggaaataaatttaaaaggtactattttgatatttttccatcaacgattaaaaataaataatactcgaagggaccgtttatgttactcattgagatatttgatacactttttaaattgtgcaaacatcaacaggatcttgctgaaaggaaatgacagggtacagaggaaggttttttaatctgcctcaggatgtctagctagatagcattctgtcattccaaccccccaccccactttatacccagtgggtttcttta

SEQ ID NO: 47656 - DNA, 859 bp, Homo sapiens
atttctgtgcatagattggtgtaagcttcaaagtcaaagagcagctggtgggatacttgggatcagattcgagcaggctgcaataacagcaggctctcagtgatgacctggagccgactgctgccgttttctgctcacaaacaactgactttagtccggagctacagagagcttgggttagattgatgcgcagaagttacagggagtgcgatttgactccttctctggaataccttcctcaaaatgagggtgatcgatactgaagtgggttgcgccttaaagtgagcatcttccctctgaatgattttaagcaggtgagcacatctcaggaatattctgagacagcccctgctttgtgcggtgtgttggactagaatgacctctcagattcattgcaatgcaaaccccctctgagcccatgaaaaagtgtccagtgaatgtgctctgcaaacatgcaggcactatataaacaagaggcaaatattttaaaaggtgaagaatgagatacttgtactgctgtgagagcggtggttggaatgttgtgccccagcaacatactttccgtgctcggtcgcctgcagtttgttctcattggccctgtacagaggtatccgcattgtgtgttaaatacgctctcagcgaaagaccaaacaaatagccaacggcattttcctatcagagcctgtttataggaggtagagcaaaagaacaaagctgttggttttgattcttggcaggaagccaaggctgctgcttcaaagctccagagtttacaaggaagaaagagggggaatttttagtttacaaggaagaaagggggaatttttagctgagactaagttagaatttaagcaaaact

SEQ ID NO: 47657 - DNA, 2063 bp, Homo sapiens
acagtgataatgcctacggcataaagacacaatccagggtaagccattcattgagaggtcaccagaaactgggaagttggggaaacaaatttgaaaaaaaggtctgctgatgaaagtgactgcatttaccacacactttcgtccaagaaaagctatgtgagtacgccaacgccggcctgaaatcttcctaagaatgcgtgcttatagcctatttgtttaaacagggggagaaagttaacattcaaacaccagagattctgaatatattttattagttcaaatgcctctacagttaacagagtctcgggggtttggttaacagggcagatgaaagcagttcatgaaacagtggaaaatataacctgatcaagtctgatgcagtctataaaggcaaggccccagcctccgttgctacggcaaccgactccgcccccacccggagagggaacctgaaacttggcgaccccagcaccccagcggggtggtcgcctcccttccgtgtccgcggctttgttttttatggttgggaataggtaagggacacaagtcaagggggatgctagattcgtcccctctggtctccgtagagggagctataaaaggttcgtccacaagcagaaacccctctgtggcgcctcaacgttaaggacccccacgattccctttgcccggcgggagactaaaggccggaaaagtacagcccgcccaggggtgggagccgagctagccccacctcccggtggcttctcgcgatcgtggagacgcagcgagcctatgtaacttccggtcgcgacccatcagctcctcggcgattggtccgtttccacggccggctgggtgacgttatcgccgggtcctggggctgcacgtgtggtgaggcctacagaagcggccttcagctggaccttggtctccccgccggacttcgagggtgtcatcgccgcccctgttgggggtgagcgccgcgcggctgcagcatggtgagcaagccttgcttgtttcggcggccgagcgctgtggttttgcagaggccaggctgcttccggtaataccttggctactgcggcccgggtctgggtcatgccagaggctgcttgcggcacggtaccccgaaatgggccaacgtcaccaccgtgggcattctttgcaagttacagtctcccaccgccgagcctccctgggatgtggcccggagaggagaatggcctttttgttttatccctgggagcctgcagccctgcgtgatttcggttaactaaaagctggtgactgccgacacaaacgcgcaaccctgtgcttcttggggtcgagcagagggagctgctggtctccctcagcgttggagtggcaggtgtctgcctgtctgtttcctctgagaaagggaacttgtgggagagcataaggttgggcccaaagtaaagccacttaattggtttcccagtttagagaatcaaaattgaatagcgaagtaagaatgtagaaagaggtgatggatcttattaaactttagctgtttgtgtcgtgattttatttactggttggtagatgctctgtgtggagctgtctactccagattatgttgtggcaggcttcttgtcattctagttcagtcggccaggggccttccctgagcagccagtgtaaagtagcttttaaggcattttcacgtcactgtcttatattttcttcaccggaaattatcttgattttcttgctaagaacagggactttatctgactttcccacttctgtattctcagttcccataacaaggtctggcacaaagtaggtgctcaaggaatgtttgttgaaggaaggttaagtatggattctgcagaacacagctgatgttgcctgccctagaagtgtagatttttaaaaagtatctttaacatgactactaaagatgcatgtgtggactatggaattattctccgtctttttgttctgttttaattaattgttgtgattttgttcctttgaagcctcacaggaagaaaaagccctttatagagaagaagaaagctgtgtcttttcacttggtccaccggagccaacgagat

SEQ ID NO: 47658 - DNA, 1572 bp, Homo sapiens
tacatcggagttctgttctttcggtggccacacagatgctcaatgccacgacccttgaataactgccatagttgtcacttcacttggctttttcaataaaatgaacaggtcccgcgctcctagacccatgaacactcgggaagccccaggggtatctctgtcctcgacacagcaggggccctacaaacccaacacggctgtgcacccgccaaagtgcccacgcccaccgtggcggggcgtgtcctgcccgcccccatcaggggagtcctgctctcgaaattatcccgcgcgccgccggtaatccggggtgacgccacggcccaggtctcttttctcccggagtctgcggggacctccccgccgcaactcggtcactttgttcccattaactcagtctctgggagacgggctaagctggcacttgagattctcccgttggggtggttcagcaatgatcaccccgccgtctgcgcagacagccccgcccccagcctcggagagcacaggacccgggaggcggcgacctgcctccgcgcggggacagtggccggcggggcgggcgctaggtggcggctgttcagctcccacgtcacccggcccgccctccgcccagcgcagaagcgaagagctgcagacgacggagaaaagggaagcgcgccccaagccgcacaaaggtggccgccggtgtcccaagcaccgaccgccatccccggcaggacgcaggcaggagcctcggccaggctacctcgcctggcccgcggactccgcgcggcacgtgggcacctgcggcacgggttggagcccccgccccacgcgcccaccttaacgccgcgcccccggctccccgccccgctgccagccagttctctcgctcgcccctgcctcacctgcctttcctacctacccgccgccaagtttcccccgcttggaaagttctggagtccggagcccgtggcccactgggtcagctccggccggcgggtccgggcggccgctgggcgtgcggcgcagctccgactcggcggcgcggaaaaggggaaggggaggaaggggcgggagcctcggcggggcgatccccctccgaccccagccggcccgcggtagccgccttgggaacttctgcgctatgattatccgcccccgcgttggggactttgcctctcttccgcgagactcttgtcatcgccgcccgcggttaagagttggggctccgggtcgggctgcctcagttcagatcttgctcctccacttaggagtgtgtgatctgaggtaacctactctacccctctgcaaaaggagggaaattaataataataataacaataattcctatccaggggcgaatccacgtgttgtggggcttgaaactgaaacaactgtgagtagaggtggcgaatcttcaagggaagtataaaatgagattctgggattagcaagcatctgtgcgcgtgagggggcccgaagcttaagcttcattagcttcacgtctcaaactgcctctgcaatgttcttcatgagattaattaagtgcgagaattaaatgaggtgagccgcgaacggggcctagcatag

SEQ ID NO: 47659 - DNA, 2054 bp, Homo sapiens
acgggaaaatgcctgtcacatagagctcaacaaatatttgttgaatgtagaatggatgaactcgcttgccagcttgtcatttctggagacatggccacaaattcccaagaaaaaaaaaaggatgcattttaaagaggctagggaggacaatgacagcaaagactgcaaagagttttaaaacaggagaaaaagaagatgggatacaataaccacaaatttcaatactgaaggcattgtgggcctgaaaataacgctcttgggaaaagtggcagtcggggaattaattataaaggtagacacggcggatctaagtgcctggccatggacactggcatgcgctccctcacccaaacccacttcccgctcagctctttccggagccttccaccctaacacagaaagttcacaccaagagactgaacgatttctaaactttatggaaaaagccaatgacaatcaattagccaaaaacgagacgccaaatcccatctcactccagcgccatgccctcttctcaaacgctcgccggctctaggacctctccaccagcacagttctcaggagtcctgctggtctcccagtgctgttctaagggtccacatgaaggcaggtcaggcgggactccccgggcaagcacttctgtacgcggaaagcacgaggcgcaggagccatggagagccggtcctttggagacaggaatacttaagaggattggcaaaccggagaaacgctgggagaggtgccccgcactgcggtggtaaggcagagtctcagttctcctcgggcttgtcggctggcggtccacaaggctgaagcatcttttccatcaagttgaagcggactcgcgctttgctctcattctccgcaatggcgaagtagttgagaaggtcgaagtggcccatgtaggagcagtacgagtcgcggtgttggttcaccagccactcccacttggtggtgtcggcgtggcccgtgccgatgtacttggactgcaggtgctccagctggctatggatggtgtagcggtcagtcatctcgccgctttccccttcgctctcaggtcagaggacgcaggtaacaactcgccgctctagcgttttacaggagagtgaagccaccgcgcggaagctccaggtccgcgccgtcgcagaagaatggcgtcacaacgactaagtagcgtaactctcgctcatagggctcagaggcggaagcggaagcacattctgtcacgcaattggagttgctgaggcgacgcaacaagtgtgcctcccccctccatggagatccccgccccatcagagaatgttgcatgatggtccacttagtggctaagggaggcccttttccaacaaggagcgttgcatgctgggacttgtggtcttgggagttcgtgcacgcaggcttccgggactcctggtcgcgttctgttgtttgtttgtttgtttgtttaagacggagtcttgcactgttgcccgggctgcaatgcaatggcgcgatctcggctcactgcaacctccgcctcctgggttcacgcgattctcctgcttcagcctcccgagtagctgggatgacagttgcacaccaccacgcccggctagtttttttgtatttttagtaaagacggggtttcactggtctcgaacccctgacctcgtgatccgcccgcctcggactcccaaagtgctgggattacaggcgtgagccaccgcgcccggcccctggtcgcgttttaaaagtgatctggggacctagtggagggcgatgtctggaggtggggagcatccgtgggtggcttggggctgataggaaatgggaaacccaagaatgactggactacgagcagccccgaaaataaactcttggtgtatttcggagccgtcgtggcggcacggccgtcccttcacaaccggggatggattacccagaagtcagcaggcgccagttctggtcccaactatgtctcttaggagtttgtggcataaaagagttatttcagctctaaccagggtgcttggtgagcaagtacagcaccagttcccacacattccggcttccac

SEQ ID NO: 47660 - DNA, 2030 bp, Homo sapiens
ccaccacctggcacaatccacactttctatttatccctccccgttaaagtgccgggacctggagggtgggtcttggcagtatttttgagcgcggtgggcacacaaggggacgctcagttgatatccagagaatgatgagcccggcgggtgttgaggccgactggagagaggttggtcggcagggttctgggaaggcggtgctcggcctccgtgtgaccgcaggctcctcgcccgcgtcctcgagggtcccagggatgcaggacctgccgcagcttccgcagccacacccacgctcagagacggcttccagcgtcctcgccgcggcaacgcaccggactgcaaatgtcaccagcgcagcggggattcccgggggaagtccagcgcgctccctgccctggggaccagaggacgagcggaggaagtgtcttgggcggcaaacatcccactccccgcgccggtccgcgcagcccgcgggaacgcccctgggcttgcgggaggggctggagcgcgtccccggctccgggcggtcccgagcgcatggactctgggtggggcgggaacccgcgctctgtgagccggctgccgccgcgccccagcgctgtcatcccggggcggggcctggtccccagctgtggtcgcttcctaagcggcgggggctgagccggcggcgcccagatgcggccgcggcggcgcggagctcgggcggccgtggaggaactcagcctcggccgcaggaggcgccgggagcggagccgccgggagtcgcgcaacaggtttccttctccatcgctgcgcccacaggggacgcgcgccctgccgggagaggggcttctcggttcgcactctcgctcccagtccaggtttgtttttctcttcctgagcccccatttctcttcctgactattttccccgtgcgcggagagatcggggagggcgggtcggggcgggggcactgtctaggctcgggacccgcggctgtgccttaggtgggattttggatctggcgcaggtcctcacgccgcctctgggcaccttcggaaacacagcattgggtttctcatataaagcagaatgattttttaaaattacttttaatttcagaggctgagggacttaggatttagtgcttcgtaagaattattttagggatacctgttggtaggctgcctttataaagtgtccacccaagactacttttattttaaatcgaaaggctggagtgtttttttattatcacctcttcacttcctagtagggtgactgtgtcaaaaacaccagaatgggtacttcttgacttgaacttggcggtgtcactcagtagccaggaaagacggagaaattgatagagccttcgaggagtcccttcgaagcccacgtaagactttgttttagaaacatggagagaagtagtggcaatgcctgcgagagccacgccgtcctgagagggaattctgcctttttctagactccgctgacaccagctgagatctgtattacttcctgtggttctcacgcacttgtttcagccgtttctcagcagagggaggagctgttatttacaggtatccaaaaatgagtcacagggctgctctcttaattgtgagactttgttaatgaacttttgaaaagcgaggcttgctttaaaatgagactctagatgtgaaatgcctgccctgccaacctggggcagtggtatgggaagtgacgattgagttttcagtttcctaaggcgcctgatgttacaacatgccagtaaaggtcactgggctgatctaagataaccattgaaatcatgtgctttgccacagatgcccaagagaaaattaatttcattattcaatgaccattttgctgtcattttcactgcatgggagaaaggtatcatttaatgtggtgattgtaagtaactctctaaaatcaaaatatttcagacagtttgtgtttactaaattggtgctaaaaccacatgatgatttttgaagcgggtgggtcccagcgggagcagagaaatttaaaagttgaagctgaca

SEQ ID NO: 47661 - DNA, 464 bp, Homo sapiens
gagattttttcagattatccagaagtcatgggaaccgtgggacagcagaggagcaccggagccttagtcccagcaggcctggtatagtgagagtcatcccttgcttttcatttaaattcttgatgtggccaacagacagcacagcccaaattcctttgctggcttctgaccaagattgcaagagggagagtggtgtccctggcttggccttatactatcttagatagcagagtgagagatgccaaattttttgaatagttgcagatgggggatgggaatcagtgaacttagaggaatcagtaaactttctaggagaataagaaggtttcaggatatcttatgccagaggaagctttgaggtgcttttttttaaactttaataattgtctaataagatcagagataacttacaggataatgttaagcattcataaatgtaggatggatttctaggagaataagaa

SEQ ID NO: 47662 - DNA, 1650 bp, Homo sapiens
taagagttggcggaaactccaagaaccagggcagcaggctcgtgacagcccgtgttcccagggatcacaggagttccaggaagaggcaagacagttcttacaatgtgacccagtaggagagccattggtgaggtcttgcacagtgaggttagtgtgtgcagtctccaggctgatagaagttcttgatgaagaagtctctgcctgcaccatatgaacaagggcgtggccggacagtcgtgtggctgccagatcccagctcagccacaggcccctaccactccacaacacagagcctgggctctgggttctgtggtagatatgaggtcctgggtagtggggaatggagtggaagtcctgggaaaagggataacaggacaaactgaatctcatgtgcacagaaaggaaggacagcattgcaaaacaaggaaggggaacagaaatatctcattgcatcgtagggtagcgggggcaaagaggaggccactgcgctgcatccaagactgtgcagtggcgatggtgccttcagccaccaggaagggcgactttgccacgctcccctgcatgtggcgtggcacagccgacacgcgcatttctacaaagcctccctcccgtgtgacttgtggcacgtgcgaagaagaaaagcggcccctaggggcaggggtccaggaactctgctgctgcccgtgcacctcattccttgaaacctactctgcttagaacaacacaaactaaacgccgccctgtgggccgcgtccctgcaccaccaaccaggcgcctccagaacgcgctcccaggaacccagaagtttgctggtgtgtgtttgcggcgcccgcgcacctcgaaactgaaagcgcaactggagggcctggagtctcgccccagccaaaggcccgcgagcgccgctgccgcggcctccaccccaaccgagagcgcgccgctccgctgcagttgtcttcactgccgcagcgggccgggggcaacagtgagccgcggcggcgagaaaccgaggtaccggcgtggcggccgccccagcccgggctgagagagccgagacagtggcggcgaaaactctctgcgttctggagggagggtgcgggcaggaggaggtagaggatgccttgtaagcggagcaaaaacaaggttcaacgtctgcaccaggatggccgagtggttaaggcgttggacttaagatccaatggacatatgtccgcgtgggttcgaaccccactcctggtagctttaggtttttctcttaaatcattttattttttaaaaatacgaatctcactgaacacaccacgccttggacattagaattccgacttctggctgggagaagcgcaacgctcacacgcaaagtcctgcttcccaccaagagaccgcgcaggcggcggccctcagagctctgctcacttccccagctgcggggcgggaggcggccgggagggggagggctgtgacctggagggtatttttaaaactgcctctgcaaaaaagtgaaaaatgcatctctcttttttttccctttctctctctctcccttttttttcccccgccaatgttaattttgtgcacacaactcttctattaactcctagaaggcggagactgtatcatcctagatgtaaaatgcactccaacttgggttcg

SEQ ID NO: 47663 - DNA, 3032 bp, Homo sapiens
tgaaataagatgtttataggcattagcccaggctcataataaaaccaaaggaaaacattcaaaataggtattgactatgtatcaggtacttttgaataaaatgttaagaatgaaaatcacttattgaatactatgtcttcagagttatgctaaatgggtttatgtattatattcgtttaatcctccatcactcttatgaagtaggtatgatgaaaactgagaggttgaatattttcctgatgtcacaactggcaaatgggagcggaacctagagccagggcatgcgctctgaggtggtctgtggtctcttctgtttagacagaaatatgcaaacaattacttaaatgttcacaaaataaatttaaatggatttctacttaaaatagtaggagagaaatcctcctacttaggagagattcctctagtaggagaggaatccttaggagagattcctctaataggagagaaatgctctacttaaaatagaaggagagaaatctgtttttcacctttatggtcaccttctctgctgagtaaaaattggaatacatgctcttacaatgggacaaggtggccaaaaaagaaccccggagtcgaattctctttcttgcctctctcttccttctttgatgtcagccttccactcttgatgcctattcctccatgtttacccaaggccaactttgagggaggaaacgtagctgtgaaagcactggccggagggcagcattcttttccagtgctagaattctttagtgtatgagctgtcacccagcccctggttttctatctctgattagtcaaagggctgtagaaacatttatactctctcctctggaagaattcttcggcacactttcccacctacatcccagcttgaacactgaaggaacatcatgcttaaacagagaaaagcttagttttaggggaaactgatagacaagctgggattgagtttcctttttaggaacattttctagattaaagaaaatcagttctactcttaatatgttaaaaatgtgtcatgtgttggttatggaatttgtgggaaaaactcaagatggtattgaagtgttctaaagaaactgcagcgtcatcacaaaactatacaagtgatattagaaacaaaagctctgacagaaaaacctcctttcaacagaaccagaaaaatgaatgcaaccactggatcactggcaggatccaaacacttggcttctcaaggtaaccactgagaggctggaggtcaagttcaggaaggtaccatgtagaaaccatactattcacccagccaactggagacagttaaccgatcacaaagaaaaatgaaaattgcaacttctagaatttaaaggggtttgtccctggaatcttggctctgttaatggcatcgacccctcaggttaatattaaacaaactacactctggtattcattaccttatcgtgagccaaaggaagataagcaaaatatgcagggctctgacacagctggagtgggccacgtaacagaatagctcttgaagagccttttactagtaccgtcctggtaacaaataacatttagtgatgattaaatgagtatttattctcaccaaagaaatatgcaaaaatttcctcatatatttttgtgtcttaatctcttttctttccaatctataatttttctttagcacaggttttctcattcacttagtttcaatgttatttaatctttatataaatagccttaaatcccatagagaaatcagcaggtcactaaacacttaaatacttattaagaaaatgacagaagaaattttttctatcttcctctttcgcttctctttttaaacgaaggttggttgacagtcgggtgatctcaggcctaaagtatttggctttccccattgttcaggactccgggtaagccttggtaggcgagtgatctacaattaagatgacaatccccacccccctcctttgcatttagaagttgggcctttgggattttacagtgtgctagcactcttaaagactattcatattaactgcctttttggttgataaatttgtatatcagggtagttattataactaccctgagctaaaaaatgaactagagatttttgcaaatatgcaaaaactgctcttactttggaaaaaagcaaaaaaacaaaaaacaaacaaacaaaaacccccaacaatctcagctttcataattaatttcaaagaacaaccatcagaacagtattttttccccaaagtgggaaaattgaaaaatatatatattttaaaagattttggaactgcagaacagacaaatgtcccaactcttaaaatctgaagttaataaacggctcaaaaatcttgctgagctaattaattagacctgttccccaaacactccctgttgtcttgaagttgaaggaagaaaaggctctttttcccacccctcccccatccagcaggaggagctggaaatagagacttggtaagtggactcccgaaagggttatccctttccagtaagcctaggtacagttagtgctactaggacaggatgctggctgagtacaagctcagccggaattcccaaaacagaggcacagctggggtggggcagaagcagagtcctccaaattcacagctgctaccagtttcaaaactgtttttagaagccgcagggctgggagtggaacaggttctgttcacttagtgtggctcagtttgcaattctgggacaggagccaggtagaggattttctcccataattcttaaagatgacgtgtgctctccggagagatgtaacattacagactattagaactcggtgggccttgggaggtcttctagtggatccatccactcatcctacaggccaggcagtggaggctcaaaaagttaagcaacttgcctaaggtcacataaatggcctctgacagagctaggactctgttagctcagaaaacccagtattttcttccaactcatttatagttggttatccaaatcaaaattacattaaaattttcagatataaaacataaactttg

SEQ ID NO: 47664 - DNA, 3621 bp, Homo sapiens
gtgaatgaataaaatcatacccatttcaagttaatcctttggattttatttggcttatacgtagaaaatcatcaaaaggaaggaaactgtcctagaaaccttacaaggaagagtctcttttgggaatctcctacctgccccctccctggagcacttagggatggatgggggaaactttcactataacaaaaggcgagtaaactctttctgaaaattagtttaaggcccctagtggtttaatctttactgccgcgtaaattaactcaaatattaagccagcaataaaccggcgctccagtatcaaccatccttttctctgttaatacgaactaggaactcaggttgctgttttctttcccctcccacgtgtgctgatcgtgtaaaagaatcacaggaacacacgagcaatgaaatgtgtaaataagaaaaatgcacacacatcacgagctcatttcttcccagatattttttggtcaacctctcaagcttggaacaggctctataacagatgtgcgtttgtgtgtgcatattggaaaacagaaaaataaggtcagcgcaaacactacttgtaatacaaactaatgtaagagaaaacttctttttcaatattaacaacgacactagagaaataatgtaaaataaatatacggttggaactaggggtaaaaaaaaaatcagcaacgtcagcaaactgagatggggtgagttggaaggcagattggaatttatctcttaaaaaaatatcaccctaactagagacctgttttgcctaaggggacgtgactcacattttcggataatctgaataaggggaattgtgtctgctcgaggcatccattctggttcggtctccggactcccggctcccggcacgcacggttcactctggagcgcgcgccccaggccagccaagcgccgagccgggctgctgcgggctgggagggcgcgcagggccggcgctgattgacggggcgcgcagtcaggtgacttggggcgccaagttcccgacgcggtggccgcggtgaccgccgaggcccggcagacgctgacccgggaacgtagtggggctgatcttccggaacaaagttgctgggccggcggcggcggggcgagagcgccgagggggagccggagcgctgcagaggcgcgggccggagggctggcgctgatctgcacccttctcatctggagagcggacccctggctgcccggaggcgagccccttcccggggggtgggggcggcaacgcgcgacccagcggtcctgcgccccaccctccctcctccgcctccagcgctcggctccaacaaaggggcaggcccgcagcggggaggaggaggaggagccgccgaaggagcgagcctctctcgcgcacaaagttgtggagtcgtttttcctcggagcagggaagcgggcagcagcagccggccgcgggctttctcccgccgaggggcgaggaggagcctctggctccagaagccgattggggaatcacggggagcggcgccccccttcttttgggtcatttctgcaaacggaaaactctgtagcgtttggcaaagttggtgcctgcgcgccccttccaggtttgcgctttgactgttttgtttttggcggaactaccaggcaggaagattgcacaagtaaggggcgttttcagtcgggtgtcaatttctctttctttctttctttttttaaaatttcggttcgtgtctgcttctccaagctttatttttttttttaaatacatcgcaccaccaaactaacactcgcacacacccccgcggttactccgtgtcaaactcctagaggagcccttggccagctcggggtgcggcggtggcgaccggcaggcgaggaggcccgcgggcagcaggtaagcccatgcattattgaagcctcgggctggtaatgtgactacagcccccgagggaatggggcgggggccgggaggaggatggctctttctgtggttcttccgcctgggatcggcgtcccgagctgcttcccaagtcccagagtcgaagatgggagtaacttttgcgtgccctttcctcggggcctcagtttagctccccgcggtgcgagagagaatgccggaggcgtggagagctcgggcgtggaggtccttgggatccgtactagttgtgaacgatccaaacttatctgaccagctctgtgctgcctccctgctcccctaatcttcctccccgccggggtgacagagtcgccctccgtgcatcgcgcggtgcagggcgctgggccagtgatttgcaagaggggacgtggcctcttaggagagtctgtcacagacacccgggcccggggaaggcggggctccggcggtgtccacaggagagggtgggcagagggtggctgtgtggtcggcggccagcggagcgcttcccagccagccgcccggcggggaacgtgcttgacctctgggtggttgctgctcccaagggtggggctccggagagtgtggcgcgatcgccaagctccctggcagcggccctggagagactgaggggacaggaggaggggggcgccccattggtgtgtagtcccgcgcagtcgccggctctccttttccggactctggggatctcttgctgcaactgacaaggtaattcatgccccgctttggcccggggtccgaggctgtggttgctcaaggccacttaaaaaccaacaaagcaccaattgaaggctgtgcaactttcagatggcaggttgttcaaaggattttttcctccaagcctcagattatgaaagggactcattccagtgcgtttttcgaggaggagggagaaaacgttgcccgacctccgagagagctgtgggaccagcactttattttacaaggaactgcagagctcgggttctaactccacggccccgctctctgaggtgttcaggacagggcctcctctttcccagccttcaggtcagccggatcaccagggccttgcgggccagttccccctgccgcggttgggagggtcagtgcagcggtcgccgcggccagagcgcgcggagctcgggggaggccggattccctaggtctgagccgaccctcccggccgcccggccgggcggcagcgaccgcatccattcctttgtaagttgcaccggcctcaggaagtcgatctgggccctcccggttcgttggcggtgggcgtgggagacgcagcctgcggatagctcagggtcaggggagaggtggaggaatgcgaagcttgtgggtagttctgcggtgacggacagggttggcgtggaaccattccccgccccttttaccagcctttatgggaccgatgagacaactctttaactctcctttgggtgtttacctaaaatttattggctctgtaaacagtattaatcacagtagtattaaccttccctggagcgcttccgagtgtaaatggcagttcttggcactcaccgttttcttttactgtgtttcaagcagagcagcaaactcttgtccgcttggcttccttttctactatctcaatcgttcctaggttttggttcctatagtaaattaatgaatagtgtttgcattacacagcatttccatcataatgcacactgttggatatatatgtgctatat

SEQ ID NO: 47665 - DNA, 1004 bp, Homo sapiens
aaagatattctccatgttgttacctcattatgctgaagtagtgcaatcatgagaaagtttttttgtattaatgtgattctcatgacctgttactatggttgtgaaacttttagaggagatccattcccgactggaaaacgtgaattgctgaggatgattctaagcaaaggaagtacgttaattatatagacagaacagagaactcaattttattgaaccttatttgtacccagaagtttgaactagatgctgatatgatgatttttctgggaacaagtcaacatgcaagactatttgagcagctgtaaatattagttaaaatttaatctaaagcaatggagaaagggtactctgctgaagtggtttcagatgcattggctggatttttttttctccccttaaattgtgtggaggcatagacatttactatgttatatttttatctttttatatgccttaactgtttaataataaatagacttatttcaatatttgaaatgtgaggcagtatgagttcttaatgtatacttactctcgagatgatggctcttggactgagaaattgaaaccaggtcccagtcctttcgcttttacttcctgtgacactggatttgcacatgtcaattccaggaagcaggtagtttccagcatccatgtggttttccaatctttgcatttgtgcctttaaacaaccaaatacctgacgtttattaatatcctgtggggctcttctatcagaagcacattctcttggcccggttcataagggaaatgtctgtgtatgcgcatctggcagctaagattaaggtttacagtggtataacctcaccttcacttttaagaaattaagtttaaaaaaaatgcagatctgtctttcatagcagtggagctcaacaacacatagagcatgagagtcacattttttgtgtgaatattttcgaatgagccttttttggtatgtggacgggtggctagttacattcagttcaatccttttaacattt

SEQ ID NO: 47666 - DNA, 656 bp, Homo sapiens
ttctgtaaaaattataaaaacctagtctgttgataatgggctcttttaggtagagtctagggtaggaaatcaaacattatattcatcatggtacttgaaatatatttaagctgaagctgtgcactccatcatgtttttgatatatttttccttggcattacttgaaaggcatgctcatgaaactggatttggatctgtttcatgttttcacttgcgttctctgacccctacttagagggcaccaggtgcttcctattctaaccgtttgcaaattcaagacttggttggagggccattcaggggactggtgtggggttagataggatctggacacagcgactccctcgctcctgctccagtattttgaccttaatttgaacagttcaatgaactggcaactgaagtcgttttttcccactgaactagacctttcattgttttgcagaggaagatgactcatagccaggttctaccattgtgctaaagtgaaattttagtctaggactaaaggaacacaggccaaactttctgtctgagctgcagagtattgaaacttagattgtgagctgggcaggaattcctgtggccctctgtgtggagttgctctcaaggaaaaggagcatttaaatacgtttttgactccaaatttaattttt

SEQ ID NO: 47667 - DNA, 820 bp, Homo sapiens
tctttagttggttatctagaattaacatttggattatgtttgctaaatgcgtcagccatatcctaagcgctgtgatccttttagaactattaacagatgagactggggggcattttatggttataagagctaaatgatatttatgcaagtgtgtaaacattaataactcagcgtttataagcatgttagaatatttgattatggctagggaaatgcatattagctatctagcacagatctaaaagtgatctgggctatacctttcatttctggatttctttccttaagcttaaagggtgttctaatttcattattatcaatctcaagatcatttcacagtttcctggtggttgggtgtcatggtgactttttgttttccaggctctttgtttggatatgtggccttgtttgagttgtctttgattgctatatatctgtacccttgtttgcttttgcctggctactgattctcagtgtttcactttgacctttgataaagctgtgactctgattcatttttaggggggattcacctcgttggtggaatctagccttgccctgccaggcggctgcctgggtgttgcttgctggttggaatgtatccattgaaggccttagatgttggagtccttgcttcctagctccacctctttgtttcagggcaccactcttctggtctagtgcacagcctggtctctgtcaatcagcacgttctgcctggcgttttatggcatgttttcttcccccccacatagggtagcagcctttttataagttgtaatgggtttttgatacccactgtcatttttcttttcttttt

SEQ ID NO: 47668 - DNA, 1954 bp, Homo sapiens
tccagcctaaaatcttttatatcatattttgactgtaccttttctgtgtttagatacataaatacttaccatgtgttacagttgcctgcattattcagtacagtagcatgctctataggtttgtagcctaggagtgatatgctataccatctagcctaggtatattgtaggctattccatctcggtttgtgtaaatatactctatgatgtttgcacaatgatgaaatcacctaaggatgcatttctctgaatgtatccctgtccttaagtgactcatgactgtatttggaatctgagtgccgtgaagtcaagagctgctttcaccagccttgattttcgcatactgtatgacagaaagtaggcactgatctatctctctactggaaaatccaaggcccaattctgcatctgatttgttattgatacaaagaattagaatttcactcttttaagaaatccaaactgcactttctaaatcttactttcttattcaattttttgtagatttttttctattactactactattgctgaaaaacatgatctgtggtagaaatattaataattgtgctttgagagtattgaagtagggtaagaataatacagtatcagatcagagagagggtgggaccagatctcacaagatttttatttggagtttggattggatttgcctgtaatggatgcccattagggtaaatcagggaaattgacacaatgtggtctgcacattaaaattggaattattctggctcttacgtagaagcaaagagatcagttggctggagctggagttcaggcaatagataatggcggtttgggctagagttgacacaatgaccatggtaagaagtggtcatgtttgggatgtgtttttggaagtggaaggacagggctggtgggtaggttagaggtggagaagaagtgaaaggaaatgaatcaggaatgactcctttgtttttggcctgagcaagagtcattatttcttgatatgtgatgtatttgcaattaatcatattctgtagtccgtggatgtgtgtgtgtgtatgtgtgtgtgtgtgtgtgtgggtgtgtgcatatttgtgtgtggcctttctccagagttgaccagttccttaaggcattcctctttgattaatcctatatttcacctatatgtggtcatgctctatgcagaaattgctcatcggtcaccctatgacctggtgtgcctgtagacaagatctatttgtttagcacagtgttttaggaaattacagttaccaggaggttatacatataaattcagatttccaccttctttttaaaaatgagaagttctgcccacagtgaacctgaattcccatatggccacccttagctagaactgagcaggagctgccacttgagcctgcagagccagctgattctccagatgtgcctggggctcatcaggtttgcttccctcacatgtgtcatcactgcagttgtttgcagcccttgctccccgctagacccccctggcttctccccttgcattgtgctgaccgttcgcctttgtgctctaacattttaaaatccagcagcagtagtgtcccagccgcaagcatgagtgctggtctcacttgtcaaaatggtgatggtagagggagatgagacttggggacagccaaagctggccacgccagggctgtagtatctgtcatctagagttgtgtcatgtggttgtttactttttttaaagttaaatgtgacccaaggcttatatacccttcaagttcaagactgttcatttataccattttgtatttattggaaaactatggaaactctcttgagaataaggagaatgacctgaacttggcatttctgcagggccaagcacaaaggaggtattcactaaatatttgtccaaatgcattattcaactgtattctctttgtcagagaagtctctgcaaatgagtctttgcaaa

SEQ ID NO: 47669 - DNA, 679 bp, Homo sapiens
ttgatagctaccaaagacatatggatattacaggtaataccatagccatttcagtatgaaaaaataacctcttagaattttttttacttaaactaaattttatttaaatacacatacacgtgtcaccatgacaccaccataattaaaacatcctgttgattaatttctcttttgctacatttttcatttcagctcatcctaatgtccaaaaggtggtgctagtatcatctgcgtcagatattcctgttcagtctcatcgtacttcggaaatttcaattcctgctgatcttgataaaactataacagaactagccgactggctggtattaatcgaccagatgctgaagtccaacattgtcactgttggggatgtagaagagatcaataagaccgtttcccgaatgaaagtaggtgcatagtgtaaaagcttgtcatggaaacgccacaacccagaggtagaccagatctgtttgaatcccttttgtttatcctaaactatgagagaatgaggtttaaaaaattctgtatctgtcaaacaaccattcagggctaactacaaagcatagagcttttcttgcatttatactgttgtgatatgatcaggtttactgacttaaactaaagacccagtgcatttttaaaatctaaaactgataccgtaaagctaggcacattagta

SEQ ID NO: 47670 - DNA, 1896 bp, Homo sapiens
agggcttgatgatcacatgtgacactttgagaaagaaaaagggtctaaataggcaacttccaaattcccttgattgtagtttatattgattaggactcttttgcttgcaaataacaaaaatcaattcaaactactctaagcaaaaaaaagaaaagaaaatttattggacagatcatggaccatgtcattgaatttgagggcaatgaagcaactagaccttaggaaccaaagtaaagattgcaatgctgcaaggaagccagagtcctcctccatctcacatttccgcgtcttctgtacatctctttcatgactctctctcattgctttctcacaggctctatggccttgtataaaagagctggtacctcgtgcttccagataacagttacttatcgcagactagtgacccagtgggaagcagatttcttgctctctcaagctaaagaattgctttcccaattcccaggactgattgctgtctcaggcattgaatcaatgagaccatggtgtttgagggtggggtgacacactgtagaaatgtgtcagcttctggggtaagcttgtgggtagcagaaaaggaagtcatttctagaaaagcagcattagacaataagtgttcactagagtaacttttaaaaactatttgtgaaaaaaagagaccatcaactcagcaaactaggaaagcacaaaacagggcaaaggcacagtctggtaatgaagaaggagaataagaaatgtaaagttgtggaaaaacagaagaaatgagactcagagggaaaatggagaaggtagagcttttccagtggggtaataatggtgcttgtgttttcctagaggtgtttgaaagtctaatgaacaaagttttaaaagcattttgtcctctcatgtgctgtcaaatataacttcctgcaatgccaggaagattctatatctgcactatccaatttaagagtgcattagccacatgtggctactgaatgcttggaatgtgactaatttgatagagggaataagtttttaattaaatttaattttaattaattcacattcaaatagccacatgtggctagtggctaccaggttggatagtgcagcttcacagctgatggactgaatatccagaccatggccacactgtagataaaaacagaactctgacccattacagacagcgacctgcccaggaaaaagccaagtcaggtttgcatgaagtcagacctctaagaacaatccagaaagccaatcacccctgtaacatttagcaaaaaaagaccaggacttcaataatacttgacagctcccctattttttgtcgccacttctcatttaggaccaaccagagaaagccaaatatgcacccatatgacgtgctccatgatgagttagcctgctccaagcctgcagtctctgatcagggcacgtttgaacccccttttctctattccaagcttttccacccctttgtctgcctctgagtctctgccaaaacatgagcaacggtggctgactcctttgcttgtttccatttggttaatatttaatttccacatagtattgatttagttagtgaattctgtttatgcctgtatgtgttacttaattgttttggcacatgcccgtcagtgctgtatttttatggtatctgaatgggaaaccactatgtcatagggatttatatatttttaaaaattgacaaaaacacaagttatccttgattaatatttggggatatgtacattcagtagtccccttgtatttattacatgtgcccatttgtaagtgtataaattagagttgccagatttagcaaataaaaatacaggacactcagttaaattagaatttcagataaacaacacattaatttttggtgtacatatatctcatgaattattt

SEQ ID NO: 47671 - DNA, 1243 bp, Homo sapiens
aactccagtaaaaaagccataatatgtttcctgaaatttgtagactatcattttcacatgaccatggactaaaagccaaaaccaatattaaaaggcagcattttttaaaagttttttttctgattataaaaatgatatatgtccactgggaaaatacagaaaagtacaaaacatatgaaatgtaaacataaccccaacaccaaaagagagccactttaaatattttatttgtaaatctttcctgtccttttcctgtgcaagcacatgcattttaccagctttcctaatggagaaaaatgttaggcccaaagtgggtattccaagccacttttaaaactggctattggagttgttatatgttaaataatgcaaggaggttttctagttctctccaaggcctgtctctcctgctttctctctttaagctgtcacaggtgagaggactagtcagggccggactggctcaccttgggcaggtcagccattatctctctctttgcagaaataaatgcccttggtaaactctaagagtcaggtttagaaggaggtagtgaatgaccacacttagtcttcagggtctaagctgtgtgctcagcacagttgttaacagccagccttgctgtgtgggggacaactactgggagttactgactcagctactggaatgactgagtcatactttgagtcagatttagtttcttatatagacttccctaaagaggcatgtcaggagggcagatgatttttaagaatgcacttgttcatttctgggtttccaggacatattgctatctaaatgcacttgaaatcttacatctgcactccaactgtggatctcatggtattcagggataagatggtgaccacaacatgtggtacaggtgaaggcaaaagaatgcacaaatcatatgtcattttagccacgtagaatgccacaacagtgtctgagggatcattaaattatacaaacatacacacatatatgcacatacacatatataatatatacaattatacatataaaatatacaaatatacacatatatacacacattcacacaaccaaaaaagtagctctgggcctaggatatttgtcagaattatttctgtctattttatagcaacttaaaaaaaatcccaaatgttacccaaatgtcagggatttggtttagggcccattgcttgcctcacaaaaagccaatcactgagacaataagtattgccaggaaagaagactttaacc

SEQ ID NO: 47672 - DNA, 1763 bp, Homo sapiens
gacgtggtctttgccctcatttaccatagacaatcaaagtagatgcttatggaacaggaaatatacttaatgaccagtatgagaaaaaaaaatgcaggataatgtaaggaacttatattgaaggtaatatcccacgttttatttttagaatggtagaataagaagaaggcactttcttgaatttaagaagtttctttcattattgtgtgaaaaacaaaagtagtattccaagggcacacagctttagttgttttgctatgagcctttgatcctagctttctcatggttgacatcatttaattcttcaaggctaggccccaattcaggtcttttctgaccatgtttttttactcttcattttcatcatagcacttgctactattagtaattgtagtatttatttcttgtctaatttcccttcctccccaaatggctggatgcgtgtattttctatttatttacatattatccggtaacattactatatgggtcatataaattgctctgaataaatactttataaatgaacagataagcagaacccatgagaaaatgaaataaagttgattgttctgattggtctacagaattttaatgatgatctcatctgctggatcactgtctattcaattatgatgaatgaagttccaagagattttattagtcgattcggtcagggtccaatggtcagataagtttagcaatcattgaattaaacaaatgtaactggattcccttattgctggattcctcagaacttttaatatcctaaaatacatgtgactctctatgagggagatactgtgttcagaattctgaaaattattttgatgtagaaatttttctttcaggaaacacttgaaactccatgggatatagtttggaaaatgcttgcttactttgttatcaggtgaaacctataaagtgagagatcagagagcttttcaatataatttagcagtcagcaagagttagtttgcctggatctgattcaaagatggtctcaggaaagcgctgaaggatgaaattaccaggacaggttgtaggttgtattcccagtcttttggcattggtagacttttgtgtaaagttgctttcagtttcagcaaaggcctctccattctgggcatgaatagagaaataactcatcaatgctctgctctgctccttgctggtctgacatgttgcctatacttcaccccaaaggtttcctgtgttcttcaaggttcatcctggtaagattgctgtctgctggaaaatccttgcacacacttgtaatttttttctcaaatgtagcttgctggttttattccttccttctaggaatcacatatcaatatactgcatagcaagaggttctttcaaatcaagagaaagatgtctctggaatttgtgcttagagtctatctccctgcccagtgggtccctagccattggatcctgcacagtggatattctccctttctgagtctaacataagattctttgagtgacaggcacagactgcagtgcagttccacctggccctccactttctgcagatgctctaatgggctacttgtagagaagcttcatctatggagagctcttatgtgcctttgccttaatgtggccaccatctgagaattctcctctctcctgctgacattggtcttgaggtgacctcacgggctcacgtctttccagagctatactcatctggaacggcaggggaagggaaaattagtgaataggaggtggccttccagacaccagctgcttcc

SEQ ID NO: 47673 - DNA, 2724 bp, Homo sapiens
tattttgctaccaattaggccacattcatccattaaagaaacatttattgagtgcttactatggtccaggtattgtttaatgtgctggaaatagagaagtgaacaaaagtggccaagtctgttgtcatggagcttacattcattcaaaaagtcattcactaactggctgtcatgtgcaagatatttcttaaaaaagacctgcactttcaaaaaaaaaaagacaattttgagtcaataatgatttcttaatttttctttaagaaatttcttatttttatttgttcagttaagaagattccataaagaaagctaagaaaatgttatgagtagaactatactttcataatatcatcacatttcatagcatttttgctactaaattaatgatatctgaaaaatttctgccaaaacattctactgagagttgaggaaatatgagataattaaattaaatttaaaaactaaatctgttgggtaatcatatcttactggttaaagaaataaacaggaaattgagatgttgaatctctagggtctacttcaaattggctataaaagtatctgaaagctcaagggtagagattgtgtttgttttgcctgagtgttctatttccggcatgtagcacaatccctggcatgaaataagtgctcagtaaatattgattgaatactgcgttgtgaatgaatgaccactgcaagtcaactaaaccaaattgtaccatacaagtccagtcagaaaaatgaaaatcaaaataaaatgcattttttttcttattacattttaggagactagagaaaataaagcaaaacacaggaaaatactttggattctttaaatgaaaattccatgggaattgaactgtgatgattattacaatttcaaattttatgatctgaatgagttattcactcatttgtattaaatataagcataaggatagaaaatctagtgtctgaccattcttgtcaagaagaatcacttattggcaaaccgtctgtatttgggataaaatggttaaggcagtgcctataatgtaaaagaaaattaaatataatggctaaatagaatggctaactctgattaaaaaaaaatccttaacatttgctgaacgcttcaattttttggtaagtagatgaggctctggatcagcataaaacaaaataaatttaaggcatatttgtgccagaaatttcagtctgcatttttcagacaggaataatcatattgtaatcctacttgagatcaaattaatctcaaaaagaaagttcccaggggacaaaaagcaccttttttttagctttatgtgcacagcatctggcattgtgggtaccatgtgcaggtccagttcactgtctctgttgccactgatactggtgaattaaagtccaggcaagaacggaagcaccacagcaccacaggaccacatggactttgaaacggcaaatattgctacagggcatgagctcactattttaaaattttagggtgaaagaggtccttagtaaatattgaagctgattagcaattggcataaacataaaatatattggaaactgacatctttggaccctaagctggtttgggtttaaaaaatggatgctggtgataatttgaatgcagaaaattatgtctagagcctaaggtgcaggtaaaggaaggagaaaatgggtagctaaagtaatcaacacaaaatgctaaagcaattatgtggcccaagtcaaaacaaacaaacaaacaaaaataaaactggccatgtaggccagttacccagaaggagtataaccccaagtaggagaaagcatacatatcagagtaaactgttaattactaactttaaaaagtgagtattatcaaagatattggggacacaggtatgtggagtaagtgccaggaaattagttcctggggggtgggtggttatttgaactatcctgggattctctggacgcaatttctatattgaggtatcatcattggaaaacgctgagaaatgatatcttaacttttccagaagacccagaataatcatagggactattaactaattcattaggaagatagggaattttttctttccccaaataaggatggcaaacagaattcaaatacttttcacaacctttcatcattgtgctgttataatgactgaagacacattgggtttttaattattagcaatctgactagcactgcataacaaagtttacttgctaattgagatgaaatgtgttttgtcatcaacaaattgaaacaatattgtgtaagcatgctacaatatttatgtctctctctttctatcctactatgaaaacatcattagtttagcaccatttggtcatcataatctctctttgtttcacagcaattccaaaggcatcaaatattccagtgtaatgcactcaatatgttgagctgcacttattaattttggaaattaaatggttatgcttattaatgtgagctttcaccactcttcaagctttcaaaactgaattgaaaaaaatggcattacgtgaatctacatttggaaaatgtgaatatcgtcagtgttcttttttgttgaggggagggattcttgaaaggcaaactaaattgtttctgttctatatgcataggttggagagacgcagcttatcaaaaagacgggaaataaaacagcagggtaaccattatagaacttcaatttagaatgtttgaatttttgtgcccagcgtatctctttt

SEQ ID NO: 47674 - DNA, 431 bp, Homo sapiens
gccatagaggaaagattttcagcttggctggccatacagtctctgtcatgactatttaatctgcctttgcagtgtgaaagcagccacagaaaatatgtaaatgcaggagtatggatgtgttccaataaaagtttatttacaaaaacaggcagctgacccatttagcctgctggtcatagtttgctgacacctcacttaaggaatgtggctttaggtgacctccagtagtaatcccactttgtttcagaaatctctaaaccctagtaggattatcaactttacagtgaaaaaaattcagtaaaaagtaaaacttggtgtattagtgtgttctcatgttactaataaagacatacccaagactgggtgatttatacaggaaagagtttaatgggcacacagttccacatggctggggagccctcacaatcatg

SEQ ID NO: 47675 - DNA, 671 bp, Homo sapiens
agtccagtggtgagcacatggtcttcctacaatagggtttttgtaaaggttgggtattgttaaagaaattctggcttcctcagaaaagaatgatacagactttggcttgtcacttctcctagaaattgaagctttctggaataagcccatccatcagtccatgcaaagcaaatggccttctcctgccatatgggcctcatgatagttattgcttctcctatctaggtgccaagaacaaactgagtgtaaaaactgagagtctaaaaaaattcagtggctggggaatttccatcaaatgttttgactgccatgcaaaaagggcatgatgatgcaataatccctttgtggggaggagggagtgcaaagagccctggtaatagaattttaatagcccagtgttcatttttgtaaagacgtttgatgattgcaagctaaggtgatctaatgcatctaccttacttttccttactttttgcatattcctcccaccagacctgggcaggcagttcctacgctggacacaattttctagtggcaaggttagcctgaatatgccaatgttgctgccaaagctgctgattctctcctgctatgactaagcccctttaaaatggcacattattcttctttaaatataagtgtatttatatttcaattgtagttaaaatttg

SEQ ID NO: 47676 - DNA, 619 bp, Homo sapiens
gcctcatctgtccctggctaactggggtgatgaaggctgctgtatgaacccaggaagggtggtgggggtgttccctttaacatagcccagcagtggtagtcttctgaacataggcacagaaacatttccatcagcttacacagttctttagactcacaagaaactgagtttattgttaagaatgccaatttattactctaattgtagctaaagctaggaatgaggatggatcagccacatgcagagggcatatgagtgatcatatacaagttcatggtaaggaaaacacccagagaatgtttgccataaaaatacttgcaccatatcgatatagcctggggtaatttccctttgtactttaaggatatttatatctcaagggcattttggttcaacatggggcaactctgatgagtcattgtagctgcagggcacccagtgcggtcagacaaggctgtcattgcacttgcatcacagctcaagattttcttctgctccacctggctctcatgtgaacaagagctggcccttgtgtattacatttgcatttcctgtatacctatcttggctgctctattcactacctttttatacctatccattctttttctcttttttt

SEQ ID NO: 47677 - DNA, 828 bp, Homo sapiens
gttgttgctttgaagagtttatcaagagattctacgtgattctttttttggaagttgtcaagattgtgtcaagaaccgtgaaaggtctgaaattttaccctgtgtgcaagctaaaagtgtagcctaccacagcttcgtggatgccagctgaagaaatgaaactcttggatcagagacaaaagactttgttattcacagcacaacaggccttttaggcttcatgttcccatcgattccccttccctctagtcccaagccgggcagcacagagcagcccagactgctgcacacacagcaggtctgtggccctgatgaaccagggctgaggaaacccatgcatttacaaaggctgttagcaaacatgctcacactttgccccagagagacattatctttgttatcctggacagcaggggaaaaaaaatctgccctttgctccagagagagacactctatcttccaaaaatctgtttgctctgtaaacatgcttgaaaagacagtccagaacaaaatattgtcagtgcatttcagcagaaacatgagagaactattgagccttgtctcccactatggacttgcttctgtagttctgagcatataaggttctaaatgttcatttttaacagcccaaagggtaaatatttagtttgcctgtcagtttccacaaagttctcttgtcaaacaataagtactgttttcttttctttttcctttctttctttctttatttaaagaatcaatcctggtacagaggcaccaatctctcacttctgtgttttgaccttaacaacctcaatattttttcagacatgtgccgtatttgggcca

SEQ ID NO: 47678 - DNA, 1025 bp, Homo sapiens
aaagtaattaattttaccttcaaattacaagttctagactatcctttcagtttatagttttgccttaatcatctgtgatttaaaaacaacttaggaatcagatttgacttctccattacactattagataccagttgctcatagagttgaaatctaaaatgtcatttatacttttgctttcttttccattcccaccttatagttgttaaaaaaaaaaaacctttagacaaattaaacataacagatattagttgagcaaacaacaatacatgaatcaggcagtgctctgaatcagaagaggttgagataactccctcccacaacatggccaagctgcatttataaacagaaaatgaaagtgaggtacagaaacagcttgactggttacaacttcgcctttgctttacttgaatatggtctgatcagctggcagcctgtgattgactgaagtctggctgctgtgattggctgagactcagctatttatacaaaagtagactcccggctttcagtttaagcactattataagttaggttgcagttcttcacatagggactcaaagtacagaggcatcctcaggccaaatttagtttagcttagcacacttgtcatcacttcgctagcaccacacttgataaccctggtgagatcacagctggccatagacagtgactgccacagggagcaaacaccacactttcccattctgcttcactcccacgtttagagccagacctttcctttgttccttgctgcacagctggaataaggcagtggcttttagtgaggcttcaatgagggatcagaataatggaaacagtgtcttttcatccactggacactgggaatagcacctaagctgctttcaggtccaccagacatctttgagatgtgaaaaacacagtagtgtctggctctatggctattgcaagacaatttcatggtatttcccaaagtttggactattttgataaacaacagaacaacaaccttatgaactgagtggggaaaaaaatcccataac

SEQ ID NO: 47679 - DNA, 2148 bp, Homo sapiens
acaataaaagctgttaaaaggtggtatgtttgatcacagtccatggataccaataaagagcctctatttatttaaataaaagtaattgctgctagtgtaaaatgaaaaagatactctatgtaatctttatttggacaaaatgaggactgggccattagtaagcataatgcatgaaaacctcacatgcgcttggagagaagcctttgttcagaaaaaaatggcaacattcagctacttgaagcagaaatttactgaagccagatgatagaaaatacaacgagaacccattttgctttacgaatctctgttttagatcagcattaacaactacagtcaacttttggctctctatttgtcactcagccatactctttgtttcattgcattgattatttatgtcttaaattatagctattcttttttttttttctgtggcttaaagaacagcttcaagggcaagcatgaaaggaaattcctgaattgagtgagtacttggctgtgcatgcagctccaaaagaaataaaactgtttgttgtcttgacacacaccttaggatcaattattctctcagttaacgtaggcctcatcaatttattttctgtacactggcacagtattgacacgatgttaatgagaaaagcaaatgggcgaatgtaagctcatcaaagtttctttctttttttttattttttaaaaatcaaaacagtgtcttttagcatgaaatagcccttattatttaaacctacctcctaaagttaaaagtagctttgacaagcattcaattaaatcttctgtagcacataagccaagtgtctagctagtccatgtttgaattcctccagcattactcagctttcaacaaacacaggtagctcacttaatgtttagtcatcataaatggaagagtttctatacctctctgaaacaaagacagctagcttggttttctccctgcttaaaacaaagctggaaacttactcagttttttagcctcttatatttgaggttagaatttaaggaggtaaatcatcaatctgccatgtccctgaagactaaaatgtaactgatgatattatttcatttattctcttacctaaatgtaatgactagaacaacctcatactgttgaggaagtgaatcatccagagataaaatgtgttgctatgctttagggtgactttgaatcagaactcaagagaagagaaagcaatttcatattagtcaagaacaagctgtggtgttaaacaaggatgcccaagcacataattccacacaacagtcttgaaaacactagcttctcaatcacttctttgttttgtacccaatttatctgtcatgctgtttcagctaacaccatgatcaagcctttcatctctagtttgttgccaaggtatctcacacattcagtaatgacttctgctcactggaggcttgcctcacgaaccctagccctacttgggtttctaaaagtctgtctgagatggagaagaagcattaagaagttaatacatctaacaaatatatctttctaatgagcaggctataccttacaacaccatgcaaaaatttaaaaagatatgtctatcttgctacatgacagaattcagcttttagatgaataggctggttctttcagaaaccaccagagtatcatgtccctgatcagaaacagctgaaaattctattttagtaattctgaatagtaagtagattttctgctgttcttctgtaatgatttaggatgcagacaactgtgtttaggtagcaagttttcagtcctgtaatacatttagttatgctttggtttcaggccccctaaatatactgacccctgtcaaacaaagccttagaaggtatactcatgattttctgtttttttttctaaaagagcaccccaaatattttatgagctttagtccccatgaaacctagatctgcctgtgcacttatttgatggactaggtattctggagaattttttgaagatccatgttcaccacccccaaaaagataacaatcctgttgaagaaataacatatatacataccaaagaatcatctgttagtatgtgaaaggtatagtgtttggagtcaaagacataatctccaaatcccagctctgccatctacattctgtatgtaattatag

SEQ ID NO: 47680 - DNA, 2257 bp, Homo sapiens
tctacatgtaaaatacatatctacgtgtagtgacagtgaaagatgtccctaacatattgttaggcaagaaaagcaaaaattcagaattactatacaatttttgtaaaaaaaaaaagtatatgcatatatcacatacataaatgtgtacaagcagtgtgcttaagatgtgtggaggaaacactgtaagttttcactatgtacatttctttattattattttacaaccagcatgtattgttttagtattttaagaaatcaggtcatgtctcaattgtcatatatctgggattaaaaaagaaaaaaaaatccaaaaagggaaatattcaacgtttttccattagttcattctcaatatctatgaaaaaaatctaagtagcacattgctgtctaggattagcgaaaacgctagtttcgttggttggatcgttttgggttttttttagtgaattagagcaggaaaatgaggacacaaaacccaaccaaggcggagttgggctgttgaagccatcagcggcgcgcggccgggcagccaagggacccgcgaagggggggactcggaggtcgaggggcactcggagggcgaagggagccccgggcgggagacgaagggcactggcccgtgacgcaggcgcggttggaaagaagctgaggactggatgtgcggaaaccaggtcagaggggcaggcaacagagtgggcgggaaggcggccgggagcgctatacgggtctagggaatcagtaggaagccggaggcgcggctggcggcgacagcgtggccggcagagcagggtcagcccaggtcgcccggggagtgcgcagggacgcgggcaaaaagcccgggacgcgcgccgccggggcctgcggggcctgcccgaggccgaggccccggttgggggtgcgggccggagctcccgctctgcgccgggggcaggcgtctgctggcaataccttcccaggagagctctcctcccggctcccgcttcaggaacttgtaccagaacgtgtccacgcggcccggctccgccccgtcctgcgccgcctcctcggccgccagctccacctccccgagccacaggcccggctcctgcagggccagggccccgtcgcccgccgcggtgccggccggcctcaggcggacggcaccgcgcggctcccaacgccccagctcgggccgcgaccccaccaccagcagctccggccgggcgccggccacggcgggtggcaccaccaccccaaagcggaagcgcatggcgggcggcggcggcgcgaatacccgggcccggagtccccgcggccggcaggcgcggcccgagcactaggcggccgcagcgattgggcggtggtgtgggagccccgggcaccggggagaacacgtgctgttctgcgccttctttgggatgcatcacgcggctcccgagcccagacttcgtccaggccggcgggaaggggtcagcggagccgctagctgcctctttgtgccccgcaaccccgcgggcggttgatttccacctgtgggcgctggggacacgcgaccggaagaaatggaagagaaaacggggttcggggagggaggaaaacttctaagccaggcgatcgtccagttctctctccaagagactggaaattaactttatgaggatcataaggaagggaatgacctctagacagccgccttctaattgtgaaacgggggaagatcttggacctggtctctggagcgctccctatcttaaccaagtcacttactctagcaggtctcaggttctttgtctgtaaaatgagggtgtaaaataatgatctttctagaccctacgagctctgaaggatctctgattggtggagatcacccaagacccggagctgatgcaaaacattacctaccattcccttgtctgaaaagccacatcaactttcttttttcaaaaactatatttttagtatgtgtaaagtaagtttggagtaaatactttcaagtccttttcaaggtcaaaacaaaaactaattctgtgactacaaatgtatgcttttttttttttttttgagacagagtctcgctctgtccaaatgtatgcatttttaatggagtaaattaaaaaaaaaaacctttgtttaaaatttactttcagcaaaagtcagcattattttttcaacttaaaacctttttgggttttaagttgaaacaggttttttagctgtctggcccaaatccaaaatacgtatatcttggtggggaacttcaatttgtctctgccataag

SEQ ID NO: 47681 - DNA, 630 bp, Homo sapiens
taagatcccacaagtcatagccctcatctatttaaatcattttgattctcaatgtagagggaagagagacacaattagattatctcagctactacagctttatgtgaaacagagacaagaaggcctcacaaagacacagaaccaaaatattgtttaaaatacaacaattgttgtattagatctgaaagtggttctggtgtctccacaactctaattattgtcttctgagaaactggccacctttgatctctcctctggtgttctgcctttgagtatgactcagctattttctcttttgccttctattactcttgctatgcataactttgtcttgaatgtctctcagtcagattcctgcagaataagcatgcaattggctcatccgacatatccagtgagattatccttgattggcagaatgctagttccacacttcctacaagaacactggctactctacagatactctctatattctgggaaaagatttcaggatcatataatataaagtaaggagaactctatgtatttcttcccaacatggatattctgatgttttcatgagaaagcatcagtcaaacccaaattgagagatataatgaataaatctatgctttttagaaatggcaa

SEQ ID NO: 47682 - DNA, 3142 bp, Homo sapiens
acttggtatacattaaagtttgcctatattcgaaacttcagttctcttacagcattcacgaaactccaccatttccagaattaaaaaaaaaaaaaaaagttacgtcacggcattaaagtgctaggtaaaaacaaattggcaatttaaaaagtcagcaaaacaccatgttatccccaattaaacttttgtgatgagaaacagtgactaagcatgaagaagagtgattcagcggaaaccgcatattgaaatctaaccctctgaaaaatcctaaaggtttattttatgctactcttttccttttgccatgtcaacaattggactgctttggaaaaccttagtatgagcaaatgcaaaacctgttaatataatttccataggtctctaaagaacaaacagtattgaaatttagcaaatggaaattaaaatttaaaaagtttgggattttgtattaaaagattttaaattaatctacaccgatatcagaatgcccataaataacttcatcttggatcagagtcaacgaagtaatcatggaataaaaggtcaattcgttcccaagcatcttttatctgggacttacaacagggctcaataagaaaaacaagagaaagggagagggaaatggagtactaggacattggtaaacacatactgttttgcctctttgcctctatactcccaaatatacccgttaaaaacatactggcagattactttgaattcagcacgcgctctataaaccccttccaagcaaaggagttccaaggcgcaggtcttggaacaacacaaataacctcaggtctgcaaaataaggaagttcccctttaataaggaccgaggctaaggctaagatcctctcacttccatgaatggcaaagttaccaactttgctcatcccgtgcagacagtggatgatgcctccccagtcttactttaagccatttgtccccaaataacccaagtttctaaaaaccagacggaacgagaagcttagggttccctaagtttaactcctccttcgtcccttcccaatacaaagacacacaaactgggggggacacggaggtcggtgccctcgaggcttaagtcgccatttgctgacctcaacggctggcccggcatgcggcccggcgaggacacgagcgcggcggacgccctctcagggcgcccggacggccgacccgggacgcgcatggaccggggtcagccgcctttcctctgctccaggccgggcccgtcaaccccacggccgccagcgccagcgcctcggtcccggccgcggcctcaaactgcccggccgctgccttcgtccccgccgcagcgcggacggcgccggcctcccctgcgggcctcccgtcactcaccggccggcgcggccgaaccgcggcccaggccctagctgccctggacgccgtgcccagctgctccgctctgtcccggcgacgctccgtaccccacacagccgtccgaaccgcctcctccgcccctcttccccagccgggccgccgccttttctcttctcccggcctgctccagaggcagccaccctcctcgcgcgccccgccccgctgcgccccgcccacccggcccggcttctgccgacagctgggcggggacgcgcacgcagtcccggcggggacgcgcacgccgccctctgaccccgcagcgtcgtggctagagtagggtctggagagagctcccactgtggcgagtcctgtcgttggattcccgcggcgccccgtaaggctccgccccggcggtgctaccaaaccctgttcgattttagaatcgtacattcccagagggaatcctagacccctcattttacagttgaggaaacaggcccaagtagcatgacttgttcgcgccgctagtcgaaggagcagcagccccgatcccttgactctggggcactgctttccctttagctcatttttggaggaaatgggtgcgcccttgctcgacctttggtgattgccgccacaggccttcccgccggctaactcagcgtgcccaagtcccgtgacttagtgccaggacggtgctgtgacccgttatcccctgtcgggttttacctccccccgggagagctcagccctggatcccggcgggcggcggagcctctctggagcccggacgggacagcccaccagggtctgcttctgtgaggggccgaggcgtcattccgcgaaggtaattagctggggaggggacttgaagccgcttttgcagtgtaccttacatatgactggggagtaaagaaatcccacagggctgtatcaaagaatggatggatgtccacgcccccgctaccaccaccaagccttggtctacggccgagggacagtgattccgagctctgggtgttgggagccgctcacccgcccccacccctctgtcggggactcctgcccaccccgtcgcaagagaattacaacaaaggaaagatggttgtaatcctggcagtggggatgggggcagagccaggaaaacactgttgtcatcctttttgtggctgcatctttaccccttgctgttgtgctttgggaaagagagctcacacataatttgctatcctacagagaaagcctgtgggtttttcagatccgtaaattaaacaaaacaaaacaaaaactgagttaggaacttagattacagagtaaaggttgattccttaaatgattaactttttgaaaaattatctgttccccttattttgcctgatttggctgtagacaggctctggtcctcggttcagaccttgagagccactgtccagagagctacatggtcaggatggggaaacaggcaggatggcccagtgggagaggatgtaggtgctgctacactatagccccgctcaatgctcactgtcctggattgagtcacagacctttgttttgctttagctgtcctcttataaaggatctaaaatagattatctctagagccctttccagctttaaaattctgtgaatctctaattatacttattgagatctggggctttaccttttactaagtcacctagctgacactaggtcaccctcactcgcctgaagttgagtcattcaggttggaaacctcattgtcttctttgtcccttcatctcaataattttccatgtccagacaattattta

SEQ ID NO: 47683 - DNA, 630 bp, Homo sapiens
ttatggagacagagcctgaacaaaaatatttattttaaaaagcaggccagttgatggtcacatacttaaaagtttgacaaaaaaagcaattgtgtagcatgtggtgggtgggaagggtactgtattgctgtcactatatctatgtagtggctgtatctattttctcccggacagaaatttcttattatctaagactcttgaccagtatatagggtcagggtttccactggcaaaatgctttgtataaaacctagccaaatgtaagacacagggaacaagacatgtgggccatatgttctgccaggaggcctacttcaccatccaaaatgcctggcagttgtcagaacttgcaaggggaattttgtttactttgtgagatgcccagtaggttccaaaggtcatttaggaataccatcacactgttgctagggaagaaatggtcttcaacttaagtgcatccaccgaacaggacatttgtgatcccagtattcattttatatctatggtcaatcaacagcattccttacattgtaaaatctcttatttccaagaaatactacttaaaaatgtctactactaataaataatagttttatgctttccaaatatcttttatccacaaaaaagcta

SEQ ID NO: 47684 - DNA, 516 bp, Homo sapiens
agagtttcagaccctcagatgtaacaatctctcgccataagaagtgcagggcactttctaaagaaaaatataatcataataacaaatttttgttttcccttcagtcagataatcacattaaaaaaagaataggttaacagtgaggatactctggcatagtgatacccatattcttgtgaaatctcattctggaaaagccacatacttaacacatgagtaaaaagctaaaagtccctctatttcctttcttctgatattactctttagctccctttgttttgggcacaaatccacatcagcaaataataggacagataagcaaagtgtggcagattacagagaattaacaggaaaactaatacatataaccagctcctacctgatgaatgagtctatttttaataaatcttgcaataaattatatgaagtctttgaataactcaatagacatatgctaggtggctaaatacatttacccgaatcagacctgacctcttctacgggtctgagagtggg

SEQ ID NO: 47685 - DNA, 1537 bp, Homo sapiens
actttatcttattttgttcagaaaaagccccaagttccttaagttccttaagtacaagttggaaggcatcaaacatctcggatttctacctcgtgctaatgtcaaactacttggaaaaagggcacaagcttcctggtcattatttaactgatcattatacagtgactattaatcatcaaataacaccctatcttcgttcataaacatagcaactaccagtcaaactgtacaatgtcaaagagtggttctgaattcgaatgtaattaatctggctccaaaggtaacggagaactttgagtgggactgagaaacctctgcctccccttttactaatacaatgccgcgcacaaagaagggaggcggcgacccagttccagcctccgggggtagatctgcggcgcacggtacccactcagttatcttccgaaagacccacaagcggctcccggagtctgagcggggctgtcagcgccggatcgctcccagcaggccgagcaaacaagcgaccgcgaggccaaggagcgtgacgacggactcccggatcctagtgtgttggacgctcgagacaaacaccgcaggccccagtgcatgaggagaagcacagcctcctttcccacgaccccactttatccccggagggacgtggtggtccgaagttcgctagtccgggatcgggaagaggtggggaagactcgcgcagcggctccctctcagcccttgagcttcccgggctccaggacaaccagcgtcctccctccctggtcccggaggccaaagaccacctccctccctccctcccgacctctgacccctgaccttccatcacccaagcgcctacccaagctggttctccgagcctcttgagtctgtttgcaccaggcctgcgctcctctacagacccagcagatcacgggcacgcattcgccacccaccgaacatgggcttgaggtgggcacgagcgctttttgccggaacgtgtaggggtcccccgggagacccagaaaccacagcgcctagctgccgggcgcgcgctgtagcgtggggtcaaggcgaacgcgctcgtcagagcaccccgccccctttctcctgcgctggcttcatgagtctcttctgcgcaagttcacactgttaaaaacttgctgaggatacagtggagtctcgcgatagctctgccccacgccattagagaacacaggatggccgaatgcccgaagtagggggcggggctccccttgaagcgaagggcgtgtgtgatttgtatctctaataaaaaggcaggggccaggagcggtggctcacgcctgtaatcccaccactttgggaggccgaggcgggcggatttcctgaggtcaggagttggagaacagcctggccaagatagcgaaaccccgtctctactaaaaatacaaaaattagccgggcgttgtggtgcgcgcctgtagtacccgcctgtagtcccagctgctcgggaggctgaagcaggagaatgcttgaacctgcgaggcagagattgagtaagccgacatctccccactgg

SEQ ID NO: 47686 - DNA, 4591 bp, Homo sapiens
aataaaacacccagttaactaacgggcaaaggatgtgaatggactttttttttttttccagaggaagtacaaattgccaacaggtataagaaaaggcgctcaaaatcactaatgaacagggaaaagccactaggtatctcctcacacctgctaggatgactgttataaaaaagataagcgataataagtgtcggtgatgtgcggagcaaagggaaccttgtacactggtggtgggaatgcggactggaacagccattatggaaaaccctacggaggttcactcaaaaagttaaaaacagaactaccagcccagtgttatccgtccttcgttaagttcaaagtcacggtgccacttcctttcccatctaaaggggactgctcgcgacccaagccaaggcccgcaagtgtggctctccctgcggggagagtagggcaggaggtggatttccaggccagaggcttccaggctgggcccggaccccacgccgaccccggccccggggggggctcagcgacctcggcgcctcctcaggcccccagtgaacctccggggcccataaaggctccaggccggctccccggaggcccaccagcgggcgtctgggcctccctccgcgccgcgaccgccaggaggcgccgcccgggagaggaagtccagctgggcccggccgggcttcggaggcgccgcccgggagaggaagtccagttgggcccggccgggcttcagaggcgcagggcgggagccgcctcgcgcagggtcctccccaagccggcgccaggccctgccctcgtccggccctgccctcgtctggccccgcccgggccgcgagcactggcgggttctgggtcctgtgaccggtcaggcggcgtcagcgggcgcggcggagggctggccggcctcgggggagtttccgcggccgccgggggcgcggcggcagagcgcgaggccgggcagggggccagactcggagtcgaggcgcgcccgacagccgcagcgctcatggcgggcggaggagccggggaccccggcctgggggcggccgccgccccagcgcccgagacccgcgagcacctcttcaaggtgctggtgatcggcgagcttggcgtgggcaagaccagcatcatcaagcgctacgtccaccagctcttctcccagcactaccgggccaccatcggggtggacttcgccctcaaggtcctcaactgggacagcaggactctggtgcgcctgcagctgtgggacatcgcgggtaagcgcggccgcgagtttcccactccagagccccgccgggccgcctggctcctctctgcttcttttctttttcttttctgcctgaactcgtctgcctgggtacctttaggagaagagagaggcccaatccaagggcgagatgcgatggacgcggtcggctggactcggtggggcccagaggatgggatgggcagtaggagttggagcaggtcctgcacgccagagctcgctctcctgaagggaggcgaggaggccagggggccttttccagaagtttgaactctgaataatgcaagtatatcatacatacaccaggactagttgagaaggctgctttggagcgggccggcgcctctcagcctcaactcaagttcagagggattgggtgacttaacccgaagctgcactcctagttagtgacaccaccaagaccaaaagccaggttcctttccagatcattttccaccacccgccttggctctgagactggcctttgtgagggaaactccattcctcaaatactttgctctcatcggaagccgaggacagacactccgtgaagatttgggaaagcttttctgaaaccttacactcaccccttcctctcttgctaaaccaacacctagtcccatccctggtgccctcgcccccccccgccccccccccactcctcaatacagtgtttctctgccatttgctttcatttgttctgtttgagggggtacatttccctctgctctgatttatgaacacttgaactttgcctggtgtggtggttgggagtgggcgttttaaagatgatgttaactattggaaagttcatagaaatggtaccaagccaagtgccagtggctcacgcctgtaatcccagcactttggaaggcctagactggaggatcgcatgagcacaggagttcgagaccagcctgggctgttagtgagaccctgtctctacaaaatacatacatacatatatacatacatacatacaaaaaattagacaagtgtggtcgtgcgtgcctgtagtcccagctactcaggagcctgaggcaggaggatcacttgaccctaggagaggtcaaggcttcagtgagctgtgttctcactgctgtactccagcctggtcaacagagtgagaccctatctcagaaaaaaaaaaaaaaagtacgaaaattactctgttcaatcattacaggtgttaagaagcacagtctgcagtacagcattagaatgggagctggtttagggttagaggacacctgaggccacccttcattctacagtccctacactgaagcccatggagggtatagctacctggctggtagcagagtggttggggggatcacaggtctactgtctgtctgccaggtagtgctcttgtcatttatagcttgttacataagaaagagtagtaaataattgtaacctataactcattcatttaagagcacatttctgtccctcagacaggagaataactgtatgcaactcagttgctcagaaaaaaggagtaatcagccagggactcagctttttgttgttgttttttgttaccaaaaaccaaaagttcgtttgaaaagtcatctttgaagccagaagttttttcgaaacacttcctgccgttgcacagaaccctaatgagcagtatttctgcttcttgacaaagtcatggattctaaaggttgccttaccatgtgacggtcattctccaggaatctgcagcatagctgaggtttttcacaaagatggttttaaaaccttgcttacaagggtgattgaccttgccttactctttatgtaaattatggcattttgttattaaactacgattgggtcccactgctggtaaatcagtatgagtaactagatttttaagtgtttatagttagaaacttgagaaagtaaaagcaggagtaagatacaaattttctttctggtatcacctcttctttttttattaatcacagacctcgaatgacaggaaggggtcatatctagttttttatcagactctgataaacatctgcctagatgggatatccttgtacttttcactaaatccaaagcttgagttttgccaggaaggaaaacaaaagtttaagatctccaaaagggatttctggatgttagatattgtttcaacaggtattgttgtcccatacagcaagtacagaccagcaatttacaaaattagaggtaaatttatagaaattattaggctcacattataagtaagattttcagagatagaattttaatatctctgaatatgagggagaaaaatagcttagtgagagaccaaaaacaaaaaaaaaacaaaaaaaactgttttagagaccaaaaaaagcaaaacaaaacaaaaaatccttagcctaaagtttggagagctacattactaactgtttgatttgaatatttgagctactagtgaatctcagctcataccatttgaattaagtaatgatgatgtaatgaaggcaaactgatggctgctccacaaacttcccccagggctaagcatacttgccttatgtagtaacaaagttggatcatatttaattctcaaataatagaaatattctttgattgcacaatagtagatagagccagctacttgccataactaagttaaggtgtggtgtttttactagttaggttttttttttttttttttttttggttgcttcagtgagagggcgaggtagtgaagaaattatgacgaatctctatgcttgaaagctgtggcaagtatgataggctagaattatcaaatgttttctacacatgtagctaagcagattcagctgaactcttcaggttaagaaccactgtgatcctcagatacacaaatctgttcttacggcattgaaggaatctggctttaaaatacagatgcagtttagtgcagtttttgtgttagacaattgccatctcttaactcacacgtactttaggactgctgctcaaaacataactgaaatatactaaaatcttgaagtctttgataacactttacagagatcttaataaatgcatactcaagatatagcaagagatgtctctgatcttccttttaatgctcagtgtaggtaaagtagtatttggtttactattatatgcttattgcttattagtcactatagcatttttcaggcaaattgaaagactggtctaggttaaatcttaaaaaaacaagtttgtccatttaggtctagtatactttagccttcatgtattgactgagtgatttgctttttaggatcaacattttttaataaaaatctgaatgagtaactctcctttgggccaaaggacaaattgggaacagtctgctct

SEQ ID NO: 47687 - DNA, 826 bp, Homo sapiens
ttctctgctttgtcaggctgaggcctggcctctctgtcctgcaggtgcacgggtgtaagaaaaggactggagcccgtgtgaataaactgctgagaatcagcccttcctcccatggaaatcatatattggctggggctccagggtatgctttgtgctccagcggtaagatttatttcttttccttctctgtagaaaattcccctctcatggtggcacagggagaaaataatgtcctaaaagtggagacagactggggcaagcagatggctgcgaaggcgccatttctctgtgtgtccagcagggggcgccgatgacaagcgcgcgggctgcgaggccgcacagactcttacgcaacgatgagggcgcaggctcgcgggccaaggatgctgacgcaggcctgagtccggaaaagacccgcacatctggggcccaagtggcccatttccccagaggcgagcaaggactctcaggaatcgtcatccttcccatgaaatcctggaaactgcttagttgagtttctggttgacttgcgctgcgtgcagctggcagctgccggtgaacccagtgacactggttcagtgctcatgtttgttttccaaaaggggctgccctgatttttgtttttttaagactaaataataatagtcatcataggcacccttttctgaacagcccctctatgccttcccggtgctaggggtttgatgctgattgtgtatgttcccctgctgtgtgtgtttcatcctctcatcctgcagcaaggagccccaccagtgcctcccatcagacctccctgctgtgttcaatgcaacttgcttttaaaagg

SEQ ID NO: 47688 - DNA, 719 bp, Homo sapiens
gctaaacgtttatgtggaatcttagaggacttgtaacactatttaatgaaacactcaaaacattcaaagtctaaagggggatggtgatttggaaataacttctcttacctattcctacctgccctctggcttcattcatggtcatagggcctcagtttttggacagagagcaccaccatttttggccatgcattctctttttccacagcccgtttatatccatctggtcaccacctgccaatgaaaagtaaataacaatgactgctccctccactggcttctgtccctggggtgaatggccaggagtttgagccactgctggacaagagccgttgattgcttgaaggctggcaaggacagcagagccctcatagtgaactggcctctgcaggagagaaaaagggataagcagacatgctgcactgagattagcttcctgccaatttctcctgaattttcctaaaataaaagtgcattttcttcccagcctgattacatttcaaaagccctcttctactagcacagccttggtagatgctggactctagagaggattaaaggtggtgggaatggtaaggatggtgaatccgggattaaaattgccctgccacacattgggtcagagcaaatatttgtgaagcttgagttatttgcagtgcatcattatggtttctgtatgggaaatgccaagttatacttcgatgtgcagggagataaaa

SEQ ID NO: 47689 - DNA, 598 bp, Homo sapiens
ttttagaattatacatctgatgaattatgaacactcagattcttggattcttccaagtcctttaaagcaaaccctattactccttgcaagtaaatattagacaacctcaacccctatcaattctgcaatttacatgcagttcaagtagctgaagcatactgggcttgctgccacttactctaacctgttacagtgatctttggacataaaagttttgtctgtttcattctaaaatcaacaacatgaggtattgcagagccacagggtaagaacctggatatgagaatggaacagcactggaagtcagccaagcacgatttgtatactaattccagctctgaaatggactaaacaccccggtttcatcactcacaactcctgtgcctcattctgatcacctgcaaagtggacataacaatgcgctcactacctccctcagaggatggttgtgaactacttaatcccagaccagccaccaggtgccacagccagaaggtcacccccgttccagaaaactctttattcctggtagggagttctgacatcacagaagactttgaaatccttttttttttttaccacagcttactttgtggct

SEQ ID NO: 47690 - DNA, 862 bp, Homo sapiens
agcccagtttagccaaaaaaacaaaaaacaaaaaacaaaaaacaaaaaaaacagagatttctcctttgccttttccaacaggccacataaaagcactttaccaaaattcacagaactcgttctccttttgctaaaacgccatgaggtcactgtctgtgactagtacctacttcaatgtctctagtgaatatctctcaaattcattcaagaagcaagcactcagaaatatgcactaacctccttttcttaaatggaggcaccactcaatttaagactcatgacttacaaggaagatatcaatcacctgctaccgacaccagacaggaagtcagagcaagtttcctggatagagctgtcctgtttcacaaccatagtgatgaggaactttgccactaaaaagcactggaaagcccctttgtttcctggactttacccagccttatcatctcaccaggctgtattagtttcctgcgtgtgtctaaacaaattatcacaacttggacgactttaacaaaacagaaagttattctctcacaattttagaggccaaaagtctgaaatcaaggtgttggcagggccacgcctcctctgaaagctctagcggggaatcctgccttgcctcttccggcttcaagtggctcccggtgtcccttagcttgaggcagcatcatcactccaacctctgccaccatcttcacctggccttctatgctgtgtgcctctgtgtcccaaccttcctcactttcctcttataaagacaccagtctgatcattttaaccctgacatcctcaaatcattacatctgcaaaaatccctatttcccaataagttctcattctgaggttccaagtggacgtcagt

SEQ ID NO: 47691 - DNA, 2615 bp, Homo sapiens
agctgcagagtggactacatttcccgaaatccctgggcccagtcgtagttggttcgctgactgcttttgaatgctggttaactcaaccaatagggtgacgagaatttccctaaaggagagggagccgacctcacaaagaagagggcgggtgcttctgacaggtttggaacttaaaaaaaccctttgtggcggttccgtggcttttccgcagaccagagcgcgcgaggagtcattcgctaggaacctgtccccctctccccgaattaggattagtcttcctgcacttccttccttccttacgtctttcctatttccacatccttcctaatcaagtacctgtgcttccgtccacctgtcctgttgaacgcactctccggggggtttccccggcacaatctcttgtctgtcttttccaacttgagccaggcatttgtctccaagcattcacgcgagatgggcagtgcggcctcggaaagatctgagcaaaaacttcatcctatccccctttccccgttctagagtgaagctcccagggcattactgagtggctcatcagcgtcagggcagattgaaggttctgaaaaatagtggcagcgcggcgtttcctgccacccgcgctcctccccggcgaggggctgggtgcggggtagtgtcatcggcccgggctgacaccggccctggaaccgttccccgctggcagcctcttccatcccagcagctaactgctaagaccagacacgttccaccaacagtaacagctgtaggaaagaacccgttttttcccgtctaggtttctctccttttcctagtacctaagtccatcatcctcctgccactgacatatcgttgtctagacgctctttttcaaaactcaaatccaatcaaacaaaaacaacgcccgtcaataaagcaagaaaaataatactgcagccagcggccaggagcgtgcaccccattaacggcgagaaagcatcaacccctgctgtaatgactgaattggaaagaaaggtttcctgctgcttgttagtcgtcaacatttttactatgccagctgcaagagaagcagctgcatactctggcaactcgactggggtgggagaaatttagccagcgtctgggattttcgcagaagataatttaagccccagcttcgctcgggctggggggctgggggcctgctgggccagggtgggggaaccgggctgcggcgcgcatgcgcaggtaccgcagcccggctcctgggaggccctgctgccgccaccgccgcggcccgcgctgtaaccgcggctgccgctgctgctccgggcgggcgttggtgccgtgtgccgaggcgccctgtcaggcgatggggagcggctgggcggggagagccgacggccgcggcggcgcctgaggaacgcagccgggctcgggagcggcgagggcgggccggtccagcggcggaggagcgaggcggggcgaggcaggcggcgcggggacccacaccaggcgccttgtgtgcgaggccgagcggcggccgcggacagagagccggcgacccccggcaggaggagaaggagccggaggacgcgccgagggactgcggggccggggcgggcgagcagcggcgcggccgcgggccatggacgcagcggcgacggtggcggcgccgggggcgagccggggcggcggcgcggcgcagagtccgcccgcggccaggtgaggctgggctgagcgggctcgggcgccgccgccactgctgctgctgctgctgccgggccgcggagcgaggcggcggcggcggcggctgaatcggcaccacagcagccgcgccaagcagcggcggcctcggaggaagaggggtcgccgcccaggtttcttgcggccgccgctcttgtcgtcgcagtatttcctgttcggattatcttttgcttccccccagctgcctccttaccctcacactcccactcctccgtttccgcggtcgaagctgccttcggccccgggtggtctcccccgcccggggaccccctgtgcctcccctcccgggctgcgggggagcccctccgagaccatgaggaaattcaacatcaggaaggtgctggacggcctgaccgccggctcgtcctcggcgtcgcagcagcaacagcagcagcatccgcctgggaaccgggagccggagatccaggaaacgctccagtccgagcactttcagctctgcaaggtgaacggagcgcgcagccccgcgacaccgtcattgaaaaattggggttgttttaagggggctactcgggctttacatgggaatgcaagggaagagaacgccaataataataataataactctaataaaaggctcgctcctcccttggcaaacgtttcttcggtgggttgttttggagattgataccttactccttttcattgatttttctctctcccctttgcacatgcagcaatcagttcaaggttgcttcaaactattatccgacctttaatcgtattctgacactgccagtaataacctggaagcttttatattcaagcgttttaatatgattcaccaacttcgaagtttcctttggaaacggtgtctaatgaatgttgtttatcaaaaagccaaacctgttctacca

SEQ ID NO: 47692 - DNA, 5209 bp, Homo sapiens
ggggactgtgattcgaaggtgagtagctggacggctgaaggctgatgttaaatttatccccccagaattcgaaccccttgctccatccgtaacagtgagatcgttggcaaattagttttgatgtctcaatctcttcttctgtaagatatgggataatattactatttaccatatgtgtacagatctgtgaatagatgcctggcatacagtaatttcccaataaatatttgctgataatttctgtttcttagcagcatcattcaaactgctgaaatattttctttaaaaaaaaatcaaaggtccttctgagatagtattgggatataaagataaacgtgacaaaaacatttgtgcttcaaaggggaaccagtataaagccataaagcccactttcttctgctgaatagaatgagtttggggacagggacaacgccttaaaatgggtcaacgcgcggacgcgagggggcactgtgagtccgctttggcgagggagaggcggcggcccgcgcggggcggggagggctgcgcccttccagcatcccagcgcccaggagcttcgccacctaccagggtccgagaccttaactcggttccggaaagggcgtcccgggtgacccaagtttggggccacaagcagctccaccggctctccgcgttggtctctcccctccccctaagcagacagtcctttctgccagctgtccttaatttgagattcgtgagtcccggggtttgggaaaccagaacccccctgcgactgtagggaacgttttgggtgcgcctatgtcgggtattttcctgggcaaaaggacagaagctgtcatctgattctttaaggggttcgtgtcccaagagggggttaagctctcttggtttaggataagagggcccacctaaccacccacccaaatgccaaacacacagcaggtcgagaaacgactctgaaatcactccttgtccacttcccaaggtcgggcgagagactggcacgccccacgggcaatcttcagaaaaaaaggtcagatctggtccttaaacagctcaggtgcgaagctgaatcgcccttctgcggaaagagaggagacagtacctgcccccgccgtccctcacttcccttagtcccaagaagaggtcagacaccgggaaatggggcccaggcgcttggtctgttccacctgccactcgagtccccagtcccaagaggctgctcagacattggcatgatggggaaactcgattgattttgttacctcctagagggaaaatgccgtgggcggagatgtctgagcgtcccttccaacacgagctgggtggtgctctattgattttcacgcgatccccgggcgggagcgagaggataggctcggattcccgggctccaggaccgaacgcctggcagtgtccccgggggcaaagccaccccgggagcccgtgcagtatactaggtggggggcccggagagaaagcatagcgccgacgagggggaggggccgggcagaaaggagggtggggtaccgggtgggacacactgacctaggagaaagtacaacccaccccaaactttcgcagacccgggagcttaggaagggagagccaggaagacagcagcctctcctgccgcccaacgtgcccagctgcagcgaggaggggcggcgcgcaagccggctggacccgggcggtccccacgttgcgcccaccctccgggccaaaacgccgccgctcgggtcactgagtggccgcccacggaagaagtcagatcgccgggctctgggctgcgtacgggatccgaggaagggggattcaaacgcggatccggaaggaagggacactgaaccccgcagcgtccccagcgccgtggggcggcgggacgtgtccttgggctgccagcgggcgcggaagctggagtccggcagggtcgggaagaagtgagcacagacttccacgggtagaagagtcagattaaacagaaatgtgaaaagcaacccagggcagccaacggagcccagcagcgtagaagccaccggcttcccgccgggaggactacagtgactgacactcgcgaagactaggcgctcccagcggccgcgggtctgcgtggagaagtcgcctcgcggcgcggagcgcgccagcggcggcggcggctgccagagcgcgagatgcggcgcgcagccgccggaccgtcccggctgggaaaactcgcgggcggcactgcgcagcgctgacccggcgcaggtccgaggggtgtgccccggcccctcccgtctccgccccctcccgcgccagtcgcgcgcccctccccgcggcggcagcgtcggcggcgcatccaggggcggcgcggagccttgctcagcccagcagccagtgcctgcgagctccgctgctgcttggggaattcactttgctgcttgttcgcttctcccttcctcaggcttcttctgatggttttccgtctcctgcccgagcctttcctttaaaaggaaaactttactgcgatacccttttccccttggaggagaggattaaaagttccaagaactggtgccgcccgtgccatttgggcgctgggaaggtgctcggcggcggggttcccggtcccaccatgtgcaccaacatagtttacgagtggctcaaagcgctgcagcttccgcagtacgcggagtccttcgtggataacggctacgatgacctggaggtgtgcaagcagatcggggacccggacctggatgccatcggggtgctggcgcccgcgcaccgccgccgtatcctggaggccgtgcgccggctgcgggagcaggacgccaacgccgccggcctctacttcacgcttgagccgcagccggcgccccccgggccgcccgccgacgccgtccccaccggccgccggggggagccgtgcggcggcccggcccagggcacccgcggggactctcgcggccacacgaccgccccccgcagcagggagctggtgagctaccccaaactgaagctgaagatcatgatcagggataagctcgtccgtgacggcatccacctgagcaagcccccgtactcccgcaaggtaaggaggtgccgtccgggcggcccggggcgcgcggcgggaggggacacagcccagctgcctgtgccaaggctttgcaacccattccaggtgacgacggagaggccaggaggctttgggtatctgggacccttttctatgttctttctgtattagcccattatttcgtccttcctggtgtctccagtggttggtaagacaagcccccgcatccagatgttatctctaaactaacgaccaaaactccgcatcctctctggtgctcgcctgtcaggaatcggactcgcgctgcttcacctggtagccagggggaattcctaacgccctctatagtagttttgggtttgaagagtaccagaaaaaatggttaatacctacattgctttctaccttcctttttctctttcttttccttttttgagtcttgagaaactcctaagggaaatcggtgaactctttaaagagtggaaagtcaggccctgcctttctcaattccataaaaaatcccagcgctgctgcaaatttgagaagcttaccattcacatgagcattttaagaggaaaagtgaaggaagcacgtgtcagtccacttgagatgatttcctaaacttgtgtatactggaggcaataaggtgctaaggacatcagagataatcgggccacaggatgtgcttcagaggtctgggctgtcacgagtttggtttattattaagccagataagatgaagtaggtacaactgtgacttccaggaagtgtgagtggacctgcatttgggagaggaggaccgagcacaagtgaactaaaggggaatcctctgcaccgggggcctcagggaaggaacctggaagttccgaaatgtggagtgggagctgggtaattaacagaaaatggtacttcacaccagagctctgcttctagctgcgagtctgttccgtttaggtttctagttcaggcggctgtcggagtagagggtcctgacttgatagagaagtagacagcacaggtaacgctcaggattgcagaaggtgcacaggaatatgagcacctcagcttaaaaatcaagacttagaagagcccagggagaaaatgatggcaaacatactcagctggtgggccacagaaacccaactccctaataggaaatgtggataatctcagtgttgtgtgggtatcttgggccctggtagtattgctgtagaatcttaagtaaaggctgtaatgcctggagttaaggaagttaaagggaaagctttgttaagagtagataacaatacctaaggtagatgggaataaggggtttaatattatctactaccttgcacgtaccataggcaattcagatcacctgcttgaccatgttaattggttttttaaggaggatacaaagaaggcaggttgggaggacagagtgcttcaaattaaacacgtgttccagttacccactctgtgccactgatgtgtgctcaaagcaggaaaggagagaacacttttcccaggcagttgcctgtatgtaggagttccatgtatgtctggtgtggatagagagatctggtcatcagtataaaggcttggtcctggacacagcaggtcaaaggagatcaaagccagttagatgtttgttattagcatcccgggaagtaaggtgggcttagtctgagagaatgtgagtacctgggcacttgataagggcacagttcaagtcctggcaagaaaggaatgcagagagcaaagtgtgtcactagagcttacttattcttcaggaaaagtgctgtgtaatggggcggggagagcagggacaccgtgggctggaggtgagaagcgtaagcttgaagtgacacattttagttctgattcttaaaaagcaaaaggcagacctacatatcaaacatagaggctggaaaggatgttaaggggatgaaacgtcatcagaaatgtcagcacataggctttgaactctggtctcctgcctagatcagtgggtgctatggtagtgcatttgcataagtgcagtttacataagaaaatgccaagttgcactgcaatactatttactttccatgtaaataattacttcagtcaactttgctttaaaataaatcccatagcaataatgcttgataacaaagatatgctcctattcactttctatac

SEQ ID NO: 47693 - DNA, 1769 bp, Homo sapiens
ttcagcaccttttcttatggtgtttctttttttattttcttaaagtatgtttttaccatatatggggacgattttttccccctggtatttaggctttgcgtaaactccaaacagaactatcaaacaaacatattagaggtttcgctgcagaaaggacaatatttattttttgtgtttgagatttctgtgcagtaataattaaccttagattttgaactatcattggaggtgttgtggacaggaaacacattgatactggaggagaaattatttttggcaatacggtaacttaccaccttgtgcacacaagcactgcccatgtgcagggacgttttacttgtcaagatttacctcggaagagcatggtgtgtgcgcagcacaaaggcggcaggtgcggatggcttttttctcagtgatagggcatgtcaattctcatttcctatatgctgaggagcacaaagggaagcagccggcattgccctctggggccaaccagctccttccttcccctcgcatcttggagatatgccatcctgcccaagtacctgcctcctgagccacaactggcttgtggttttgctttttgtctttgtggtccttgttgaggtttgtgcacttaataagcagaaccaccagtgagaggcaaaccttgcagacaggggaattcctgcaaaagctaagaatcaccgactgaaaagaagagagcaaaggtgcaaatggcttggggtggagttgaggaattgcgggaccaggccgtggttcccaaacacagagagaaaaagcacattcagggttctgagccccaggcattttgcgtaatcagccttctttgctgtttctactgtttgatgtcttaatctgttattctgggacctataaaattgtggaacacaaatccaagttaatccaagttaacctctgaacttgacctactttcatttagaattagccttatttaaagttgtaaactacaatcatgactgaagcacactaaatagtgttctgtttataaaacataaacctttttctctttactgtaaatcctttctggctgaagaggtctatataagaaaaccaggatatatttttcagttatcccaggacatttaaacttttgaggatttaaaaatgatagtcttaaaagttttttttttttttttgtcaattttagagatgatagaggttctttaggttctaaaaaattacttgattaattttggttctgatgttttagaaaaatattttaatcctgtttatgtgaataaagtccagtccacatgtgaaattacactgaagccataataatcagttatgattatgtaaattgtagaactgattttggctaagcatttcaaaatcctgcccaaaattgcagtatttaattgtaatcttagattattaccaggataatggctgttttaaatcttcttatttccatataatgtgaaggcaggcccatgccttactcatctcatctgccccaggcccggcataatgcctggtacctggcgggcacccagtgagtgttgctctgaatggaatgctcactgggacacattcctccattttcattttgcccatcagtgcaaacaaacctatcaaccaacattcatgtcagaacttattactcattattgcaactgtaggatggcttcccatataagagcttggccaaaatcaacaaaaaacattctgtgaggatcaattggatatatgaagttgataatgagggatattatagagtttatttattttgtaaattgtgtgct

SEQ ID NO: 47694 - DNA, 609 bp, Homo sapiens
ttttggttggtggaagctactctttaatcaatggaaatgattctttatgttggaggtggccacaaagagagattccatccccaagactggaagtcacacgtcccttttttgtagggaaaagacagtctgttttgaaggaacaccaccttggaggaaagcttattcctgtagtatttggactttcatcctcatatcgagatatgagaaaattgttttgttcatttatacaatccctgctggaaagtgttgccagaaataaacaagctctcaggagcaaatgattcatttctcatctactcagatgacatctggtttaagtgtgatgaatacatgcttgtttaaatcatgtggtgacggtgatgctatctgacagaaatgtgtgcaaatatttggggaatcccttaagtgcctgctaccaaagggtgagcttatttaacagggggaaaagcacaaacttcagtctatcaaatcaatgcttgcatccatttcctaaggctataagatttggagctacagcggtcgctctatttgaagagtaggtggctattttgacattaaatgtagatgccactagcagcatgaggatgtgaaacaaatgctcaatggtca

SEQ ID NO: 47695 - DNA, 455 bp, Homo sapiens
agctctggggactttactgtaatgtgggttatctgaacactgcagtaccatgacagtggatctgatcaccaggtaagcaacaggcaggtgatccgtgtaaacagtgtggatctgctaaacaaatggatgattcatgtcctgggcaggacacagtgggatggcccaagatttcatcacattactcaaaattttgtgcaatttaaaacttatgcattgcttatttctggaattttccatttgatatttttggaccttggtttactggtgagtaactgaaacctcagaaatcaaaactgcaaataagcagggactgctatatttaacaatagttgtcgaataaatgttttgaatgtccctatttaaaagttcttgtcatttttccctgagaggagcctgagccagtgaccttattaacatctttatgtggaattctggaaaccatgtgggtagggcag

SEQ ID NO: 47696 - DNA, 650 bp, Homo sapiens
ccagggattcctttaagtatcaagatgtccttgagttttccaaaaatatgactcaatttagaatcatggaggtattgtagcttttcaaaagtatatctttgtaaaagtacatgtgcctgtactcagtgaaatgaatgttaagccagatagaacatgagatttcaccaataggaaagaagaaaactccctgccagacctaaatagttgtttcacctatttggaagagttgcagagtatgcaaaagtgactcagcaagtcacagacaccagcacagaggtggactcggttatgaggcaggactcgtacaacaggttctgaaggcccagaggttaatgaagtggttaagctaagggtagccctccccaggctcctgaggaaggaaagtcaacaaggacttttagatatctccccagcaaaatcatatatttcctcttgaaaagttactgttttttgaccaggtttgcattcttctgggtctcttggtttgtaaataattgttttcgtgcatttaagcagttaatctggcaaagctaatactaatttgacatagccagggactagagaaaatgcagtagacataactgttttcctgggtaaaattttataaaactaaacattttagaaagccctactcatgtgtagatgtggga

SEQ ID NO: 47697 - DNA, 1624 bp, Homo sapiens
cccttccctgtgtccctaatgtaaaggaataattaaaacccaaagcgcatttcccttaattagccgaaagccctagcaatgcatggcattgtgggcattcaggagccaaaatgcccccactcataaaaaatgatccaaacaatggctcgtgcccaagctttcacacttgttttgcagagaagtcttggctggcagaggcaggatttgtaattccttgggtcgcttgacttcacgaggggcgaggtatgcattgtagcgacacggactacttgtgaagcctttgggcgggagtcgcttaaagattaactttctcgggtttccgttaccaaaagcgtttccgtgaatagcgtgattggaaacttgtgcgggccggagaccgcggcgcggctgctctttcaacaggcgatttgttctcctgtccgaggctcatttccatgcaaagagcctgacatcagagcaccttttgttgctaaacgctttctttagcctcgagggagagagtcatgtggagctggaagagctcattttgaagagaggggtcccggggagctccctccaagatctagaggctccgcggccacccctgccgggtcctgccaagacttgctagaaggaacgagtcgcgtgccttagttagttggttcccgtcacaggaagaaacgcctttgcagtgggtttaattgcttctgggccgagcgaattccccgccgtacaactcagtggtgcggactttgcctcctgctaccctgttgctgcgccgagcggggtgggaaagtttctggagttgtcagtcgcgcagcccgtggccacctagacccgaggtgcgggcgcctgcgaagggcccccgcggggtggccggggccgccggggcatgcagcgcgggggcgcggctcggtgacgccgcgggcggggacccggcatccgggcaggctgcgcgcgggtgcggggcgagggcgccgcggggactgggacgcacggcccgcgcgcgggacacggccatggaggacgcgggagcagctggcccggggccggagcctgagcccgagcccgagccggagcccgagcccgcgccggagccggaaccggagcccaagccgggtgctggcacatccgaggcgttctcccgactctggaccgacgtgatgggtatcctggtaagttacctggggagggggcggcgcaggaagtacagttcgcagcagcccctctgaaaccgggggctcccttctcgcccacccactgggcaacccactccgcagaggcgtccttctctggctctagttcttagggggctaaatacacacagtataggatttcaaaccctaattaaaaaataaccagccacaggtcccgtcaaaaggtgttttttaaacaatcgggtatgatattcaacagtttaatctgggacacctgctgacatgttggtgtggaaaaggcgagaaagaggccttcaaaaagtagatgtaaataaatatttggttggtgctggattagggaaaaggctgatgttactgatgtttatctcttcaccatttgttgtgtgaccacaagagggaaaacaaacatttccttactcagaactgccaaaatgtttgcctacttttttttgcagtttttcaatttg

SEQ ID NO: 47698 - DNA, 1295 bp, Homo sapiens
gttaaaggtaatatttttgcttccttgacccaacttggaccctgtaatttctgctctcatggaagctaattttatgtttcttgttatattttcagtatttcttttaggcaacataaataagacaaaaacaagagaatcttttttctaaaaccttttctttttctgctttattgcatcatcattgtactagaatgttctatttgtgatcttccatggtaaaaaattttaaagaaagtccacatctctaaacagacgcttcctttggcacggagccacttgtacgttcatgccaagggaggcacagaagtggtttaggcatcaagtatttctggaatgcaaagcacacgttggggagagcgtgtgtgtgctttagagcacagctttgcctaatccatccacgtgtgtgtgctgctggcacaggcggttctgggaggagggctgctttgccagaaagctataattctaaacttaagaggctttgtgggttttgttctggtctgaggaacgttgtgggtgatgtaccatagcaaaccaaggccactgcccactcaggttgagaagataactgtgcacaccccatcagctttttttgttttgcttgccttgcctcctcccaggaacctagtaatatggaggctgaaatagacaaaaaaggctcaagttgacattgactttgaacttggaggtattgtggtggggtagaagcatcgagtgaacgggctgtagcttttcctgccctagtttattatgtgccatgattcaggctgagagctcaggtgttccctcagaatctctgaatccttcaggaaacgagaaatgtttgctcttcctcctaagaggaagtgactcaccaaatttgtactaaccttagttaggctgggtagtacttcttcccctcaattgtggagagtcattctttccgtgtttatatcctttacttagtaaaatgtggcatggctcttgtggctgagagagactgatggcctcctctgaggttaacaaaaaattttaaacacacgcccactgtctccatttgtaatattgtcattttgcctctgtaattttaagtggttcaaacttaatgtgtttctaaacaatttgaaagtttaaaaacattttgtcctttatttctctgttaatggcttttgaaaactatgctatcctttgcttttaacttaaaaacactttcttttgaaaacttttatggctgggtgcagtggctcaggcctgtaattccagcactttgggaggctgaggtgggaggatcacttgaggcaaggagtttgagatcagcc

SEQ ID NO: 47699 - DNA, 2245 bp, Homo sapiens
ggaataactttacaaaaatatttctcttctctgaaaactaatatttaaataggtgtaatctgaaactaccagaaaaattcaacaaacacctccagcaaataaatagctgagtgtctgtgatgtccctttcctggggaagggcagtataaagatgaaaatcttgtctagctggaaggccgtcactaacagggctggggcgcataaccctgtggagacatttgtgcccggccttaaagggtgcgtaggagtttgccaagtggacgtggaaggaggcattttaataagaggaaaataacatgattggaagcgtggaggtgagaaagcatagaagcactcagagtgaggagagctggggcttgggccagcccacgtcagcccctgcctgcggacccagcctcttggagccaggctcactcaccctgcctttaagacggccctaccagaggcaggagaaggatccgcagcctcagctttctgtggcgcaacctggcactgagtcactcataccaatctcagcgccagtggccaagccgctgctgccggagggcctgtgtcaccctccccccgtttccctgccctcttcccatcctaccaccacccaagctccctggcttcctaacagtgtggcagggatcctcccaggcccccatcctcctccagcctgagttcttcctccctgctgtcttcccagtcttccccactaagatcccaccacccttcagacccgggctcacaccagctcctgctggccccatgtgcctcgcaccgaatacaggaggtcgcacactgcatccccagacaccaagtactgccctgcttgaccacctatgttcccctgggcccaccagcatggactctccttctgttaccagtcactgcctgatccaggcatgagctgcctgtgtcccccgacatcatcctcctggcaccatcctctgctcttcctggccttcttcactgggagccttcgggatcatccctccagatcaagttcttccagccccacctccctcccaccctgtgcacccagggaaattcatctcttctgggtcccaaccttggcctcgggagagccccagatgcccccctctgtgtctaccccagttactcagtgtggtcagacttgggggttgtacagttttctgtctcatgattcatttccccaggcaaaaagctggctaataatatctgggtgtgcgggggaggtaccagtgtgtttctgtgtttggaggtgaatttttttctactttagaatttaatcacttctactttgagcagtttttagctgagctgacagtaatatgctctgcattgagtatttgtagggggtggaattagtcaccacaaatttcaatttttggactttcctgataacgccacaaagctgaaaggcttctaaagcttgagcaaagattggaaacttgaccccaggggttgatggttgatctttataaaaacgaccttgtggtcagtttgttcttttatgcttaaattgtcaaggtccctgtccaccccaggaattaatgtggtgatgtggaaagagcactagacaaaggatttcaaaactgtctttgggcccttggctcgtggccttagctctctgacattctttgcttataaaatgtaccccctgccggggcgaagtacaatccttacccattttgcatgactcaacattttataatggaagcttctatttttgtctggctaaatctttttcaaataaaaatatttcttggtctgtatatttttcatgtctcagacatttttatcaatacataatgtcctagcttttcacatcttgcaaatggcacagaattgtgaaagaatacagcaaaaagctagaaatatacctgtgtatataacattgctggggatttttatgtgtggtttcttgtgggttctagtaagcacgttcatttcattacctacaaacgcatagaaaaatccaacataatcccacactgatgagaagaagagagggttgtttgtcaggtggggtagtttcacttgacttgaaggtctcaccccgcccctcgtctttaccatagcatacgcttctagatgcttctgctgcattgtcaaccagactctaccagaactgtttttcaaaacatgtgttcctaggattttacctccctgcattttttgctatatctattaagtaatgcatgtatataattaaaaatcaaatagtcctataagatgtataatgaaaaccagcagtttcctattccaaccctcc

SEQ ID NO: 47700 - DNA, 809 bp, Homo sapiens
ggcatgtgtgttcactaaatgttcatttttattattatgagttactttctggaactctacaccagtccctagatcctacttgaaaagcagtgaatgacacagcaaagataaacttgccagggaaaaacctgaacattgattcctatttcagaagtgtttttgctgcatttgcaagaacctttcggcatagacttgtattctaaccacattcaagtcagagtcctgagttcaatacaaatgaaacatgtctcccctttttttttcaccaagctggctaaggagtcttgctccatgaaatgaattgctgaatagtataaagaagagtgcacagggaattggccctgcagttttatgtattgacactctccatactcccccttttttccaagtggataaacactatgtttccacgatggtgacagtatccatgtcctccgtggcagctactttgtcggctccattagggaagtctgaaaggttgtggagaacgtcaacagagttcaaatgcaggcctcctgtggcaggctcttagttggaatgtggtacaacgagaaccttctgaagctcgcccaagttaaacacaggatttgtcacacacacggcaaggacataaaactggtatatggtggtgcctctggttttctgaagtgcaagaccctagcccagcagttagagttggggccccagagctctgcaatgggggtggctgctttagtgagtttccttttaattgaataggcttagaagccagaatcctttgttgtatgcaagaaacagtcaccagctgttttctgtttccactaagggca

SEQ ID NO: 47701 - DNA, 1322 bp, Homo sapiens
agcccaggagcttgatatattaacacaagacagaactatgatctcacagtgtcactgaggcaggaacaaggccgatgacaggaataccactaagggaggctatgccttgttcaaaccatagaagtggggggagggtatcactgaactggataataacactaggtgtagttagctgtccctatatagcaagcattgtgtttattgccttctattagttatttcctttaatccaacaaagtagagttccatttttcagatgaggaaactgaggcttggagaagtaggctccaagcaggctttcatcctctacactaaactgcctccagagaaagtgccccagagcagaacaagccttggaatgctgtcgtacccctggcccatcctgagggatgctgctgtacttccctcacagcgacctgtgtggaagtcgaagcccaaaaggcaggcacagctgacatcctggccaggagtacccactcccatgccagggcatagtacataatagccctgtttcacctgcctagtgtccacccctcacaccaggagtgatatatcctgcatgcagacccaccagccggaagatggaggtagccaggcactcatgggtggggacaaatgatgacaggaaataaccaaggaagtcatgaatgccatggtaactacctggcggggggtgagaaacaagggctttccagcacaagtcacaacttgggcacttagcacagtgaccaagaatctgtcatccagggtccgagacaaacctccctccgctcagtgtgcctccttggcttctccactgagacgcctctactgtaggccaagaaagttgatcctgaaagctcaccgcagaaagcagcaaactaaacctccttcctgcctgggcccagagccacccagggcccagcaaccagttcttatctcttcatctgatttgtcacacgtaagtgtcatggttgagccattggtttgtctcctccattatattatgagcctcttaaaggccagaagtggttttttatccctgaatcaccaacatgtaactgccccctaacaaagcactaagtaattgtttaccaaatgactcatggatctgacattcttcaaatgaaaaccccctaggaaggttttctccaatagattagtcctgctttcctttacacttcacaatatacttgtttattagattgtaaatttctcaaggccagaaactcaccttaatctattcaattggtgcaaaagtgattgttgtttttgcaactacttttaatggcaagaactgcaattacttctgcaccaacctaatatatccaatgcttgatcca

SEQ ID NO: 47702 - DNA, 3741 bp, Homo sapiens
aagaattgtttcaaggaagaaactgccagggatatggacattttggacaggggcagaaaaatgccctagtgttttggacaccatggaagcgctagaatttttaaataaatatttcacattgtgagaaacgtctgagtattaaacacgctttttttttccctagggggacactaaacaaatatttatttaaggaggtagaaacttgaaggccccccctcttcccgcaaagctagtctttggctctgcttctaggacttctaggaacgtgcaattaaaataaaatcgaaacaacgaaaccctcgcagcatttagatttcttttttccccctcaactgctcaagaaaagtcagaagccgacactttttccaagtctcgaagttgccagttgtgaggctcccaagacgtctcccgcacaccctagggacgattctgcacgggtccctcccgttagccggcggtgcgatccggctccaagggggtgtgtcccggaccgcagcgacccggcgccagcctccgccgcgggcccacctgctcctctcggccgccgcagcgccccggggtccggccgggcccccggaccccacccgcgcggcgccgccggccgcccggcaagtcccgccacccacttccggacccggccagcccctccgctaggtgcagctgggacgcgagctcagttcctttcttccctcagcccaaactgctagcggcccccgtggcgggaggtggaacccgcaacctacccccaaggatggggggcccaggcggagaaagggggtcccagccctccccgggctgcccgcaccggcacccccctcgcacggccccagcggcggcccgcgtcctccctccagccctagcaagacaggcgtagagactgcgagtgtcgggggaggggtacaggtcggaggaagagcatccccgggccgcagccgcagccgccgccgccgccgccgcctgctgctcccccgccgttcggctaggggaggcctcgtcacagccgccgcctcagccgcggctgcagatctcgcggtgtttgccggccgccgcgccgccatattgtgtgacagtattttgatttggactgggctggcggagccgcggcgagagcgagcgagagctgggggggtggggggagggcaggcgagcgcgaggggggtgggggcagagggaggtggggaggccgagcgagccggagctgaggattggggagcggcgacgccgcccagccgtcgtttttgatctgctgcagccgccggcggggcgacccagcccgaccccctcccctccccctcagccaggagcggtggcggcggcggcggccggagggagttggcggcggcgggcgagcggagggggctgagcggggagggagggagggctgaggtgtcccccctgccgggtggaaccggaggcggcggcggcgctggcggcggccgtggtggcggaggcgacggtggagacggctgccctagtgggagaggcggcggcggcggcggccgaggaggaggagggggaagcggcggcggcaaagggtaagcggacagcgctgccgggcctcggcgggatccccaacctggctctcccctcatcgccccgcacccccctccgtctggaaggggctctgccgcctcgcgaggcccgtgcggggcgttcgcttctaacttgcactcttcctccctccgcctctttccttcccccagtggcgtggcggagagggaggccccccgagtcccccagtccggtgggggtggggagcatcgggccgggcctgggctccggggcgtccgtgcggggggggagggggagcttcattggaatcgagcgcctaggagagccccgggtgggggagggcgcaaggggctcgggagggcccctccctgcgtcggcgcccctgacccgcccccaggcatgtgtgaggtgggggcgggggaggaaaaatctccttttggggagccgaggtctagttaaagatgactcaggggcgggggttttggggacagacacggggcagttatgtgggggtcgggcgggagggagaacatcgttcctttgcggatcttggttttctgcagccgtctttgaagtggggggcaagccctactatgaatatgtggccccttaaatttcactggatgtttctggttttcggtcccatcaacctcaaaccctacgattgtggttgagtcagggaggctgcaagggtctcttggcggtgctgaacaggtgacaggtggatctttctgttgctgatgctgtgagatgttcaggcacagtcgtacaccaaagtgtcagagaccgtgtgagtttgtatttatgtgtttggccatgtttcattccatatatagtatatttgagatgttaggtttccattcttcaagtcagcttaattgttgtggataaattcttcaaatgtttctgataagagggttttccaggagagcggagggaatttgcagcctcacaggggtttctccgtagttcacgaaatttaggcccccagtgcaggctgttgagtacccttattcattggaaagttcttgaacgctaagatcgtattcagagcaactgtacggcaatataattttgcatccattttgtctgttttaggtaagtttgtaaagtgtctaattttggggtcagattgattcacattttagaaaaggaatttcgtttccgctttagcatactctaaaggttatgatgatcattatgcaattccagatttggccgggaattttagtgggcatggaatagaatatttgctttcagttttttcacttctgcttactacactgttcatacagtagcagagtattgacaccttttaaaaaatatctttacattctttgtaacaatgaaatcacgattttaaacttttgacggtttgaaactgtaaattttgaaaccatggcagtttgtaataaaggaagacttgcttttcttttgttgtaggctttggctgagcattttaattagaaacaatgggaagaattgttagatacatgagctataggctaaattagggtacagttagtttaaggattctgctgctttaaaaaaacatgtatggaacgaatatgatgtactatcaatgtgttaacaggaaatagaacaaaaattccagtgattcagaacttctgtttgggtttttcccccataggtctaatcagtttctaatagagggtgcttaagttttaaatctttcaagaatcaaactgaaagttgaatacgtcaattatagatgaataagttatcccctgaatatactccattatttcttttttcttttgtgtgcatcgagttacttttcctgagtttaaaagtattctcttaaggacactgatgaaatgctactattgaaccccctttagttaactatttcatagtagaacgtgtgctttagtgactcattaagaagtggataaaatggtcagaacctcatcaaatacatgttttttgaaaaataaattttaacttaatcccgtttgattgaaatcacacctatgcttggtcctctagtggaaaaaagcgcttgccttcagctaagggtattgctaagactgggaaacaatttttttttaattttgtttttgttttctttgttttttgttttgagacagtctcgctctgtcacccaggctggagtgcagtagtgcgatcttgactcattgcaacctctgcctcccgggttcaagggattctcccgcctcagccttcccagtagctgggattacaggc

SEQ ID NO: 47703 - DNA, 3790 bp, Homo sapiens
tctctcttacctttttttcattattccctgtgtcagtgtcagcaccttctgctgaaactcactacagcgtatctctacaaaatctcttgcctttcttagggaggaaagtgacacgattcagccagtttttaggaagctagccaagtttgttaccactgtgaaatacagtttagaaaggcttagccaggcataaggcctgtaatactagagtcttgagaggttgaggcaagaggattgctgaagccaggagtttgagaccagcctgggcaacatagcaagaccccatctctaataaaaataaaaaactaactcggcaggtaaagtgcacctgtagtcctgcctactcaagaggctgagttgagaggatcacttgagcccaggagttcgaggctgcatatctatgattacatgacagcactccagcctggaaaatagagcaagaccttgtctcttaaaaaaaaaaaaaagaaaaccttaagagtagaacaagcagtcaaacaagaggtcatggtgttaggtgattgcccagataacacatacttgaacaaggacattgtggtggaaaagagaaatttttgtgaaagtaatcagtgaaactttgccattgattatatgtggagaggaaaagaattgagaactctgaggtttctagcttcagaagcatgtcatttataattaacagagaaatacattagtgagtaggaggcagtgagttgagttttggacaaggtgactttaggttgccagcatggtattgtcaggctattagtttacttgttccagtcccacccctcccttccgcctccctccttccctcactcgctcactgaattccattgctattagtctaagaacttccctttaggaaaagtaattttttttagtcacagtcagcagtagagcttgaaatttgtggagaccaattccccatttcctacccacattctcattatcctcttttggtccgtttccccagggaaaaaggtgaagattatttagaataatatctactaccatcattactaccaccccaccccacctcacctccaggaaattggtagaaaagtttatatatagatatgtatgtatgtatgtattatatatataaaaaatatatgtgtgtatatataacatatatataatatttacatacatatatttgagacagggtattactctgtcacccaggctggagggcagtggtacaatcatagctcactgcagccttaacttcctgggctcagccttaacctcccaccttagcctcccaagtacctgggactacagacaccagccaccatgcctggctaatactttttttctaactttttgtagaggcagggttttgctgtattgcacaggctagtctcaaactccttggctcaagtgatcctcttgctttggtctcccaaagtgctgcgattacaggtatgagccactatacctgacctagttttttatttttacatcaaataaatgaagcaacttggcagggctctttgaagaaaaatacaattttatgaagtgtttgtgattaaaatattaataagcagagtaacacctcattcatctagtattcttaggtagtaagtacataaaatgattgaaacttactcctgaatctattttagagattttatagagattttacaatatattatgtatattgtgtgtagataaatatagatattcatacctccaaatctatttctttataatgtttcacatactttgctgctttctgaaatagtaacacctcctcccctcccccacttttaccctgcatactaaaccttttctggaagatagaaataaacattttgtttcagagcttcagaatgagtcaggaaccccgggttctagtccagggcctggcactaagttgctatatgagaactgaatcatagattctagaacagtgcctggcacgtagtagtgcttaaccaatatgtttggaatgaatcattgtcttgtgctgactttagtgctccttccttgatttattacttggaattcattgctgcctagtaaataagcttctgggttcttaattaaataggagtatctaggttctgatagaggtgaactataagcctaatttatgtctgttttaactccttagtggaacttttggcttatcttgatgtattttctggtactcgaagttgccaaacagatgatcttctgtgcttgatttattgggggcacttgctgagtactttatatgtgcctatattatgtatatgcagtgttctatgtgtaagcacatagcacatgtctccggggatcttataacttagatgaagagacacagaagtagactgtaagagaataattaaatgttgattcataaagcattgacctacagctacattagtagttgtaggaaaagatccatgtgggctgaagcaggataaaaagaattcaagtagaaggtgaaattggaattggttttgaagaggtagttaagattttgataagcctcaaggtgaagacataacattctaagcaagggcagtagtgtagtaagcaaagaaaggaaagtgtgggttgaacatgttcagacaggcctgcccagattcctaagggtgtggggactgctgggaaatagaagcaggtgaatttaatagagtagttttaatctgcaagaccctgaagggatccagggatacaatttagagggctgcatgcatttagataaaaaaaaaaaagtgacatctttatatttttatgaactttgaactgaaatttagcatttacttttaataagattttaagcggcagactacagtaatattagcagtacgtatatcttttattactaatagaaaaagcacagatattttcagattacagctgttgatatctctataatttatgcatattactacttcagaattatggtttttattagactcccactagattttattgtattattactaaagaagcatatgtatgaatatatcacatacaaggtttttaaaaacacttgataactgtttcggtataattggttttcttagtaatgtatattttatgcatttaaaaccatattttcaaaaacaactatattttagtaaaactggctttctttataatcctagatattgtattttatgcatttaaaaccactctgagggggactctgtagctttctccagactgccagagggattcatgacccccgatctagtggaaccaaactggagaaggcattgaaaaaccacactgaggggttttagctgaagtgataagcaggaaaggagccttgccaattttgttcatttgtttgttttgtttcagttacagaatagatgtgttaacatagaaaatttcaaagtttcaaccagtttagaaaaaagggtcaaactcttcttagctcacaattgtagataaactgtttaaaaaaataacagaaactcatcttgtaacaccacagtcactatccttcctcttttattatttatctgtttcagtttattaaattcctctgcaattgagtgaaatatttaaagtggttatataggaaactttcttaatctcttatactatacttacacagagggtgggaagactggcagggagctaagcagtgggtctggtcatttatatgtttgatgatagggatagggtggtaagcagttagagatagagtaaaattgcaggagatattggaaagaaaaaataatagaacttggtggtatgggagctgagatgcatggagtcaggtaagagagagtatcaggaagaaagttaagtatagggtgcctaaattaggattcctaga

SEQ ID NO: 47704 - DNA, 744 bp, Homo sapiens
tcaacagggaaaacccaattcctcagaaggaaaacgcccctcgctgagtgaggtccactttttacataaatacttttgttcccaaggccacttccaggtcatacaaaggttctgtagagaggttgggattgtaaatcaaggagaagatgttttatgggttgctgtccccctaagaatccagagtcatgctgaagtcccactctgcagagagctgggtgatccccggccctgtgtggcctccatagctcagctcccagctgcacagccggcttctcagaattgggccttgaccaagaatctggggaaccgcccactgtggttattaaacgttcccaaagacttcctctcctgctctctcaggagcaggagctgtgccaagagggccctgtggacgtgcccggggcaccagggcaggcgccctcgctcacaagcgggcggcaggtcctgcctcctggcaggcccttaacggaggccagtgcgtcaaaaggacttggctcccgccccaggctgtcatcaggccagagatggccatgtccctgagagctcagtgaggatttctggagcccatagttaccagactagccagattcctccaggctacagacggacagtgagagccgctggccttttgtagctggaaatgacaatgggggctcctgcagggcgctgctgccatgcctctggccctccacctccacggctgcaggggcagttggccttggggaccacagtaccccctgctgc

SEQ ID NO: 47705 - DNA, 768 bp, Homo sapiens
cacagtcacgttcagctgcaaaagtagttatgctttgggtttttttggtttttttttttttaagaaaaaaaaaaaggaaaggaagaaagcaattaaaggggcgggggggacttaaagtttgcacctcagcatgagtcaccgaatcaaagttcagcaaccacatgcaaaacaaaccctccgtgagggcagcaagtctccgtgaggacggctgggattggctgcacagcaaagccaggagaggctccatgaggagaacagcattcagagtccaagggggagaacccctgttccaagtgggaacttggaacagaagttctcctgcctccagctgagaagatgatcagattctagctgctcctggggaaagtcggtactcacagctggacacaaacatagcttgcaggaggaagagtgtcagagcaagagacagagcagagatggctacggagatatgggtgcatatggggacatggcacagggaggactctgtccctgccttcacgaaggggaattccaaacgagtcacgaagtccttctgactagggaccaaggcactagcctgtgtcagagataacatggccctgtggctccctactgccgccctgcgtggcgtgggtggtggcttctctcccactgtggcaggggaagtctgaacccacctgaccacagcattctgcagactgcctggtctccagcctcaccaggtacaggcaacagacccagaactctgaaattatttcctaaatttggtgatgcccatcaggggtc

SEQ ID NO: 47706 - DNA, 1403 bp, Homo sapiens
gacctaggcgtatctgaccacactcgagtctaccattccacgactcacaccagtccttccagccacaccaaactacttgccgtttccagaaaattccaaacaaagaaagtccaagctaagaaaaccctcattcccattcatctttgaaagaactagttcaagtgttctatatagtattcgctagctttgcttcttcccaccccccaccaaagaagccgccctcttctggtttccgtggcaacttacacattcttctaccataacacatagaaaactaaaatgggttcctgtgtctacttcccccagtggaaaaatcagaccctcgggggcaagaagccaagcccaggacttagcccagtgcctcgaaggctcagtccacactccagacaacctcttcctcctccacctaagcggtatgcccacactcgctgcgccaagcacaccctaactgccttcatcaagatttaaccgattacacaccaagcaatagttcctatgttcctctcacgagtaaacacaataaaggcacaaaagctatgggtattgtatgtgcagctcgaatcacacacacacacgccccacacacacactcccaaaggcaattaatgaccgcaagcaccgtccaccggactggccaacacaaaatacgggagaagggctgccaaggctcaaacgaattcccgtcacaaaaacttttctagccaaggccggttaataaaatagcccagtcgcgggcaccagcagcccagaagctcgagctctagccaatctctgccctggactgcgcagagaagggaaagtagggagacaagctcgggggccccggcgacaggtgagtggggctcaagcctcaccacgcggccgttcttcggtgtacaagtcgatgacgacgtcgcctaaagtggtctccagtagaaccgccatggcgcccgctcctcctccgctacaaaccccgggaggaggggggtgacaggcgcaggccgacggcgtcgtctacgccacgcgtcaccctcggcgcgaccccttttgcgtcatctcgccggcgccgcccccggttccgagcagttccttccggtcggcgtgcgggcgccgggctgcccagctgacttacggatcgggttggtcccgcccccggcgcggccgttttgaaaatcctggtccgcccttggcgattttggtggaagcctgtccctcagaacggtctcagtatagtgttttgtgccccgtttgtgtccgtctcaagagcagagcggccctccgcgcggcccttttatccaccagggggcgcccgcggcgggatcttctctccacctatttgggcggactcctccgggtttcctcgtcagtctccttttcgcaaaacaactttgggcctctactaggggtttccgattctaagaact

SEQ ID NO: 47707 - DNA, 1887 bp, Homo sapiens
gaagactaaatattactcttattctgcctgaatggccaagtttccaagtttttctcaatcaacatgcaatcctgttaatctaaaatgcttgaatttcttgctactctgctttacagggttccgtaacttttttttttttttaaatctgcaaggtggaagaaaagtctaacactttcactttagagttacgatactgaccaaaaaggcactgacagcccaggtgcgctggcttccttccagctgagcgctgtccccgcgccgcctccaggggtcggcagaatgctgaacagtaagcatggcgcatcctcaaccttggccccacaatgaatcacccgagaaaattaaaaaaccaccagggcccgagccgcagcccaggctggaaagtggggtgttcaggaagaccccagtactttttaaagctgcccgggagagtcccacgtgcagccaagggtggggaattacccacttaataaaaacttcccctgtaaatgcgatgtttcatttttaatgtataacagttttctgaaatattaccgttgttttcatcgtataggtacatgtacatgtgcacacacagacacatgcatgtgtgtaaatactaattttaaaaataatggttacgaggacatttacatcgctccagttggagtcctgtccaatcctgagggcgggtctaatgaggggccgtaccttccaagatttcactccgcccctcgacgccgcgcggcgctgcgcgtgcgcaaacgcctttccctggcgagccggatctcggagcgtccccgcgcctctccgcggccgcccggggaggggagggcccgtcccgcccctccccgtctctccccgcccctccccgtccctcccgccgaagctccgtcccgcccgcgggccggctccgccctcacctcccggccgcggctgccctctgcccgggttgtccaagatggagggcgctccaccggggtcgctcgccctccggctcctgctgttcgtggcgctacccgcctccggctggctgacgacgggcgcccccgagccgccgccgctgtccggagccccacaggtagggcagggcgggcctggctggccgctttacgactccgactctccgggaggcccgggctgtccacagtgacgcttcccacatcccaccggcgggcaggggcgggggtccgggcccccgaaggaggtgtggggagaagcaccccaggaaatgggggcggcgtgggaggccgaggtaagaggaaagggacccactggggctgcgtcgctgtgagtgagcctcgagccactccacaccgactctccggcggcccaagccggcgcgcgacctgacggggctttgccgtcgaagcgcgcggttgccggtgatcaggccttcgtaatggcgccttcccggggtagagccagcgcttgggcaaggaatgtttgtgtgctcgggaagtgtggaagttgcccacttcgcgcatttccaggccacttgtgcctgctcggcctgcgatcgcgagggtccgccgttccgaggctgcggggctccgccgggctcaggtgggcagagggagagacctggccctcgcgcgacgtaatgtttttgtcggatgttggaggagaagttctcacggcggggcgcgatcggcggtgtccgcatcccctggggactcagcccggcctctgggggcggggcccagcagtccgggttggagagtcctgcaggtgcttctgatgccagctgaggtgggagaatcgaggcatcctaacattaaaacgtggctgatgctcaccattcctgccgtagagtcgtgcctacctaggccagtatcagccttttttcagtagaatggtagggaaaagtttgaatattttaaagagcaagtgttctgagaatgacaa

SEQ ID NO: 47708 - DNA, 1300 bp, Homo sapiens
gaaaagagcatcactgtgctgttggaagttagtaactaatataaaagcggcccttcgcggttttaacaggaaactatttttgattaaataagagcttgagattatccactgtaaggcacttcaggatctacgtttatctctaactttgtcatcacatttgtatgaaacaactgtttcgagggaaaacttttctaaaaggtaccaactctaaaccaaaaggcccacaggccttccagaggacgccgggctctagaataaataagaaataacatccccaacaatatcactcgaacctaacaaattttaagaaaagaagttgcctcccaatgtcatggccatcgggatttttacctgtgagggtttcggggtggggggcgtgagcgggttctggagagaaccagtcgaaaaatcgaagaactaaaaactcggctggtgacttcgctaacgacacagatcaaaagatgggatcgacaggagcccccgaaaagtcctccgcctgacaggattcctcaggtagggggactgtcacctaagccaagttatcgtggacaacagcaaggacctaggacctcagctcaggcacaggcaggctcacggagggttgcgcggcgggttctcgctgtgggccccccgagtccctcaccagcccggccctggaaaatcgggggtccccagagcaccgccagagtgaaaactcacctgcggcggcccaagctcctcgggaaaccgcccaacgccaggcacaggggattggcggagtggagatcccggcagcgaggaaggagggcctgacccagtccagcccactttgctctccgctcacggccccagtactgcccagttcaatcgtcaacaccacctgccggcgcggctcctgctcgccgagaatttgaagacaaacccgccagggtcacttccggtgccggggacgacctcggcgactctggcgcacgcggggcgtcgccccgggagcgaggtcgctgggcgggagcggcggaagagggtgtggccgggcccggggccgcgcgtgcgcattcttgcaccgcctcctcccggcggacgcagcggagaccagggatagtatagaccttggtgtagatggtattatggtactacctcgcgcgcctctgtaccttgttcaggtgcttgctcactttccctcccacttgattttcaccacactcacacacacaccgaggtcaggtgtctattttagaggtgaatgtccaggatcaagcaattcgtttatgacaaatcctgttttagaacctagtattcagaattccccagctgggctcca

SEQ ID NO: 47709 - DNA, 2374 bp, Homo sapiens
tacacaatgaaagccagatattatacattaaaaatgtagtagaagtattttttggtgagcagcaaggcatattccatcaatatttaggcatagaatgtgccattccaagcatggaccatgatctagtttcttgcagtagcagccaattggactaacacaatgctacttcttttactgttcaatcaaattcctccactgccttaaggaatcaactaccccattttaccgtcagagataataagctttgttttcgtagcacagaacattcactccaattataatgtcctaccttttcttcctcatggaggaaatttgataaaaaattaagtttatcagaaacttctgataaactgataaactgataaatttattaaccttcaataaataattcataaagttcaaacaagtttcatgatcgctaacattcaaatccatttccaaaactggagttatacaatattacttctgtgcatgagattatacttattgttcactagatttatgaataacttctggaggatgatacatgttttaaaagccgtattaacatatgagttgacaaacattaaattttgttcccttagaaattgacagagaagtcagaatggggataaatcaagtcatctgaggcattcattgagctacaagctatttcaggttataaaaaacactgttcccttaattgtcgttccttcatttgctgtatttatatacacactcctactccataaagacctctccatctctcccacctcttccaactatgaacagtaacctaaaatcacactgaactagacgtaagagactcccaggatttctctaaggtatacccaggatcaaggccctctgggatccaaagaactgtagctcttttactgcaattttccttcagaaccacctttcccgttccttccctcctggacaccgccgactcgcgtgttgggggtggggtgggagacacgccgccagaaagacaggctctacccagccaaacctgcacctccgaggccgaaaagcctggggctcttcctgcagcaccgggcgcggccaaccctcgcttccccagggcagggctcagctcgggtcaatgcaaccagccaagtcaggcccggagcgggccggctctgcccgccagtccaaacctctggaccctcgccagcggggatgggcgtgggccccggcggccaccgccccgccaactcgagcactggaggagcgcacccgctacgccagccccggacctacctggaggggagagcagagctcctggacagcggccacgggcctgagggcggacgctgaggcggccagagtccgtcccagcaaccccaagtatccctggtggggcagagcggggagacgaacgggggggctgccgcgggccagcgcggcccgtcccaggggtcgtgaggacctggctctccccttaacaccaggccaccgccgccgccgccgccattttgccttccactcagtgtcgccgccgccgcactccgctgcaggtttcccggatgtgggcatttcccggcgtcgcttgcgcgggggccgaggactgggggcttttgcccgcccggctgctgcgagggagcgcgcagcctgcggcctccgggcttcgttgcgtcgcccgcagctctgatcgttcgtgagcgtcgccccacgtcgctcccgcctgcccctgcccatacgactcgcccgcgcccgtgggttaaggctgtctcccgcccagcctacttggttgattcaatccttttccccattgatctatttctctggaccgagtagggatgtgcatttcacggagctacgttctcagaagggaacaactgagttgctctgggaaacctccctgtggacctcagaattccagatttttggcgctttgaaataaaattttattcttgcttagcgttctttccccgaacaagccggtgagcttccagcatctgtattttctgaatccggcagataagaaatgcttgagccaggaccgattgattagcagcggtttagagatcttatctgtcaaccgcatccgtagaaggagatcgttattgccataattggaataccggtgacggtgtgacaagaggttttacttctggttaagctgaatgtaaagtgtgggatgggatcgttgggtttgatgtataaggtacggtccaccctttgtgaagatcgcctttgccagtttttcctctaggaaatatacagttagtgttttcaagtaccttctttcgtaatttttctactacagagtacaaaaaaattaaagacatctttttctgacgttaaagtaataactggctacttactgtatctagaaatccaaatgtgaaaacccgttaaaagattatgttccggacgggcgcggtgt

SEQ ID NO: 47710 - DNA, 831 bp, Homo sapiens
aaacagaaagttttgtcttgagatgacataaacgtcaactctcggaaaataaaagttgtgctcccgtccggaaatgttgctccaaaacatctcaaatggtatggtgagtttaaaacacaacgagatacgaggctcaggcatgccatcaccggctctgagctacggagcaaccgcgcctgagacaggggtccgggggacctaaaagtgcgagaagaaccagaaggtgggagttggcgcgcggaaggccaggggtcagctcaaccggagagagggaggaggtaggggctcgtccctatcagcggcgatacctcattgtcccaagatcctgtagcgaacgtctccgcggtctgtaaacttcccggaggcagcggtcgccagcgggttttgctgattttctgggacacaaacttcgcataaatttcctccatgccgaaagcggccgcagcaggtactgcaaaaagcaagcacagtacgcgcctctcagcaccgcctcttcccgcggaaccctgattggatgggactttaggacggagacggtggctgcagagagtcaattctcgtcgatagccagtgtgggcacagtcagtacctagactgagaggcccacccatctcacagagcagctctgagcaaaggcaagagcgctttggcctttgagcagtaggacttgctcctaatctgcaatgtcagtattttcttgtgttcaataattgtgcagtgtaaaatttaagtgcaaaaacagaacaaaaacaatgcagtagaaaccaccttgaaaccacacctaagcagttgcaggtcactgcgcatagaaaacgattcaaaaatccttaa

SEQ ID NO: 47711 - DNA, 1043 bp, Homo sapiens
tcgaccccgccatcccgccgtcccgctcggtgaccggagacacagccgggaacgcgactgatcaggctaccgagccgggccgcagggcgaaagcggtgcggtccgaggcctcagaaagggacacgcagcagcggaagtggcgctgactcagcccggcctccctgcagtcccctggcagcggtagcagccacaggggcgggcggctgggccacacgcctcccccgccctcggccccacccggccgcaccctaagccgcgcggcgtcacagagcgcatgcgtgccgcgggggatgccgggagcgcgcagtggcggcagcggcggcgacggcagtaacagcggcagctacagcggggacgcgagcggggcggtgacggtgtgggaggtggtctcactcttgggaaaactgctgggcaccgtcgtcgcgctgaaggtggttctgtacctgctccgagtgtgcttagcgatggcctggaaatccggcggcgccagccactcggagctaatccacaatctccgcagtaagtgccacctccgcccgttgtagggcagctggggcaggctgggcctggaccgggtccccctgggccgtccggaacgttctgtctgtccccgcgcgcctgttggagggcttcggcgcagagttgccccggtagtcccgaacggcgtgcgcttgcagtcgcctccctcgggacctgtcactcgtcgacgacgtggactggaaggggagagaaagagccaggggccgctgctggtgggggcaggggcagtcgtctccctgcaggccctgggggagggagtgcagtacaggtgatgctgctgtcactcaggtccgcgtccgggtccggcttgtgaggggcgtgccttcggggtgggagcgtgtgggctaggccttatggagagtgggctggcgctcaggagaccccaccctcgtcccctgcatttttctcaccttcctcctccataatcaacctcgctgcaagctttccctcttatgcagcctcccccgccctccgttttttcccctggagggagatgccaccgt

SEQ ID NO: 47712 - DNA, 460 bp, Homo sapiens
gggttctcatggatggcacataagctcaatatgttgtaaatattttttacgaaatcccttaacatgatctcagtgccttctattgcagtatatgtacctgaaacattttgtacacaaattgtgattaagtaattttccaccggtaggttatcatagtaggcacttggctgtggcagaaatttgtaatcaatcaggctcttaaagtctctccttttttgggccaaatttgtggtaagccaagactagatagatcttttcccggtggtttcataatcactttaatgtattgcattactgttcttagctgaaatttctaaggatgtttttctgtcaggaaatttaataaggaatatttaatatacatagatgttgattttgcaaatagttttatactagatttatgattggtaagaggaaattagagtagaatagttgtttagcctcttttgtaacacttgtg

SEQ ID NO: 47713 - DNA, 1433 bp, Homo sapiens
gtctcagcctcctgagtagctgggattacaggcgtgtcccaccacatccggctagtccggtttatttataaataatacgtgcatactactgtactaacatggggtgtatcttataaaatatactcaaattttaaggaaaaaaattaaaaatcagcaaaaatataaactctgctgtcttctttctcaccctaaaaatgtcttgaacaactcaggggcatcctgtttggagactgctgagttagatcatgttggaagagcttgctggcttgctgtttgatcatttttctaagcatgaaaaatgttcaaaatgtcaacttattaaaaattgaaccaagttatgatcatataagcagggtacctgctcatctgtctacctcagctagtgtcacccttggttaccataacatctgggtcattcattgcaagaccaatacatacaatgcaggggagggaaacacttgtctcttctacctctattttccaatgtctctctgtggtgttttattaactttaattcatagcatgttattccaatataaccactaagtgattctagacagcagttagtacttcaccaattcctttttattttccatataaagttacccacacaagacctatactcaagcggccactgagtaatcaaaaatgattcacacaccactctctgctacttcaaatacagtttattatcatcttggagaagggccagaaatttacagctggcaatttacctctggagcccggaaagctgcctgaggaaataaaccaggacaaacaagtggccggtgaggtgctggccatctgctcatatcagtgcaggcccttcctccctcccaggcacttcagctgtacaagagcaatccttttctgatttctgtggggatgacagggtatctgtgtctttttcccaagagtcccttcctcccagagtcagcacttgactcagaccctgtccaggtgagtcccggtacccagggggaaagccctctagagggcgcccagatctacagaagtgagccatccctgctggagacaatgtcatgtctccactggtcctggtggccaagggaccaatgatgttttgagtagctgcccagcaaagggactcaacaatgttttgagtagctggctggctctcctgtccagctgcaatgaattagcagggctgatggaatccgggctgagctggacagactgtttactcgctatcactggtgacctcacagtgctggcacgggctggagtttggtgcctgtcctgtctgtgaatggttaccctgcttccttacagtaagcttaacccctggctggacaggttgtcatcagccaaacaaatttttaatgccgcctatgaaaattatcaaagttgacaagtccttaggatcctaaaatctctaactccttagaaaatttcatttccagtatgcatac

SEQ ID NO: 47714 - DNA, 1104 bp, Homo sapiens
gacagagcgagatcctatctcaatataaaataaaataaaataatagaatagaatagaatagaatagaatagaatagaatagaatagaatagaatagaatagaataaaccaaggaagcactgaggccagggagctgggtgtaccatccatgaggctgctggcgtcaccctgtgccagagctccctgcaaaagtcagtgagtcactgagcttctgggtgtcaaagctcagagtgccaatgtcagactaaactctgcaggcctgcggttcactagcaagcctcttgtcaacactggggctgaaaggacagagcatccctgggtcaggggccatcctcacacctggccttggcatgcttcccccctgcctgcccaggcactgcctctctgatacaggcaacactgggtccagatgcagatgatgatatcacctcagcctcctgagcacactccagtttagatctatccagattgaatgtcccttccctagctcttttagctaacgagagctgtctctcctgcattcagatatttagaagatgtagaactgtcacacggatgctttccctttaagggcccaggtgacccttctatacattttctcccattaggatgacactggagagagggtttacagtgtttcacagacatgttccaagtatcaggataaaaaactatctatatatgtacacacaacatatccaatttgtaacttggaaaaagacatgatcataaaccaggagctcccaatctctgctcaagatccctgttcagcagtaacagcctttggtggttggcttctggccaaatcaatgaatgactcagcctgttgtctgactcaaccccatcttcctagctaggaattcagtggctagcaatacacgtttgggcttctcatatatgtctaaactaaattacacacacacacacacacacacacacacacacacacacacacacacacacacacattgtatatacttggttacaaagacttagtaatacctgtctatttaaaaaaattatgtacagcaggtaggccaggatgcagttagttttaatttaataatgaagttgttggtttaaataatgcccatcctttagcaag

SEQ ID NO: 47715 - DNA, 2892 bp, Homo sapiens
agtccttaagaaacacgctttaaagtttcctattttcttttcctttttttttttttttttttaagatggagtttcgctcttgttgcccaggctggagtgcaatggcgcgatctcggctcactgcaacctccgcctcctaggttcaagcgattctcctgcctcagcctcccgaatagctgggattacaggcgcatgccaccagctctggctaatttttgtatttttagtagagatggggtttcatcacattggtcaggcaggtctcaaactcctgacctcaggtgatccgccctcctcggcctcccaaagtgctgggattacaggcataagccaccacgcccggccttaaagtttcttattttcaacgaaaatcaagtcccctcttttcactttttataaaagggaccagaagttttcctcccatttttgtatgatgaaagccaccgcaggcaaagtcaggagagccacgtcaagaaaaaggagtgggtgttacgagaagcccggcatctaattagattttgctcttgcaattacttaacacaaaccatgccttatacaacccatgagactaaaacaaacttttttctctcagcatttctccccttttaagtcatatttccacgaatcctctcagatcagcctttctcttcaagcctagaaaaattccagtagcacgtcaccgcgcccgcccgcccgcttctgccaaactactgggcttcctcttccctaagacagagaaacccatgccagaaactcttctgggtgcccgcggctaaaataacttggcacgagtgtgtttcgcttccaacttggcgagggcgctgcgggtctcgagcgctctggccaaggccggcccctcagtcgcgcgcttaccctgccggggcgaggcgcgcgcggtggccagggcggcgccgtccggcgcgcggctgaggctgtagctgctgtagccgctgtgcagcgcgaacttgcagacgttgcggccgcgcgccgtgcagttgaagaggtagcagccgagcacggctgccgggggcgcggggcgccggggcagctccaccacggccacggagcagcgcggctcggagcagcaggccgccacgcattgccgccagccccgcacggccgccggcgcccgcaggaagctggcacccgccgccagggagtccttggtgcggatgatggcgtcaggcattgcgctgtagccgccgctgcccgggcccgggcagtcctcctgggggccgccgcccgcgcgcagctccagctccagctcctcctgaggccgctcctgctgcagttgccggcggaactcctccagcagctgctccacgcccgacagctgcgcgtgcagttcggacagcggcgccgcgggcggcaaggccgcacggccgcttggcagccacaggcagagcagtagcagcccgcgcagcgccccgtgacgcggcggtagccggcgctgcgagcccgcgctctcctgggcgacggaggccatggcgacgagagccaagggcagcgagccgaggcggggctgagcgcgggaggaaggcggggacgcgggcgagcgcgggccctgggcccctcctgcgcggccgcggctggctctaggccccggcctcacagcgcggcgcccccgaacccggctgctcccccgaggtcgcgggcgccggcgggaaccgcagtagcgggagacatagccggcccagccgggcaccgctccttgccctcgccggagactgcccagcgccctgcgcctctccgccccggcctgcggcgcgctgggtggcgacgagtcggcctcggcgttgatcagcaccaggtgtgtgcgaacagtggccgcggcggggtggagccttggtgagccccgcccccccgcgcggccccgcccccgcgcgtctcgcgccggctcctccagggctgggagagcaggccccggggagggcagcctcagaacaactttgctcccgcgccgctgcccagctagggcagggttcatgtctgggcccagcaggctttagcaaccaaccacacctgcccagggcgcctgcccacaggggcttggcattcgggggaatgggggcagtgggaagggagggcctgtcttcaaatcctcgtgacccccgggactactccagagagggggcacgcgcacctaggaccaccgtagcgcgtcatcagtccttcacctccagcgtccctgactttccgcatcatgttcccaagatgtgcttgggtagtacaaagtggggcggggttggggtggcggagtcagggccgggaggggtggggatgggaagtactgaaagatgttcagtctgtttaaaaacacaaaaatcaagcctggtgaggtggtactcgcctgtaagtcctgaggctgagttgggaggatggcttggacccaggagttcgagactgcaatgagctgtgatcacaccactgtactccagcctgggggacagaacaagaccctgtctttaaaaataaaaacaaaacccataaatagcagtcgtcacatgcactcagatttccacaaatataacaaaaaatctgaacacagccaacatggggacctgggagtaatacagcctgtgacagagaggcctctagcggttatatcacgtaaaatctcgggagttgtgctttaaatgacataaggaataagaaaatgtccaacccagtgggggcttcaccttggcgttctagacttctgtgagcagcatctgcatcttgtttgtttctgaatcagtttctgttgattcatttttctcctgattgtggatcgcattttcttgctttttagcctgtccggaaatttttgcctggatgcgcacattgtaaatagaacactgttaagtgtctgtattttttaggattgaaagaataaataattggtgggaaaat

SEQ ID NO: 47716 - DNA, 1058 bp, Homo sapiens
taggaattttggggggttacaaacatccaatctacagcaacaccctagtgacatcgttttttgttgccctcccctcccctctactgcccatctaagtacttttacaggcatcgaataagttaagtcagtgcatgtgaagtgcttagaagggcatctgacacattatagaagttcaataaatgctagttgttgttgttattacaacagaaatgaaggacctttcctaagattagaagtcatgaaaccacttgaagcctgaatctcctctacaacatcccagctgagtggctgttgcactaagattcttccttctccatacccctttcatggaatctgctctgctcacgtccctggaaggggcagccccaacccccaggtggccacaccccctgttcactagggatggaatcaataatgaatgcctggcccaagcacagccaatcagatactctctccaaggaatgtaaaaacagaattgagaaacaaactgactcagcaaatcaactcaacaaactgactcaacaaattgagtcagggagggaagtgtagctgggaagccaggtgagctccaggggacatggaaggggatgatagcagagagaagctgttcagcagagggggacaaatggaaccgtgaaaagaggaaatagagaacagtgcatacatagccttgagagagggagggagtgaagacaggagttgcctgacactttctggtctcaaatctctcccctgagcacctacttggccttctacctggaattcctctcatggagttcttgccttgcagctcagtgatctaggttcatcctagttaaatctctgtggattgcaaacaacagaaactcattttagattggtttaaagaaaaaatagctaccgtgtttacacacatgcactcacaggcagggaggaaatgcagccaggccttgggagggcctggaccagacatggcagaaccctcagcagtcaagcagctggtctcccagttgctgcttctctcttctgggaccaagtagtctgagatctccacttctctctgcacatctgattcatgc

SEQ ID NO: 47717 - DNA, 3667 bp, Homo sapiens
gcctgctttgttggagcccaggcagccttcttcattatgtcctcctaggaattaaacctagagacccctcaacctttggcatgtgatatactttcccatggtcagatggtcagatcatcaagctgctgccccacccaaaattgtgtcttgcccaccctctgtgtttctgtccatcagaccacccatcacataggcaacccctggagagtgaccctggtttaaagcccgactttgccaaaccgctgtggatgcattaatttggaaaggtccctgttcacctcagggcccacttgcaaagcagagacagtccccgagactcattcagcctttgcctttctcctgttggccagggacagagagggctcaacttgacccagagctaagcctctcaggtcgtgaatgcccaggcgataaatgaaattcacctcatcttatgtctatggtgagatttggcaggggtcttggggagacttagcaacctcatttctccctgtcctcatacaggacaagccctgcccctaatccagaggccagttggccccatctcatactctgttttgctcacagtatacctgatgccctccctcctgacctgtgattgggattgagctgaagatagtcactgacatgattcaaaggattagcacttggtacaggtaggatggtggagatgtggttggggacatggatggttgaggtgaaatggaacagaagagtgcaggttcttgtccaagctccatacccaggagatgacccttacctccgctgccactcaagtcctcacatgtcctgagcgtctactatatagcagccatgatagattctcaggttacaaaagtaatgtcctcaagtaagcgcatcaatttactgacatacacccaatcataaaacaatgtgataatttttctgtggtcagagtttctgagctacgagtgggggtagttaattctatccaggaagaatggtgacttcttagaggaggtgacagttaaactggacttggatagctgtctggaattcggtcaggtaagaaagaaaattccaggcagagatgagcatgagcaaaaaatttggcagcaatgatgcacggtgattcagagatcaaaaagttcagtgtggatgcctctagacattttcttatctgtgtctgatagattttgatattttgtattatcattttcattcatttcaaaatactttctagttttccttgtactttttaatttgatatatagttatttggaagcatattatttgatatccaaacatttgaggatttttccagatagcttcctgctgttgatttctagtttatttccattgtgcttggacaagatgcttcgcatgattttaaccctttacatatgttgagatttatttatttatttatttattgagatggaatctcactctgtcacccaggctggagtgcaatggcgcaatatcagctcactgcaaactccgcctcctgagttcaagcgattctcctgtctcagcctcccgagtagctgggattacaggcccatgccaccacacccggctaatttttgtatttttagtagagacagggtttcgccatgttggccaggctggtctcgaactcctgacctcaaatgatccacccaacttggcctcccaaagtgctgggattacaggagtgagctatcacgcccagatgagatttattttatgatccaaaaatggcccttcttggtgaatgtccctgtgtatttgaaaagacactccctgtcaacccctttgctctgtcatttagctttgatcagctttttctctcttctgtcacttcagcagaaacaatgcccagaaatgccagagacaacaaaataggaatgtgtcatgggcacacaaagctctttttccctgggtgctgctcttccccgtgacagagaaatccatgcgacacagtggggaggccctccccaaagggtggcagatatatttttttccccttgaattgtaatacacctttccccaggcccactctgcctcccacttctgttcagctcagctgtgggcactgacctccaccggcgcttgatccctgcctgctcctgcccagacaggaagcccttcagcagccgactcggttaccaggatgaggctagaggccaggaactcccaggtgtctatggaggtcccacctcctttaaatccctactgttcagacccagcttctaaaactgttcttttgcctcccttcctactcaccaatccccttcactattgtcaatggcactgaagtcccagcctgcttggttggggcagttaagtccttctcagtcaccttccaccagggattaaggtgggacccctttgcctgcagctctgtgggtgggaccccttcctatctcagcatattcactccctgggttcctgctgccatcacaccacccaccacacgagccccttctggaccagtggcccttatctgactcaagccatatcttgccaagcctgttgtgacaccgatcttggcaaactcacttttcatgtcagggcccctgcaaaacagacacatatctgagtcatggtattcgtttaagcaatgaaaagggtagaatcatttcttacatcagaaacattgatcctcagtgagtcagatggagtagcctatttttctcattagagggaatcctaactttgaactccacagagagagccccaggaactgtgacttgaaccctagagctctacttaacttttccaaattgctgtacttgaaaatgttgaggtctgcctgggtcaatttagagaagacactatgaggacaaagacagcaatggaagaaagaaatgaattcttcatgtcagagcagtggcggagaaacaggaccaaagagcagaagatgtctggcaatgtgtctggcatataatagttctctcagccaggtgtgttggctccccctgtaatcccagcgctttgggaggccgaggcgggagcatcacctgaggtcgggagttcaagacgagcctgaccaacatggagaaaccccatctctactaaaaatgtaggatgtagttcggcactgtaatgtttagagggtggtgaaaggatttcttataccacatcttgtatgttatctgggagtaaatgctgcagccacaagcgccaccagcaagtcttctcagggtgaacgggaaaaggggatgggacctgctgagctaaatcacggtaaacgcagacagcaaacaaactttccgtcaaagagctggatgaaacctgggccggatggcaaggagacaacaccccaggcaggcgttccagatctttgaccttgcccctcctcgagaggagatgattgcttcatccctcctctcactgcacattgtgctgccagccctgctgtgtagtgtgggggctcaagactaaggcagtgcaccatttctgtggagagagatggatcagggagcgggggcttggatgagacccatgattcacctctcttgagtccttaccagactaagacgtcctcaagggccagagaccagcctgccactcaccattttgccaccagacacagatgagaacaattcccattaaaactaacaggatgaatgcccccaggatgatccatctatctggtagactagaagaagaccagtggatatctgaagcatttactggtgacactaaaaaaaaaaaaaaa

SEQ ID NO: 47718 - DNA, 2964 bp, Homo sapiens
tgctgtgctgggaggtctgctgccctcttcagagccatcaggcggggacatttaagtctgctataagcccctgattggggctgctgccttgtttaccaacatgccctgaccagagaggagaaatctggcagtctggccatagcagccttgctgagctgcagtgggctccgcccagttccaacttcccagcagttttgtttacactgtgaccttaaaaccatttcctcaagcctcagcaacggcagaggtccttccagatgagttttgtaatagactccagcagtcctactggggccaagacctcaaggaaagccaagtctatcattgggaaaagtcttagggctctaagttttgaattctgaaaatttttcttagaacaaaattttgtgtcattttcaaataaagcacaagttttcctcataaaacttagtatctgtagacccccttcccacctcacttttacagctgtcccatttgatcatcagaccctgctaccttagccagttcaggctgctacaacagaatagacaaggtggctgaaacaccaagcatttatttcttaccttcctggaagatgggaagtccaagatcaaggtgtcagcaggtccggtatctggcgagggccctctcttcctcaccagatggctgtcttcctgttgtatcctcacacagtggagagcagagacagacagcaagctctcctatcacttcttaatcccacatggctccactcacatgagttatgacttcctaaatagcatcaccttgagaattaggatttctgcatatgaatttggaaggcaggcaaacatgcggcctgtaacaccacccatatccgttccacatctaggttccctctgtgtgccgggcagtatgccagttaattcaagtgcatgtcagacccagagggtgacatcctgtgactcagatgctagggcccttatgatgcctggtaaggtaagtgggtctttaccactgtcctttcttaactagatggaacagacttcaaagaaagtaaccatggactatcggcagggctctatctctggggctgggggataaggggttgtctgctcagaggacagtgggtcaagcgtttgaaggagccgaggaatgcacattttttacatgtcccctatgtggttctctgtctgctaaggttaaagaacctcaattttgagggtgcacttccacctcttggtctggagaaggggtctcaaatctgtcctgagtggagcctgttctgtacacatccaggccctgagagtacacagagaggaactcactgctaccgccctgccaatactgctgctgtggggacaccagcgggggtgggccaagaacagagtgtatgtgtgtgtttgtgtgtgtgtgtgtgtgtgtgcatgggtgcttgtgtgtgtgtgcgtgcatatgtgtgatatgaccactgagtagctccttagcagggccaatattttctacaagtctgatgactcacaggaaggagcacaccaggcctatacttgggtcctgacatctgggatgccaacctaacactgaagaaaaagaaagagctgcagacaggctgggaaaaatatacagaaaggggaaaggggcccttccacctttgttgccctctgtggtcctgaatctcagcttggcctgagccaacctgaagatgggaaggaatagccattttccaactgcaaaatgtcagcttcaggcaatggtttcaaaactgaagtaatggttacatatgaagtagatttttgtttgttttgttttttgagaccaggtcttgctctgtcatccaggtggagtgcagtggcatgagcacggctcactgcagccttgaactcccaggctcaatcagtccttccacttcagcctccagaatagctggcactacaggcatgagccaccacacccagctaatttttaaatttttggtgtggagatggggtctcatcacgttgcccaggctgatctcgaactcctgggctcaaacaatcctcccccctcagcctcccaaagtgttgggattacaggagtgagccaccacacccggctgaaatggaattttaattgaagtaagaagcgggtgataaggaaagtgaaaccaataatttcacatagtccctggaagcccgttgctataaagaactttcagcctgaagtccaaagagagacgaaaattttaaaatgaattggactgcagttttcaatccctgaaaatgagtcacagcctttttgtggcagtgtgccctgggcttctaaccgtcctctccctgccccagctgccttgaggtcccggccaatggtttcaacactcaggctaggaatgccaaggcccggcagagcgaggctgtggaagccttggcataagcggaagggaggatctgagggagaatgggacaagagaagtcggaaagaaggagttagggcaggagaacaaggagaaatccctgtcccccaaattggagagaggggcgattgggactccagactggaaggaggcacggatccctgagtgcttggtgtggaggcagaggacccgcagagccaccccgtcctccctgccttatccagcgtccccgccgccacacccccagcatctcccccaaccccacttttacttcattatctgcccctggttctctcaccactcgagcccctgctttcctccttcactcccaaacatgcacacgttccctctgcacgggtgtttggaacaccagccatcccccaccccctaccttgtgccagcaggagatgtttgtccttctgccgtctctaggatggagaggcctgaggtgactgcttcctcagagtctctgtgcaaactctctgaggagcagaaaccagttcagtctctctgggtgtggagaggccggcctagcagaacacccgtccaccatgcaaaccgggtggggccacctgtcaactgtcacgtgtgagtgattctaggacagggtaactcgt

SEQ ID NO: 47719 - DNA, 919 bp, Homo sapiens
cagctagggtttcgggggctctggtttcttcttcccgagggcgagtagggctgcggagctgcatcagggatccccgctccaccctgccctctgcagcccgttggcccctccaccctcctgtggtgccttttccgcgctctttaaaaaccctcctggtctgcagtgcaagctgcagccgcaggaagcggacccagcgtaaaggagccgcagcggggaactccgggggcgggggggccgatgctcggggagatcgcgccggtccttctagaagctttccttcctctgaaacacgctgcagtccacagcccgccaagtttggccccagcccccgattaggctccagcccccgattaggctccatccccgaactcaccggcccgccctgacccggaccagccggacagcagtagcagaagcgggaagcacagaagaaacgcggggcaagcggccgctgccattggggacctggggcacaggggacgggagtcggggtcgaggcggatatgggcggaggaatcgcctggtgcctcacattcaggctagtgaattggaccgctccgccccgtccagccccgttccgccccgccgcaggctgggatccaaggggcgtgatccgacggctgccttgtttgggcatgctccaccccgccctgctccggggctcgtcacgtgacagcggccccggcgggcgaaccctccccctccacctcggccccgcggcttggtggcggcgtcaccgggctccgcgcggggcaggacacggtgccttccatgactgcctcgtttaatttttcaacacagcatttatcattaccccaatgtaaacactgatgcacaggaaggtgaagaaacttaacaggaatatacagtggcggcggtgaccccgtcaccgcctgcgccagcgacacaccccctccct

SEQ ID NO: 47720 - DNA, 691 bp, Homo sapiens
actgagctgggggcgcagttcggggagatctcccttgtccttccagaagccttccctcctctgaaacccgctgcagtccacagtccctcaggtttggcccccgccccgcttaggctccatccaccagctcaccgtctcgcctagcccgggaccagccgaacagcaggaacagaagcgggaggcacagaagcaaagctgggatggcggctgctgccattggggaccaggagggctggggacaagagatttaatcaaggtggatcctggaagatgaaatcacctctgtgctgaaaggctggcttatatactgttagttactggggaatgtaccggggaatgagtcacctcgattctgaaaagccagattttaatgctactgggcgtagtcactgggcgcgttccacctcttcgtttcattgtctggacgaaatccagtttccatgctagtgtcccttcccttcttcacccgctccggcagcttggtggcctcgtgcccgggccccactcctgccaggacacgattccttccacgacagactcatttaatcattatagcattttttattaatggtgaagaaacgtgcagaggaatattcagcggcctcggcgtctccttgtccccgcctgggtccgcggcactctccctccttccgcttgcgccgcggggtccctggctcaccccgccctgggc

SEQ ID NO: 47721 - DNA, 1050 bp, Homo sapiens
tgctgttgctctacaaagggacgggacttgacacagagacagagaactcacggccagcaaggaccaaagtgccttcagcctttcctttctagaaagggtttgctgactcctgtctgcttagtgactattctatatgacgctggcgtcacccatgtcttgaccccagctcgggttccgggggctctggtttctccttcccgaggacgagtggggctgcggggttgcaccagggatcccctccccacctcgccctctgcagctttttggcccctccaccctcctgcggttcttttttcgccttctttgacccccctcctgctctgcagggcaagcagcagccgcaggaagcggacctggcgaaaaagagcagcgaatcggaactgagcgtgggggcagtccggggagatcgcgccggtccttctagaaggcttccctcctctgaaacccgctgcagtccacagccccccaggtttggcccccgccccgcttaggctccatccccgaactcaccggcccgccccgtcccggaccagtcgaatagcaggtacggaagaatcgcgaggcgcggaaggatcgcggggctggcggccgctgccattgtagaccaggagcgcccgggacacaaggcgcagtcgatgtggagaccagcgtatgaatcacttcggccctcgcatgccagctagtgattgagtgtgctcggccccgtccggtcccgtcccgccccgggatccaggggagcctacgcctgcccacgtttggagggatgctccgccctatcccgccccgtcccgcccttccccgccccaccccaggctgggacccggggagcctatgcctgctgtggctccgcttcgtcccgccccgggctcgtggcctgacagcggccccctctggccaacccttaccctccaccccaggctccgcgcgggccaggacacgattccttcttgaccgcctcatttaattttttaacacaccatttattattaccccaatgtaagcactgatgcacaggaaagcgaagaaacttgcacagggatatccagtggc

SEQ ID NO: 47722 - DNA, 1331 bp, Homo sapiens
aaccctagggctgttttcacaaatatgccatttaaaatgcatggtgccaaacctctttcctgaacattttcttccagcagatctgagttggtgtgtggaaatctatttaaaaaaaacaaaaacaaaaacaagttcttcaggtgatctagctagatctagcacatgcaagttcttactcagattctggcaattgttgtctaagaatatatcgacagagtacatacttttaaaaagttaatggactggtgtataaccaaagccacaacaccccacacatgtgactgtgatctttgctcctttgcaaagtcctcacagagttgaagagttctgcactttgttccttccctggcacacctgtgtctgcattccttctatctcccggcattctccactcctgtctctgtgtgtttaaaaaccggtgtgggaagtgtgcacgcctgtgacgtcagactccagaccatgtatttcctgactcccatcttggtagccattctctgcattttggttgtgtggatctttaaaaatgccgacagaagcatggagaaaaagaagggggagcctagaaccagggccgaagctcgcccctgggtggatgaagacttaaaagacagcagtgacctgcaccaagcagaagaaggtaaagacaccagctatgctgcttagcttcgctgtcgtgttgtgttgatgatgagtgtgagtcaatggcagggcttatggagaggaagaaacacacacaggccagcttcaacatcaacctctattgtgctaatgaatcagtgcttggcacagacaggtcatctctctccagtgatgagcttgtcacctgctgggaccaacccttttttatttttgatgcccagtgaaaaagctgttgagaggctgaagttttccctggctacaattctgttctggttgttaaaatctttctgcaggaattcatcccaggctggcagtgggcagggactaagaggccaggttttgatcaggaactttgaaatctaccaagtggcatcacctaggaggctgctacctttccctgtgccaggccctggaagtgaaagcctgggatggcctctgtcctcaacaaactgaatgtccagttcagctgccaagatgatacactagaatcagagagagtaacaaagagacagacccggtggaactgattctaaggtgtttagagtaggcctgggagtttgacggtgcagtcagggaaaggacaaaccaggctgggaggatgaatagggtacaaatagcaagtgctgggaggcctgtcaggcaacaaggagccaaaggagcagaagcacctggaggcctggggcaggggtaag

SEQ ID NO: 47723 - DNA, 787 bp, Homo sapiens
ttgaataatccctagtggctccactgctctagagtgaaggcaggaaaacaaaggggttacacagtctgctctcttgcctctggctgagggccacattcctcgggagcagtcaggagttcaagagaaggggacaagtggaagctcactgtgctcctagcccagccctgctagtctcattccccagccatagtatagaccttctgccctgtgaaaggctccaggaatggcagcccggctgtgcactgctccgagagtgcactcaggacaatcccatcaggaggtgatgaggatcatttgtttgaccattccctagtcagggataatggttagcactgataatgaggtaacagtttgcttccttctgctaattaggagagtctgccttggactctagaagctgtggaaactgccaagtcatgcatttagactgctttcagtttttacaagtgctgaatgggtcttaagacttagtaacttacctttcaaagagttaaggaagcatttaatgcatttgcttatataccacttattaactacagaggctgccagacttcatcttaaatggtgtcaaaagtatcattggtgttgaaagtctttattgacaccttgataaagttcagagttgtcactgtgacgttcatgacattggcatttcgctgggccaggactgattgttagaaagttgatagatgtttattaccactcccccatcacacatactttcttctaaataggcccaaactgtccctgctagagaaatataaaaggaagtttcctcactaagagc

SEQ ID NO: 47724 - DNA, 3094 bp, Homo sapiens
cactccagcctggtgacagagtgagacgccatcaaaaaaaaaaaaaaaaaaagaattccccaactgttgtgtgtccccaaggacaaacctcacagtgccacactcatagctttgatacagggaccaaacactgtatagctaagttgccttttgaagagtgtttttaaaaccatcttaccatgtacattttgcctccttcaataaccttcacaactttattctttttcaagattactaaaacaaatgacagtctggagaattctggctgtcaaaatttcccctgagtttctttccttagtaggcatggtgcagttacttggggacattttcttccatgtaattagagaagcagaggtgagttcccacaaccctggaactacagagcttgatcattgatcagttggcctgacgctgaacaaaacaaacttggcagcagcatgacagggttcactgccaggcatttgttttccagattatctaacttcattttgagcaagtatgaattatttttgtttttatttttttgagacagagtttcattctcgtcacccgggctggagtgcagtggcaccatcttagctcactgcaatctctgcctccagggttcaaacgattctcctgtctcagcctcccaagtagctgggattacaggcgcccaccaccacacccgggtaatttttctatttttagtagagacagggtttcaccatgttggccaggctggttttgaactcctgacctcaggtgatccacccacctcggcctcccaaagtgctgggattacaggcataggccactgcccctggccaagtatgaattactacgtttatccttaaaaaaaaaaaagtttttttaagagacaggatgtcactctgttgccaggctagaatgcagtggtgcaatcatggctcactgcctcccgagctcaagcaatcctcccacctctacctcccaagcagctgggactataggcacacaccagcacaccctgctagttaaaaaaaaaaaaatctgcaaaattttgtttgatcctccagctccagcctcccaaagtgcttggactacagggatgagcctctccttaattagcagtctcacactttcctgcagttttaatttctgattttaatggaatgggtgacaggaacagccccgagtggggctcacacagagccctggaccttcgtggttgtgaaggacccagacgtgaagcacaagattcgaaagatcattgaggaggaagaggagatcaactacatgaaaaggatgggacatcgctgggtcacagacctcaagaaactgaggtacaaacagtggtggaactggggatgtttgccttggcctcttaaaataaaatcaccaccaccaccatgtcctggctttgttgtaagcgtgaaaaagcttgattctattctgcctcttggaggaattacggaagttaagtccgggctcactcctgtattgccatgtgagcgtttggtaaataggctctgactcaattatttgcttagtaaataattgaggaattacttcacttttcactcgtctggaacataaaatggtaaaattcttctcaagatcttgcatgaagcaaattacattttgctaaagtgatcaggtcttccaaatgattttactaagcaggttttagttttaggacaagtttaacacaagtgtagttatctgtgaggccttagtaactttttggcttcctcaactccaggaaagaagtggaggggaattcagtgtaagtagtttctctgtggtccctcaacaaatgcagccctcggggtctgctccgggcgccgaagcacagtccgcgtgctctgtggagggaatggagagtgttggttcatccagtgagtcaggaaagtggattacaagtggctcctctgtgttgatatttccatgatttgaaattctgatgcttggctttaagccactttatgtattttaactattttcacccttgcaataaccacagggggtgggtacacaagagtacattttatagaggaggtaacagctccaggggaggccaagtagcttgcccagtggccaagacagcccagctccagtgcagatcttctaaagcgttaccattttccctctttatagggagaaaagaaatgataatggtcaaatgtgactaagctggttgaagtatggttaagtagctttgaaagtgtaacatacagatattcatagcgtaagaggagccatggagaaatacacaagtgagtttcgtgtgctttggaatgaggaagcataaccaagctagaaatgaaatgaatggtgattgtctcttgctaatgaatgatataagatatcctaaggtaaaatcccaatatatgggattatatgactctctgtcctttgactatctgtgctagaataaaacttctgccaaaatgtgtgggccagggtaatgaaatcaagaaagatattctgagctggaaaacaaaaattcagttctgcatttacaccttacatgaatgatctccctctcccacagaagttcccttccttttttctataactgggtgaacagcattgccatctgcccacctgtgattttggctaaacctcactgccatccttgccttctcccttgctgaattttgacccagtgcatgctgggtaataggacctgcccttgtatctttcagcatttcatatgtcttgccatactaggcacttattaagacatgtttatgaaattgaatgatcctggtcagaaaaagtggaatgagacaaaaacaaaaattctgcagcttttcaatttaaatataaaagatgagtaaatatgtttttatttttatcataaagaagctaaggtagtaaaagagaacaaaaaatatgggcaaatattatcctgaatctcttttctcttcacagaaccaactggattaaagagtacttggatactgcccctattttgattctcattttcaaacaagtacatggtttcgccgcaaatggcaagaaaaaagtccactactacaatgagatcagtgtttccatcgcttgtggcatcctgctagctgccctgcaggtatgttgagacatcaagggttacagggtggccttatta

SEQ ID NO: 47725 - DNA, 684 bp, Homo sapiens
ggagaacagcccccaaagctaagatcctgccaagctaaatacagtagttctaatgaaatgtgagaggctataatcccatttgggaaattcctaaaaagtcatgaggcaggggattggtttatgttattatcatgacctgagagtcatggctcagagccaaatgttcaggattgaattcaacagcatttaaatgtctttagagcaggatggaaatatgttagcaatgcctgcagagtgccaagtaaacgcaaaagccaatgagatcataaaggaagttgttagctaacctaggtggagtcgccaacttccttctactctaataattaaaaataaaaataatacttgggaggtaactggaataaaggttctaaaatcaaaaccctctgaagggtgaaaactgggagcctcctgttcccatagtaaccacagcactcagggcactgtctcccagcgctggagtactgtcttatgaccagagatcctaagcaacctctgctcatctgagttgtccaccatattgtgggcatgagtccttgacaatagtaaatagcacctctgttcccttattgggtaaatgattttccaactctgggaatgtgtagaattcattatggaaataatgcaataattcaaatccataatattgatactttcatgttaagtttaggactaatcttgtgtatg

SEQ ID NO: 47726 - DNA, 2525 bp, Homo sapiens
gactgcaacgaggaatgatgtcttttcctcccggatttcaaagcacccatgtgaactgcagacgaatgaacccatctcactggaggtgcggtgggacactggcacacagtgactagtgggtaggagcatgggccctggagccagacaacttggccctactcctaaatggtgatcttgggcaagtgtttcaacacctccatcgaagatctacatctacaagtagacaggggaaagtgatcacaatagtccctacttcatggaatcagtgtaaggattatgaagttaatacatttagggatcttagaacagcacttggcaaacaatatgaggactgtgattttgaaaagattcctaaatggtcctgtgtactcagccgtcttccagcaaggctcctcagaatagaaaacctgctttggcatgcctccatggggcagtatttggacttagggatcaaatatcatcaatttttagcttttaatcaaacacacactatttctagcagtaagagtcaagtgctggcttggcatcctgccaagtgtcatctggcaaggactcaattaaactagaaggaggaagtaggaaagacaaaataagcccccccactttgtctcaaaatgtcatttcaaagactgccaggctcagctgctgccccagcacaaatcagggttaatgtcctgcacctgcagaatcagggccctgccaccagcttgtgacatggccacccagcaccaggccagggtagcttgaaggggtttgagtgcattggcccagtcatttggttggcaggtcgggccagctcctccaaagcccatgacactacaaattggtttctcaggtagctttttccctggttcctgtgtggtctcttctttacctttcaaagttatagtattaatttctgaaagaatgaaaattgggctagtgatcccataacaacatatattcaccatcaaaacaaaaaatgactctatgaaatatacgagatccccaacgtatcaagcaaggattcagttcataaaattgaaatggggccttatgaaacttttatcacagactctttgtgaacttagaagttaggggacttctgattttcagttaggtgtttaaatgtaattaaatgaacacttctgcaattcccttaattaaggactaagggaattaggtgatttaacttatgccagttttcatccatgcgtgatttttttcccacgttgaaagcaaaacccagagtttcctagcttagaggcagaaactcaaccagagccagcatgaactctggcagtgaccttagaagcgggaaattgtgggggaggagctggagagaaaatatagcttaaaagagacaggatgtccattaattaaaactaatacaggacattaaaatgaaagctaatggtggtagctttaattccttaagacttcattcatatctaaacatgcgttttaatggctaagtccatacttgaggtactatgagtatttgttaattgcatgaatatttcttattttaaaaaatatgtctactttcaagaattaagggaggtggcactattaaaacttgtttaaaaaacaaaaaacaggcgagttaaaaacaataaggaaggcaagttctaataagctatttccctttttctggcacttgtgtgtgtaaatatataaaccttaattcaagaggatcacatttcgttaagttgtctaaacataagctcacttgaaaatagcctgagtgtggaaaggctcttctaaagaatattccagtgtttgttcttcatcacttaaagctgcagtcttaattttaatatgacatgtggcattccagacatagaagaagccatagatcatagccatggagataaatgactcacttcaaaatgataaattatattgaggtattaaaacttctccaagtcttacatacaaatagatatgatttaaaaatgccattttcctttttatgaaccatatttcaatgattgatcacaaaaagaaagctggaatatttagccaattttcagatctatctttttcaaagtcaagtttagaatggagagattctgacagctcattggctttcttctatataataaattatgtgtgctcttcactgtttctcatttggaatcattaattcataaaatgaagccttgaagtgagacttctttatcagacctaaaaattaggaagcaaatacagataaaaactgctaagtcaaccttggccaagattctttaatgagggaaaaaccagccatctcaaagactaatgctgtcagccactcagagtggtgagaagcctcctctacaggagtcagaagaaaacctttgtgttcctcctctttgggtaacatcagccatgcctgctttcttcatttaagaaccagatgagatcaggtatattttgaagccataaagcaccatttacatattagatgtgatagtcacagtgggaacagaaatattggagattcaattcaaactattcttattcctaaaaaataacccaaagtatgtttctataaaatggag

SEQ ID NO: 47727 - DNA, 609 bp, Homo sapiens
cttcttgggagacaatattaatataagcaatcatataacgtgtgtcttaagaacccaacaactacaattataatatattagttgtagtttgtaaaacagagcactcttcaaaaatcagtctataaggttgaatccaaatgacttaaccatgggacacaaattgttctgtgaacttgctctaaagataaattgttggactgaaaagatcagaagattgactttcatcatctaataaagaacagaaatggaaaaaaatctatttttttcacaatggctcacgtgtcttagttttgattttcaaggcactagtttcagcagcaagacatagtttattcataggctttctaagggtaaaacaaatagtgtgcagagtttagatcaatataagaatgactcacttgacagatatttggatctgtagaaacctcagccctctggttcagatgctccaaacccccatgtaatttttccctctaagatccgtaaaataactgtcacgaaacccatcctaaagatgcagaacaatcctccacaacaaaacattcttcaaacatttactcagagttagtttattctattttaccatcaattctaaaaagcacacttatt

SEQ ID NO: 47728 - DNA, 2468 bp, Homo sapiens
cattgacgtttttatagatctacatgaagtgtgcagttattcaaaacaacttgtaacataaactatgactattccttccctggagatctggaggctgttttctaatttttcttccctgagtttcttgtggctctcgtactgtgattgccattgaggtccccgcagttgagaatgtgagtggctcagcagggaactgcacagaactggggatacttgcgagctgggaacaaccttaggtgggcactggtggcctccagaacgcagatgagagagcaggggattccaggtagaggaagagagatcacaagctggtgtggctgggctccaactttaaagctaaaatgatcaaagatccccaaaatttcagagcaagaaatatggggaagtcaacgttattgtgtgaataacatcagcctttggttggttgatggatggctattgagtttgggggttcttctgtgatcttattagttgctacagatattctcagtatctcttagcaccttgtaaacagaggaaagagaagcctgcatctcctctcctcagcagataaacatctggggacagtgacaaagcccacagaccctgatggtgtctttgatatacagccacaatacgcattttgacaccgagtagatgcttttagatgatgaaatcagtggtttgaattgaggcatttgtgtgaagttcatgagctttcatgccatgattggcttaagtaattcagaactagctgcgtgtgggtgccgtggaaatactctttcaatctctttcttattgggccatttttgtgcaaaagaaattgctgttttaatggcaaaaccagcaattacttttgcacctacccaagagttcatgggatattcaaagcaattttccgaactgtatcctccaactcgaggcagttactgtgaaaccactagatggcacagtcatgctagatgtaatcaagacttcagcagaaatgaaaaagtgagtcttgctagattacttcatcagatacttaagctgtagtttacttcccctctccaaaatttttctacgtgttagtaatttatgtcttccagatcgtgtaaatacagatgtgttagacttagtcatctaaatcaattgttcagtgactacagccaaactataaaaaatgattacttctctttgttttcagttcaagtatttttactattcctttgccacacatttatttttcatacagttacatcagcgccctgggtcccttttcttttgtacacatagtgatagagagggaaattactcatctccaacgtcctggaaattgttttccagcgcataaatttcctagccctctgaaagatgtcaatcattttctttagcagggcattagggaactccagctttccgaaagatgttaggaaagaaatgtcatgtccgaagacacaaagtaaatgattactttcttcacccagctttatttgtcatttgtcttaaaaaaaaaaataggagaagtgttttattcacagtcagaggctagggcagcaagacaaggcacgttagtgaggctgtaaataccactgtgtccacgttcacttaacacaacgccatctcccagcgcagccccagcccctctgcaccccccgccccactgcaccccttaatgccagaaacactcaggccccccgaaagtttagtagggctgcatttagaacaagtccagagccaacaaaggaaaatagtggaagacacttaggagggagaagagagaaatgaaatttatttagcccgaggtccccacgccatgaatgtggccagcagggggcttctcgtgcggacgctcaaagccggaagagccagcaggcacggaagccctcgtgggagccgggagttccatggcgaggccccccgctgctgccccaagaaacgcttgggtttgagatctcaggaaacacggagagcccccactgcgatggtgacggccctggagtgggtggtgctaaggaaagggcagcacacccttgagggcgggaagtgaatggggtgagagttggcactgctggccatgttttcctccatttccttatgggactcagtttcctcaaaggaagaaccaaaatgaataaagtctgatatggtttggctgtgtccccacccaaatctcaccttgaattgtagctcccataattcccacatgcagtgggagggaccccctaggaggtaattgaattgggagggtgggccttttccgtgctattcttgtgatagtgagtaagtcttatgagatctgatggttttatgaagggcagttcccctccacacgctctcttgcctgcctccatgtaagatgtgtcttggttcctcttcgtcctctgccatgattgtgaggcctccccagccacatggaactgtgagtcaattaaacttctttcctttataaattacgcagccttgggtatgtctttattagcagcctgagaacagactaatacagaatc

SEQ ID NO: 47729 - DNA, 970 bp, Homo sapiens
gtgttcagggtaagcctcattcagaaggtgacatctaagtgaagacatgaatgaggcaaaggaactagtgaagaagatacccggggaagagtggctcaggcagcaggacctgctacagcaaaacccctcaggcagtaacactcctggcagtaacactcctggcaattgggtgacctgctcatcccatctgcctgggactttctgggtttacaccagcagatttcaggtgcagcattttggccagcatagctgggaaagtaagaggaggaagtaggagaagaggtcatagagattacagggagggtggccagattaggtaggaccttgtagaataaagtatttggcccgagtaaaatgcggagcagagcattgatgggacttggtgtcttcttgctctccatctcccttcctgctttgtttttgaagcactgatcacgctgtttgtctatttgcttgtttattttctgattccctgactgagatacgggctccagagggcagagggtgtctatgttgtgttcatttctatgacctcaatgctgagaacagtacaaggtgcgtagcagctcgttaatgaatattggttaaagtgaacaaatgggtgaatctggtataagatccaggaatctgcctgaactgcctctgccaactccctaccccctctcaaaccaggagccagtgacttggaagctcttttctctttgtcgttgggaggcaatgggaccccaaagcacctggcaccctggtttctcctccaagagtacctatctcgatagattgatttttttctgagtagtgtctttcaagacaaaattgcttctctaatgccctaggcagttagacctgagccattctcagttatgattgcagcatagatttgtgctcaaagaaatatccaattcacaaaaactgtcagaaatattgtatgaggctcacttgaatctcatagcaggatacacactcttccaaa

SEQ ID NO: 47730 - DNA, 923 bp, Homo sapiens
gccattggccaacagatgtgggagaacaaaggcctgggccccttgccaaatggggacatctctgaagggtcatcccaacttcaaaactctctggggtcagctgaggctccatcgagactatatggcagctcagagttccttcctcccttcccctccccaggtggtgtggccaggtttcagtccagaggcaggcagagcaactggtccagagtgagttcactggggtccagaggttttggctgacatcatgctgaattcagctcattcaatgtaccacttacagtagctccacgactctttcactatccccaagatgggtaaaatagtgcaatatccgcaccttattttacaaaaccttcaacgagaaaaaaaaagattcaaactctttgagataaaggtagtcaaatgtctaaccacaagtcaggatgtggggattttatctgagtcacttaacccagttagtcattaacccagtttgccaagcgagcttaaactatctccttaatagaaataatatggaccctgtgctagccctgggcaaatgtgaatacttgagctctaacctaggcttctcctgaacctttgaagaccccaagacacatttggtcaggggacataagtgatgtttgaaaaagtccttcacatgtttagttgaggtcatgtcactaatggctccagaacagagacctcagcctggtttcttcctggatgtggaaggttgcagccccctgccccctccccacgttctcagcaggtgttcctgcattgctctatttcaggagtttaggaagcctaagaaatacgtgtgtatccagctctgttttcacaacaagggtcaaaccaaaaaaccacaggtcaaaaggaaccaggaaaaggaaaaaaaaaatacactttatccataaaatgtatttttaaacatctgt

SEQ ID NO: 47731 - DNA, 940 bp, Homo sapiens
aggtaatgcatgtaaagtgcctagcacagcagccagaacatcgtgagccccccataaatgctgactgctatttttactgttaatgaggatcttaggattatgctgaacttggacatctgtcgcaataaggacttaccacctctcttgttggggctgggatgtaaggtacatttgacacttgaggaatgtggtgattctcagaacagaaagggagagaagtacatatctgtgagtgtcctggaatcctcagaggctatgtcattagttacacatctttttctccatgtaaaatgtggatctgtgcatgggctcattcttgagctcatttactgagtcaataagacttgtttactttccccattctgctgtggctacgtactttttgcctttatattaacaaacccccttcacctcccccagcatccagtaaccttcctagtcccacctgagtcagatggaaagggctgttttaggccactaacaatttagtgtggattaatacaacatgttagccttcccaggggtgtttacctttcaaaagagaatgcatgggagagaaatagaatcttttgattactgtatcaggagaatgatatacacatagattatctggatttcagcagcgcagttgacaaaagctctcaaaatatccatgtgaaagagatggagaaatatagactggaaggagcccagttctgcttatgatcagttcaatgcccttgaccaaaaaatacttattaacaaaataaaggtgcaagagagtagtgtccttggaaaggggcactgggtcacatcctggtcaacacttttatcagtaacatgaatgaaaacacagatggcatgctgaacaagctcacagatggtggatttgtagctggtacattttgatgatcaagactattccatgctcttatttgacataagggtgtggtttaatggg

SEQ ID NO: 47732 - DNA, 878 bp, Homo sapiens
taacaaaaggaagagaaaaatggaggaaaaacccaagaggagcagagatttattatccttccagaaaacacacatccttctttaggttaatccctttccatgagaaaatggcctggagaagatgactggttaatttcagacacccttgacttccatttgtctattggaagtcagctggatggctgtgggagctggaggggcggagataaggacagatggctatcactgcttgcagtcttccgagggaggagccggtcctgcctgggcctacagttgtcagcactttcccccgctggccctgctgacactgttctgacaccctgtgcaccaccagaaagttcactgacccttcacaagcaggggtcataggtccatttcccagcgtcatcaggaatcactccaggctgtgcactgacccagctcagggagcagtggccagcgatgtcagccagcaggagcagggcagggccccaggcaggggggctgggggcaatctcagacgaaatcaaaaccttcattgcaaagtcctgggtggtggcttctgaggagaacataagaaacaggaggagggagcagtggtagaggggcctctctgcaaggggtgctggaggcgactgcagtgaggtgtttcctggtgagtgggtcagatcagctcacacagtggggatgagctcacagagagtgggctgagagcagaccaggagtgcacaggtggctgccctgtcagccttttccgggagtggtggtggcgcttgcaacaactgctctggctttgtcccctgctgacccagtgccagcagtcttctgcatttaccccaagttcatctgcacccctttcttccccagccttacccctcgctcccttccacgagaggcag

SEQ ID NO: 47733 - DNA, 2240 bp, Homo sapiens
acgcacattctcttatttaaatcacatacagcaactctatgaggtaggcactatcatcatcatcatcatcatcatctccattttacagatgaggaaacagacagaacacagagaggttaaagcgttctctcaaggccacacagctagcaagtggtaaggctgaaggtctgttaacaactaagagtgcaatcaaatccaccaccaaacctaagggggtccacaggcgaccctgatacgtccgactttggcgggagattagtgttaagaaatgacttcacatgcctttaactgtcgctgcaggcacctttgattggagtcataactttactgcagagccggtgcctttaaacatctctctggctgtcaccggttattctttacctccgtttccacttttactttctctaggcaaaggtcgtttggtgctttaaccgaggtgattagggtaatgacgcctgaagaacaccgggcttccccctcttttcacttgattaccggcaaagcttctatgtaaaactagaatgttcactaaaaccatgattttgggtattattttaaaggactcacataggaaattattacgtccaaaggaaagctaaacctgaagagctaggaaaatgaaaaaaagtgatgtgtctgcgaaaacagtagcagaattaaaaaaaaaaaaaactttattccccccgaagctgtaatttgactgttctctttggcaaggctccagagacaaggccaagtgcctaatttctctttctcttcgcccccctcctctccacctttttcaccctcagggcagaggggaggcgggacgagcgatccactgctccggccgccgaagctggcgtctgggcgcggggaggggcgggccggggcgcggccgagcagtggggccgagcccgaggaagaggaagtcggagcccgagcctgagcccgagcccgagcccgacggcggctgcagggcgctccggcagcccgagccggcgcagcgcagcccgcaccctccccgcccgacctgcgagcgccgcccgggcatgcgaagccgtccctccccgggtaagcgccggtcgggcccggacgccctggggacttttccagggatgggaggggggacccggggacctccggcgggagccccacatccgcaggtggggccgggcggagcgtggtacccgggccccgccggccccctgcgcgcccctccgcagtggggacggagggccttggggggcgccgagcggtggggacagagggcgccgggggcaccgcgcggtggggacggagggcgctggggggcgccgcgtctcgggggtcggagtcgggtcggggatgctgcccgccgccgccccgcttggggttccgcgcccccaagttcccggtgctcccgcccctcgccccagcggctgcaacatcagcgcgcagaggagtttctgcgagcacccgggagttgtagccaccgcttccccacccccgactcagcaggacagccccagaacgggaccccacagccagtcagctgggtcagctccccagcagcgaagccgggagcccgaggacccggggacgcgcggtgggggcggcggccgagctgctgcggcgctcagggcttgggggcgcccccgttctgcagatgcgcttttcagggggtggggagtcaagagcctgtggctcttccgtcacggggtaaacggtaacacctgggcggccgcgactctgcgagcgttctggcctcggcgggcggcggggaaccgcagtgatgcccgagctcgccccttttgtgtcctcgcggtgagccccgttccgaagccggaagcttgggaacgctctaactgggagaacggcgctcggctggtcaattcattccgctcctcggaaacaatgagctggatccttgacttgaatgtgctggcggagcggggtttgtaagccggcgtttcatccagctctggtcctcaaggcgccctttgtaccacccgcaggtggccgaggctactgcacgtattttcgaaatcaccgagtgtgggtgtttggggcaggtatcaccccgcgaggaccatctcagactgagagttggtttaggagttttgaacagattggatacagaactatattgtgttttgtatttagaccgggggaaagactagaatgttaactctagggtccagtttgtcatctaacagaattccgggcttgggtaggtcctgtaatgcggtacaataacaaccaggtgttaaaaccggcat

SEQ ID NO: 47734 - DNA, 1042 bp, Homo sapiens
tgttttctgccctgagtggaattttctgttttactgtaaattgctgctgctgtttaatatgtgtatatttttcttggtataaatttcaaagaggatgttgacccagtagaaaaccccttcactgtaagaagagcagaaagtggcagcattccacacataggactgcagtcctggtttctctttagattcctttgagatcaattttcaaagagtcctcagcaaatggacatttgttttgggatggtatgtagataggaaaacacacacacacacacacacacacacacacacacacacacacacacacaccccgtccttgccctcctgcactgaaccctctatatctggattaagtattaacttgacttgagtgaaaggactcagggttgaattcatttagttaaatggagttggttaatattctgcccgtactattaatgatgttataatctagcagagaggataaacaattgcacaaattacagtattcattgtactatcctgtagaataagaacctgtgttgtagtaatagccccaggtaattcactggttagagaagcactactccaggtaagaatgtagtgctgtcatccacatgcaaagataatgaggctttgcagaggactggaatgcaatggaaatagagaagttcatccacgagcaagtgagtgtgtgcatatgtgggatttggggaaggggacctgatgagagagaagaaactgagggttctagcctggaagactagacctccattggccacagtggaataaacagccatggagcctgtttgggtgtaaagggtaggattcgccagcagcagtttagagtgagagatgactttggtacacacaggtggtgtgtactttggccagtctgaaataaaggattggacagaggaacacattgctgcttgaagcgatgcttctcacagccatttgacagtatctgtcaaggcctcgaagggactctttgactcatttttcggatataccctaaagaaataaacctttctggacaccagattctacattgcggcaacat

SEQ ID NO: 47735 - DNA, 1022 bp, Homo sapiens
aggggaacagagggtaggacagagctgggggaggagaagaggatgtgggctagtggagggctgcgagcaagtaaggagaagccccagggaactgggcatggggaactgggcatcaggctttctagcggcctccttcctgctagtgctgtcctgccccgggggctggctggctgcttcctcggccactgccaccaacctgtccaccagagcttctaggctttctggccttctgagagaacagtctcacaacttcaggactctggttcctacaacaagcacgcggcatttggcattttctgaagaatttttgctacaagtagcaaaaggtcaacagtttaaaatttgctcctaaaaatgtgcatgtcgtaatgttcagtgaaaaaaggaaaaggtcagagtacacgaaattgtttaatctccattctctattataaacacacaagcaaagctggaagaaatcaccagggtatgggccacgattgtctctggcttacaagtgatggtttttccttgcttttctttattctctggactttttttaacagtagggagttgtgatttttataacttgaaaagtaaatgtaaagatttcttccaaagtttgtctttttgtctgcttttatcatcggccttggccaaccggacacacctagggctgctctcagggccttgggtgtctatggaggacagtcagacttggtggcctgggccttggtcctgggcaaggtgggcaggttggagaggcccccaggcgagtgttgcctgcattggccatacccctctacctggcctctcccgcttcctccatgccctgttctcaacaggatggcaggaacacatgcaggctggtaacaaatgtcctagggccattattcaggagcaaaaaacaaaggagagaataatttcacaaacatctattcttacatgggcagtcttggtgacaggatactgatagttaaaagacaaggaatgggtaattgaggagaactttaacttcaagtgatgttttaaagaatacttta

SEQ ID NO: 47736 - DNA, 2044 bp, Homo sapiens
ttacttctccgagcaaatagaaatcacttgagaacacacagggccatggcctgccaccacatctaccaagaaccatcatgttcctgcctttgtcataacagcaaacgtgtccccatcttaattaacactggtccctgggtcctcattcttcctgtattttcagggatgctttggcttactcttcctttttcagtattttctaccccttcctctctaaaagatctatcttgtcaccatttatatatcatccggactctcccacgcaaaaccctgcttggaatacccacaccacgctagctctttctacttccctcctctcaggccttgtgtaagatacatggtgtttcactcgtcgccctgaactgtttccactttagcccttacaatttcccaaaactgctctcactgacctcatgccactaaatccagtgagcacattctgcttggttattcatttaacaattatttgtgagcatctgccatgtgctgggcatcgggcatgctgtggtacacagagaaatggggtctcctgtggtctaatattggggacagatgttaaagaaatacctatagttgctgaatatttagatcagaaagtgcaaatctaactaattttatggcaggagtactatatgtcagttgtttagtgggcactaaatgtcagtttcatagtgaaaaacttgtggctagagaatgctctagcttatctgtgcactacaagtgtcctgccctttgatctgggcttaactccacacacagccaaatgcccccactattagaggctcttttacgttttatgtagtgaagatatcttggctgaacatgcacataaacagaatctggagaaatattactctgttcatggagttagaaactagaaaccatacatatctatattctaaataaaattattctaaaataaacaagtttaatatagtctaaactggcaagatagattgacgaaaaccctgatggtttctgtgaaggaaagcaaaaatattgtgcaaaagagatgatctgtgaagttcagactctatgaaagatttttgaaatggtaatcatattcagttttgaaccattttaagatcagcaaaataaccgtgtaagcacatgttagatatgctaatgaaggtttagtgaaagtaaaagttttctcaagtccggattgaaaatggcaaggtgtttctgcatatgtcagttgtctctcttactttcctcatgggctacaatattcaatatgaacagttcccctttttttagaagtaaaaatggtccatgttagcaaaaccaaagatttccaggaagtgctggtggctgtggtgctgtggaacgtgtggatgaataaatcactgtttggtagtaagtgtaaaacgttttattggaagccagcccttcgtatccatgtttcctttttccctcccctgaaactgaaagctcatctgaaatagcctcaggatagatgttaaataaaaactctgtgatatatttggaagttctctttttaaaaaaccaatatgtcaaagcctgttttacttgactgatgtgaaaaggcaaaaaaaaaaaaaaaaaaaaaaagcaaaaggaaattacctttctaaatagaatattttcaagtgatgtaagtaacccttttttttttcaagtgatgtaacacatttcccgaataaagtatatttttacagaagcctgggtaaaaaaaaactgtgcttcaccattaaataaatgggtgaatacaaattcagattttaaagttatctcctaaaatattagtttattaaataagtggcacaagaaacctaatgtcctgtttccccttattaaatctatttgacttatgagatagtacaactttggaaaccacagccagctgaattctgttcatttgagggaattttattattttaattaacattcattttcactgcttgttaacacattctgaattgcttgaagttattgacctagattgaaagaagctcttgaactctataaaaggtggtgcttataaaatttttctgcttagaaaatgttgctcagtttctgt

SEQ ID NO: 47737 - DNA, 1252 bp, Homo sapiens
tttatggctccctcaaagatttttcaactccctgtagtccagttccaaaaaaaggaatgatggttttcttggagagccaacagttccctttgtaagtttctggaatttttgtacatgatattttgagttcttctacaataaaatttaatggtccatttgagaaagtgtactcatattaaatgtagtgtctattattgggtagtctgagacaattcctgagtgctcaactctcctttgatctgtcgaaacatagtggttgccatggagtcttgctggccgatgaccaagtaggagttccacattccactcagctgggcgcagtgttcctaatcaggccggacctgaaactctagcacaaaggactttaaaaccggaatgctttatgtgtaatcactgaaaataagttgattatttgtagggcagagtatggtaaaggttaaaaatttcatgtttcacttatttaaattttgatttgtttctggaaaaatattttagtcttctgatgatatgaaatgtaaaattctctctagtccccctgctttgtacaaagtaatacaaaacaagatttgtcttatttgaccttaaatataaataaaatggcagctgaattattgtgagcaatgtagctcaagtatctggccgtcatctttgcattttattgcagtgatgactccatgccattgttaatctggatttatttttaaacagtttaactagggcctttttttgcaggcttttctttgtttctcccctacttagttctgaggaaagcctaaaataagatccctgtaaacactgatgttcattttttaactcaaacatttgcacagccccactgtgggttcaggaaagacaaaaggaggctcctgacttagatctagccctcaaatagagaggggagaaagccttgaagacacatcactgtagatagctgggatgtgtttttgctgtacagaatgagtaggagtgaggagaaaagatgacttttgcctggatagatggggggttgaagaggcttctgagatggtttttgattgcctaccgaggtcattctctgacctagtttgatgtctaactcccttataattgcatcagcttgaacccataaggcttcagtctgtggggagaattaaccctttagctaatggataaaataacgcgacgttctttggggttaaatttttgcctaaattacttttaataccttactcgatgtcaaagttactggaactgtgtatttagtcctttcggc

SEQ ID NO: 47738 - DNA, 1790 bp, Homo sapiens
tccaatttagcaaggaaaatagtctgagaaaagagaaataggtatgcaggtacatgccccgcctcagccctcccacacgtggtcatttttgcttgttgaaaaattagactttaagtaaaaaatgaagcatcgagaatgatcactcatataaaggagactgtgcttttatgatattggcctttctcttctgttgattgactttattcctattcttcatttttatgtttcctgttgtctgtttttctcttgtctcacctcccaagctttctttccctgggcctcccgagggaggtctgataacgcaagaaggatgagaatgtgggcgggagatgagggcgggaggaactgcccggacctgtcagccttgggtgtagcacctgcaaggaggacatgattctcctgcggtgacagcctgaccgggccccccacccaccaaggcaggaccacggcgacctggggagcatgctgccagcagctatggtgggggctttggtcagaggatggaggaatcgaagctctcctcaaagggctgagtcaaaacttcttatccgaccgagccaagatggaattgcaattcagggtatgtttgacaccttgatgtgattgtgtggccctttgtaaagggttcagagggtgatcatgagcttataagcttttctccaccttcaaatggaattgacaaatccagaatctgtttttttcctcaggttatcataaattgtgactaattttacttgtgggaggtctattttcctttcctaatcaaagacttcagtagtcacgtaataccttcagtagtcacatagtaaaagattattactaccttctttttttccagagcttttactttaagatggaattcttgttctgtggtatttgtgtttgcctagtaggatgaaaaaggtatactggcttttggcaaattttagtctaaattgcatcactttattatgtctggaatgggagatgtggagagtacttaatttctgggttttctcagtaattctttttattttctgttttgttactatcgttttgaggcaacaatagaactagtgacaaaaatatagctttcttgttaacttagttcaaagggttattatggcctttttctgaaataaattttcattagaatgaaatactttggaaatacctgacctcgttctcttctgtctggaccttggactccttaatggtacttactagaagggagctctttggtcttgccgacgatggacccatgggaggaacacagtgccagctgaggaagcaagtctgagcatagaagtcatagactcccaggggctctcagagctggcctgctgcccctccatgctctcatctgaccccacgccctgagagtctcctagggagtaaacacgagtgttcttgcatttcaacaaatatgtattgaaagcaaatatataccagacatttttttaggcagcggcatgctctgatctatagctaatctacttttaagaggtataaaaaacaaatgttatcatctgttttgtttggacagtggtttccagccatacttttcaggctggctatattcaagaagagtccagccaagaaactcttttgaaaatagcctgataagtattcactgcaaaatagtaaatttgtcatttaaccaggtatccaaacgagacaaggctgttctatgttcttaactgccaaaggatgagtgattatttgtaaaacctaggcattccgtaagaagtgcgaatcacagtatttaaaaaattaatcatctgattttgctcctttgcttctcagatgag

SEQ ID NO: 47739 - DNA, 1467 bp, Homo sapiens
tcctaaaggggtctttaaagaactccagggtatgatcgatgatttgtgcagggatgggatgtctggtaactaacagtatctaagcagacactggacacacttggtgagatgttgtaagtgttaattgaaacactggattagaaagccccagagtatctttgcaatgttgacatgctgttatcataggattatttttagtccatgcagctccccctagaaaataagtgtcataaaggcaggggtgtttatctgttttgttcactcttgtgtctttagtgcccaagacagtgcctggaacatagtagctgctcaataaatattaagtaattgaatatatcagcagatatcaaattcacaatatttttctggtataagataggctctaattaagtgtttatttcattgacctggatcaagcaggccataagtcaaaacggggctacaatttggcattgtatcaccgtgtaaaaaactcaggccagtattctgactgcatatgaagtcaaactgctatcaccattttagaccaatgattctggagttagtgtgacattgcatcagccggggacctggcaagaaactgaattagctcagctggttcaaacgaagggtgtatgtgaagcaaagagagacgacaacagtgggaagccttagccactgcttttgggacaatctatagggatccctgagggatcggggacaacatagagttaagggagcgcaagaaaggctggaaccatggaggagctgccccaaatcaatgagggagtggaggaaatgcccctatttccctctctttctgcttcaaactattgatgcctctagccaaacctacctggaaggcagccaggcagggagcggagtgtgcagacctttagacaaagcaagactgggaaagattgggctgggggtgtggcaggaacaagacctgccatgtaaattcattctgttcttcttatattttaaccacacaaataatacatattcattaaagaaaatgtagagatcaaaccaccagtcttcatattttagcttcttcctcttcctttttctcttctttcatttacttgtaaaggattcagtaatgtttattcagaataaacagaaataagtttggttacacttgtttcttgacctaattcccattcaacctgcagtggaacagagctctctttcctttcctttgttctgttaacataaacaagttacttcatgtacctctgtgggaactgggaattaggcaagtgtttagactctcaaaaactttcagcaagtttggctgtcagcttggataccaagtaattaaacataagatgaaagatgagtccgactgggcttattctctaagattagaaagtgaaccataagtgaaggcagcctaatgtagcttgattttactgtcaacataaagttgctatccacttttaattttaattgaaggacagtttgaaactaaggggaaagaga

SEQ ID NO: 47740 - DNA, 1875 bp, Homo sapiens
aagccagcgagaccatgaacccaccgggaggaatgaacaactccggacgcgccgcctttatgaactgtaacactcactgcgaaggtctgtggcttcactcctgaaatcagcgagaccacgaacccaccagaaggaagaaattctggacacatctgaacatctgaaggaacaaactccggacacaccatctttaagaactttaacactcaccgcgagggtccacagcttcattcttgaagtcagtgagaccaagaacccactggaaggaaccaattccggatacaaaatgtctccatgcatgcctcacctgcagtgccatacgctggttgatattaataataagacagattttgcagagcattgttggtgcgtatgctacccatactcctatcgaccaggcttgcaccttccagggccatgctttccagcctaaacaatcacagatcaggcccagactgcactccctgggagctttggaaaaagctgcatcaaaccagagcttctccccaagcccagcaaaccactcatggctcaggtagtccttcctggaagaccaaagtgttggaagtaaatgcttattccccgatgttacagagaagaatccgcaattagacaaaatgtttcctcaacaggaaactctttttactctttgcagaaagggtggtgcctgtcagcaatcctgccaggagtacccacaaagtaaaaaagatactagaatagttttgccttacacatgaggtccctattgctgtgtcctgactccattggctggagccagacctcacaatctaaactaaaacccgattggctaacagttcaaaactttttaaaataggtaaaggcagtgaggaacaaaggaaaaaaaggaagttgcttatgaaaggacttagaaaagtaataatattcccaaataagggaggagggtaggctgcaagctgggacatgcctgggcatgtccagcacgaatattctgactaaggtacaaggacatagaatgtactacatgcctgtgagcatgtttaacagatactgaagtcagagtatgcttattctgttacctttgctacataaggcttaacagagagttattactataaaataagaaacttaaagttagttttgagaaaagatatcaataacatttatgatttaaagggatttgaagaggaacttttgctttctacacaaagcctcctcattcattgaagaggaaaactcttggtggggacaagagtgaatttactttaaataccaatccactgactaatcccaagtctgggaatgcctccaaaatgttgagttgatgtattattatttatgtagaaacacccatttactgtaagtttccttcaaaacaaccctcgttgctgttgcagaaatcataggctgtgacgctggtagccacctacacattccttctagaacacgtatatttttccccaagatataagccctgggtctagggggttgtggtgcagagatctacctatcttgtagccgcccaagaccacgtttctgtttgtaaatttccctaataaatcacccagaaccacacattggatttctctgcctcctttggtttccaggctccttctgcatttgggggttgctgtgtaaatacagccctttcatggaacaaactcccatagaagtgcaaactgtgttgacccttgttttatccaagtgtcctgtctacatttgtagccttccagtatttgctgggtctgtctctttggcattttgggagccacataaaccaccaggcttcaagctgttaccccgggttgctgctcctctgaccatccttcctggttagtctccctcctgacccaccttctcactgctgctgttcttcccacatcttctgtctgcgtg

SEQ ID NO: 47741 - DNA, 2133 bp, Homo sapiens
attagaagtgttttggtctttatttcgaagtttaggggcgattttgtgaccacagatatgttgtaggaacttcactcatatcaattagcctgtggtcaaactgttttccttacagtcatttggcttaaagtttcagtttccaagaacccctccacgatgttaggtgaggacttagggaatgtggagatgacctaaagtttatgatgggaagatgtgtgtaggtgatatgcaaacacttttttttttttttttttttaccaaggacttgagcatttgtggacgtgggtcccctggaggggccctggaaccaatcaggactataaaatccttttaaggttttaagaagagcattgttatctctgtggtactgacgaagaccccgcaagctcaccgagattaagtgcccctgcctaaggttacaaagcctcttatcctcaggccacctccagtacagcaaatccaagccctcccgtctaaacttggcgccctgagtaccaagggtcacctcggcctttcaggctgaagggagggaggctgagtctcagggcagagtctgagtcccactccgcaccccaccctctgtctggtacagcttaccaaaccaaagtgcccaaagccgtgacatcccggccggcggctcgcaggcccccgccctccgcacgtcacggccgccgggtgcagtgccccctaggggcccctgggacgaggaggaagcgccaggtccttcccgccgccgccgccgccgccgccgcctgctcccctggcacgcgccccgccgccctcggcagccgcagctccgtgtcccctgagaaccagccgtcccgcgccatgggcacgcgtctgccgctcgtcctgcgccagctccgccgcccgccccagcccccgggccctccgcgccgcctccgtgtgccctgtcgcgctagcagcggcggcggcggaggcggcggcggtggccgggagggcctgcttggacagcggcggccgcaggatggccaggcccggagcagctgcagccccggcggccgaacgcccgcggcgcgggactccatcgtcaggtgagtgtcgggtctggccctggcccaggtctccagcggctgtggccccgacccaggggcggagcgcccgggaccgccgtggggagcggggcgcggggctgcgagtgtttggtgccaactcattaggggggccgggcggtgtgtcgggaaacgcgggcttgggcactgcggccgggagcgctggcggagaacgggggatccagtacccgaccgggcccgcagcgcaggtgggcgtgggcatctccaatgggcgcctagcggcatggaccgcacgcccggctccacgtgcgcagccggccgccggctctgatgcaatcgcgccgggcgcgacccagacggtaaaggggcggtgcggctggggcggaaaccaggggagggggcgaggagcaggaggagggcggggctgcggctcggcgcgccggctggcccggggttcgggaagggcaagcggagctcgggagaggcgggctcgggcccagcgccgcccgcgcgaagctccctggtgttgtgcgcccttccccgcgcgcggcccctcctgctgggctggggtctgtggctgacgtccgcttttcccggaacggcaaaggtggagccgggcccccgggacagccgccggggggaatccgagaggtctcagcgctggtttccagcttcgccgcgcagcgcccacggagtccccgcgcagctgggtttgcagggttttctgcgggcccagagcgaactgggagccccgggcccggcctttcccgtcccggtccccgcccctgggctccagccttccccgccctcgcccagaggggcgcacgggtctcgggccttgcagggcgagcccttcgggacaacttgggggtggcaagaaagccccttccgcctccctcggaactgggattaggaacgagttccaggatgcggtttccccggccagcggaccacctcctccattcacatcctcttccctttccttctagccttctttcttagtcattgcctgcttgcctttctctctgcctttccttcctccctctgctctcccattttcctccccactccccttctcccatctcagtaaaatacgttt

SEQ ID NO: 47742 - DNA, 2954 bp, Homo sapiens
tctgatatgggtggtatccctgtttttaggtgatgtgtgatctttcatccctcccactcagccctgaatgttgaagctatcctttggagtagagctgcggagtcagatttagatgaattgcaatgcttcctcttccttacaggcctcttacttactaccttaaaaatgctagcgtggtgccagggtaggcagataggagtgcagcctataaagatgggaatgtttgctgttcttcttatgcaagcggttcactggctttttactgagcttgtccgctgagattgaaggctccatcatcttctacctctagccactgacaaaggcaagtaggcaaacagctgggaaggtggctgtgatctgacagcatgcatcaccatctagtccagtgacagtcatgatcaatcaactccactacaggaggctcagccaccttcaccaaaaggaccgtatgcctcgagtgtccctcctactttggtgtagtcggatagatagcagtcagaacactttaagagcctgctggctaaagaacttcatgatgggtagcgttgaccttttctttaaaaaaaatctccaactccttattcttttttgtaaacccatttgaaattttgttaaatgctgccgttgccagccagggtatttgttctcctaggtttggtaaaatagtcagcaactcaggaagttctaaattcttagaattttccctgtatgttcttggcttatcctttacaaaaaggattcccaagcactgctctgtgcacaggcattgtggtgaaattttcattcatgtgcaatgaaccaagtaaaataaggtcattctcataaggttggtttgtttttttttccgtgagtttttaataatgatatttaagactatcatttattctaatattaagtcttttctcctttcagtgttaaaatggtatttcttttatgaagtaatctggtgagagtatatggcatattggttggtttttttctttttaatatgcctactgacaaaatttttacattagcaaacctgtattagttcatagaaattacttcaatatttaaccatgtctgaaatttaaaattctggcaccatttctgaaagacagttgtgattgtcactcagcaaaattcttatcggtatagaagagtggagatttcaaaaagaaaatggccccaagtccaagtcctccctgagttgataagactctaagatcttccaaatagttttaggctaagtcttatgaaaatttaactaaagatttcattccctttatctctatcaaggaaatattccttaaaagtgatgtcaaccgggcacggtgctcacacctgtaatcccagcactttgtggggtcaaggcagaggatcagttgaagccaggagtttgagaccactctgggcaacatagcaaaacctccatctctatttttattttttttttaaagttagtgtcaagtatgtggttgcaatgaattagcaaagcctctaaaggaacactgtgtgccatttaatcagaaccaggctttgaggacactgtgctttttgtgagacaccacatgtgacttcctgctctttcacctttggaactctgggtcagacatagactttggtccttaaaaacaagaagcttaaatagtgacctcatcttagttcttataatgtaattgcagatcaaatagccatgattcataaaccaacacaaaggaaccctttgcttcctgactgactccagaatgagtgaacaacatgagtaagagcctcgtcgcagagcctttctccagactaccttgctgggtcccggatattaatagtcttggaaagtggtttctacagctgctgctttgcctgaaaatagccatgctttccccaaacatgcacataacactgccttctcttaaagagagcctccaaaataaacaatagtcacccttgacctgctaaacagtcatcacatggagatgagtttttatcctcaccttcttgcttcttcagtgaacaagtagtaacaagcagctcctgcgtgtgcctcgatctgagccggcataccattgctgccgagactgtataaagtgcaaattgaaaagcacaggagactaacatctgtatcagtgaacacattttctttcctttctcacagggttttggaaatttgcccatctgcatggcaaagacccacctttctctatctcaccaacctgacaaaaaaggtgtgccaagggacttcatcttacctatcagtgacgtccgggccagcataggcgctgggttcatttaccctttggtcggaacggtgagtgagtcacattttccaaaaaccctccccattctgcattgctgtggtgcctcaaatcgttatgctccgcccgctctttaaaaatcatggattagggaaaattgggagtaattaatagtacagtattcgctatttttctaaacactgtgtctcacctacttttgccattgtggtttggatttttctttttttagatcatgtgttcagggtccttagagtcataatactaatttccttcctaaggtgagtaagaacataacttgggagaattcagtctgttatttaaatggtagaatggcttaagacagtggttgtcaacctttatcacacatagcacccaaaatgatgtcatcacggtggggttgactgctcacaccagacaggatctgcccagtcaccccaagggctggggaaagcagtcctcaccctctctcacttccccagcacgtcaggtgggaagctctggcttaggaaattactgaatcataggagttctcatttttgatgttgttgtgatgggatcatgttgctattggatgattattctgttattttgtgttatctatgggggtaaaggagatgggcagataaataaaagcttatcaaagtgcttaaaatccatgaagatgggcttcatttggtacagctacacagtgatagccttccg

SEQ ID NO: 47743 - DNA, 2734 bp, Homo sapiens
ctttactcctgagctttagctggtgaaagccttggcttagggataagagggcggctggacagtgcaggcccagagagactggaccatcaggggaggtgaggggtgacggaggtgcccaaacagagcatgaaatggtagagtagctgagaaggttagcctcagtcacgatctgtcctgtcctaccctctgaggactctaaaccccgcagtagttcacccaacaaattcattcactcggccaatgctgcataaggcactcagctcggggctacagggagccccaactttaagaagctttctctgcttcaggtagtttacaggtggtagacgcagatagaagtgaattagtaaagagaatagtttggtgtaaaaattgtgcatttaactgaaaccttaattcactactgagcatttaatagccattaaataaaaaccagggcccgcacagtggctcacacttacaatccgagcacttttggaagccaaggtagaaggattgcttcaggccaggagtttgagacgcctgggcaacatagccagactttgtctctacttaaacaaaaattagccaggagtcatggcacgcacctggagtcccagctactcaggaggctgaaatgggaggattacttgagcccaggagtttgaggctacagtgagctatgatcatatcattgcactccagcctgggagatagagtgagatctctgtctctaaaaaaatgaaataaaataataaaaaacacaatataatttaaaatctttggagtcactaaacaaatatacaatgtgaatctcctctcactccagctaacgccaccatatccaacactaggtaaagaccaaagccgttctggaaaatcagaatctgttgccatggctcatgcctggacaccaggctgtccgctcctgacgtcactctttcacttacgacttgttagaaaatgaatgtgtggaatggccctggatagctgctgcagctccctggtttcctgaagtgagccctctgtgtcattatctggtcttctcagccctcagccgagttcctcctgtggccacacacggggtcgcagtgagcgtcagtgcacagtgatgaaatctcctggaacagtcgggtgtggggcatgaggaagggagtggtgcctgactacagaagttcctggaggtcaggaaactctcactggaggcggtggccctagagggctgctttctatgacagagcaggaagctgcatgtgtagtgggacacacgcaccagaggggccaggatctcctaataaggactggtatttatttttacttgaccccattctgggccttgccacagtctgctgaaatgccttgaacattcatcacccgtgtgggagacaggatagtaatttcctgctgagatgactgaggggacggggaatggggacaccagggggactggctcctgcaggtgggaaaattctagcaaaatgaatcactcttctgcttagtcacccaatgtgcacttattagggtgctgctgaaatacatattcatctatccactccagaaagatagtccaaactgagacctcaggatcagaaagcctcccattctcctgcagggttcattcatttactcagtgaattattaaatgcctacagcacgcagggccatcagccccacagctatgagaaagattcagtccttccctcacaggccttatgatagactccagtaaataaaaccatacaggcacagaatgcggcgggctttataacaaaggcagaaagcccctcttgttgtgtcctcaagggaggcagagaagctcccctctggctctagttggagaatcccaacccaagcaagtccatccttaaacaataaacatctccagcattgctggctttggaagaccccatggtgagatgctggagcttttttccgctccagatttcgcttctaaatatttacttttactttccatgttcacttataggccagggtttttttttcctaccattgaattatttcgtcatgttctatttaattattgctttaattggcattggtgaccacaaataataataaatactattaactggtgtaacagcttcactagtctatttcactgccccatgctgttgtaactgaagcccccagcacaagcattcccagctcgtggtcatctaagacctttgaggtcattcttacatgcattgctagtgttttccatattccttgatggtagccaatttttccttcttaaaataactttcttcattcctagtaagcttcatatgtattttatgtattcttccctcttttttatgacatgatacatattattgaaagctaggaaataatgcaagattcttgaacgacataataccacttagtacatctttttgtaagagatagtttttctaatacaaatctttgatatgggaagaaacaagcaagttgttttttaaggttttccaaccctatattctactacaaattaccctgttatggtatgcttccaaaattctttcaaggattatggtttatagagttcaataaacctaatagtttataaaacttctcaaaaaataatctcatgccaaaaataatttagtagtaggtggtctttgtcttgtggtcacatggttttgatattgtctttaagtttctataatttacaagggctgtttaatcagttggcataaatttcatgacaaaaatactaatatgtaagcaaagtatatgaaacaatattattgag

SEQ ID NO: 47744 - DNA, 3849 bp, Homo sapiens
ttatgagtagctttttttcttctctttttccatatagatcaaattactacattgggcgtatatcacttttataacatgaaaatacagtaaatagggcgatgataaactgcaagtgcttggggagaatgcttaactcaggccagttgcaagagagtgagaacacacacgcagcctgtgggagcgggctccatgccatcacctggccggtcctggctgtgttgctgtgttttcgcacctcaaaagttgggacagcaaagaaaggccataagagctagaacgtttccataagaagtgtattcagtatgatttgtctagctctgactaatgtgtgcaaaccccacattccactaagcaaatgcaagattgtttttccctgttcatttgttcctgggcccttcttgcttactgtgttgggagttggagaggggataattgacttctttcttctcacagtgttttctcttttttttttttttttttttttttgagacagagtattgctctgtcgcccaggctggagtgcagtagcatgatctcggctcactgcaacctccgccttccaggttcaagtgatactcctgcctcagcctcccaagtagctgggactacaggtatatgccaccacatctggctcattttttgtatttttcaaagagactggggtctcaccatgttggccaggctggtctcaaactcctgacctcaagtaagccactgcgcccggccatctctcacagtgttttttaaaacaacaatgcattttcataacagttggcctggagaggtgtccgaccaagttggaattcatagtagaatccattggaagttaatttttgatgtatttgactgttttccattgacttcgcattgaggcagtgagagagacttgaagaacttagaatacgcacccttttgtcactggcaaacatgggacatagaggcgtgtcttgacagcaatttgtggcaacactctgggctggaatctaggggttagacagcctggccggttttgtaaattagatagccaggccaccctcagagtcagtttgagggttgagtgggaagcctgaataaaaagagaagttaaacttttaagaaaagggtcaagctttaaaactggaattgggttttcaaatttaatgaggaaaaagaaaccccaaaactggaattgtaattgtggagaaatacaactgataatatttggaatatcatctacaaggaatgaaactatccagaagcatttagatggtagtcagtgccatgtagggcacctctgggggcagggtggctcctggcactgtggagaaagacgactggtgcttccttctcccaatcggaggaaagggatacactgtggaggtcccagcagcttagggcctgccccccatgtggttatctctgtgccgtttccttccctctgtcttcctgtaactccttcactttggcccctctgccctttctgggcagagggtgacaggaggcaccgcatgggtacattctttttttttttttttcttttttttgagacagagtctcactctgtcacctgggctggagtgcagtggcgcaatctcgactcactgcaacctccatctccgggtttcaagcgattctcctgcctcagcctcccgagtagctgggattacaggtggccgccactacgccccgctagttttttgtatttttaatagagatggcatttcactatgttgttcaggctggtctcaaactcctgacctcgtgattcacctgcctcagcctcccaaagtgctgggattacaggagtgagccactgcgcccggccaactacatgcttttttcctcctgtcgggattggcctgggctgtacctatctcatggtggaaacctgcccagggaccaggccctagaagaccagcagtttatttaactgggttggcctttgtccccactccctgtgacccggccctgccacatctttacccaggtgcaccactgacatcatcgcttggctggactctggaaagcaggaaactgctggagcgtgtttggggcatcagtgatgtcacccgctacaaatgctgggtggggttactggactgagggccatgaaaaaagaaagctgcggccccggcccgtggactcactgccattctgctctttctcacgtttcagttcagctcggtttgttttccgtccccctccctctactgtaaaagtatgtactcagtgtttcgtttcctgctggatctgattcaggtcagtgatgaagttatttgtgaactcagtggggaggtgtttcctcccctttgtaccggccctacttagggatgcacggttggttatacgcttgcttcactcggttaggcatggaggagaattcattcagccctcataggtttaaatcaaatgcatgacccttcacattttccagagatttacggccagttacaatgagacaattaaacattcacccccccgccaagctgcacttggagatgtgtaagcagtaatgtagtcatgcgctccccatgatgtgagagcgtgcagaacgccactccccccagcaggtccgccaggacctccgcagggagcatcttgcctgcaaaatcacacatccctttttccccctctctccactttccctactacttttccactcccacacccacaaataaacaaagaaaccttgagcttattttacaaaagtctttgaaatggccctcgtctctccaatgctcctgggtcctggtttggccccatctgtgcaatctctctgatgagtgtgaaataagccaggtttggctcatgctctgccggtgagcttgccctccccatgagcctgtcctctccatctggcctcactttgtttgtgtccctgtgtcctttgtctcccatcctgggatcctggtggtttcctcctcccctcccagcatgagtccttttccccagggttcttccctatctctacatcagaatttcctgctttctcccaaatatgcatttccctggcccaggcatccactgcttcctctcatcgtgaggtccctgccgcaggctgctgatggtattgtggccgtgccttcctccacaacccagggaaagctacgtgtgtgtctgtcccatagggaaggagtcatccctgtctcctcagtgtggtgtgttcaggaggaaggaaagtaaccagcgtcgttctcaatttccagaaactgtttatcatattgacaagaagaagaaagctttgtgactcatgagaatgatgttttcctctctggtacataaggttatctaggtccaatccatttgtgtagaggatcttctctcccctagtgtgatatgcacttatttttagcacaagtataaaactactttaaatgaaatcagcctcagccagggaaatatgctgagtaataatgttgccaggtactataccactgagttgagtttgtaattcactgctattaatccctgtgtattagttctgattttttactctttgcatacatagaaaaatggtgtttctcttcagagtcaaggagggaaaaaaagaaaagataaaagatgcttataacacttttgtgtccacccctaaaatcagcatattgatctattattttttctaggtattgatgagatgttgactcatatactttcatacaactggtaatatatatatatatataatatgtgtgtgtgtatatatatatatatatatatatatatatatatatatatatatagactcatttttcttccactttcatctacagcctacttgttttcttccccccatttttcgtatggattcatagcataaattgacaacaaagatacatctcaatttagagcttccaaaaggcacccataaaa

SEQ ID NO: 47745 - DNA, 959 bp, Homo sapiens
ctgggggctcattgataaggagcttccagtgggggcaataacattggaagtggagaggatggcatgtgtgccgggagacgcagtggagtggaagtcgccggaactgacaagggatgggatgtgagcaaggagtccaggtgagtcctggggacctgaaaggatggacccagagagataaacgacttcaaaccggcacggcagtgaagtgactgacccgcgagtgccctgcaccgaggctgacatttgacttcctgccaagttggccatcagacagttagaaatcaattttggagttcaggagagaggccagagctgaaaattggggagttgtttacattgggagtgatatacagtctctacatttccatccagttcaaaacattcttgcgtgtctgctatgcactgtgcactgaggttaccaagactggaaagacccaatccctgtcctggaagcttagtgttggcaggaggcagacaagctgatacatgcaaacaaagggctcacaggtgccaggatgccaagggatacagaagaaggatggttgcttctctacccaggagtgccctgaggtgtcttaaaaagaggagcatttatgactcaggcagggtggcacattccagacggcagtgggcaggagcctgactccagagcgccttagaggctgccgctgggagttgagctggaccctgaaggcagtagggtaagccataaattagggttaaggaaccaagggaataaggggatcagaccattgcatagctccagcagcaccattactagcagcctgtgtgaatgatggtcccctcttacatgcccaccatgcaagggctctaggccattcttcactctttaatgcagaaaagcaaaacttccagctgttttcccctacccaaaatgtgtgagcctgagcccagccccaggatggatcttgtcctaggtaaccaagaaggccttaagt

SEQ ID NO: 47746 - DNA, 1746 bp, Homo sapiens
tcccaagtagctgggattgcaggtgctcactaccacgccggctaattttgtatttttagtagagacagagtttctccatgttggtcaggctgttctcaagctcccgacctcgggtgatctgcctgcctcggcctcccaaagtgttgggattacaggcgagagccaccgcacctggcctttgtgctgattctatagtcttattttcacatcctatcagttactgtaagtaactcttgattccaagaactgtataataggaaagggtagcttccaattatctactcttgcttgataatgcattaattccacatagcctttaaaagtttagtaaattttaggataaattttcgaactgttatttcctattggctgttagaaaattgtgttgctcaaaggggaacatgtctattgtgccttgtggagattttcctacagcttttctggctgacccgtcacttgcactctggaactctcctaaaccagatacggcccaccacgtggcatggtgtggatcctggactttctgtcatccgttaggttcatattcttgaagcaagtctagaactattttctgagagattccctggctgttgttctgtgtttgggtgggttagtcacctttttaggtgagagacttgatttgggtacacagtttcacaaaagtattgtcaaccctgctggccaagtgactgacgtgctgggcatgggagcacactccatcggcatggcagagtggattcactccatgccattgccagagaataggactttgaaccacagccacccggctttttctgaaaggcctgcttgggcaatgatgcctggagaattatctgaagaatgcagtctgtccattcctctggagatggtctagtttttatccccagaccaagctgaacctcttagagctgtgcatttatattgtgtggaattgccttcagcgacgtgttctataacgtcgtgttcttgtcaccttttgagggacactggtgctgtggggaagatcctcaccaatacgcaacagcagggccctgttctctcacctgccatcccctctggaaagctcacagagagggtttcctgggttgctccttttccaagcaggacttctactgtagacttacagctccagttacaagcctgtgtgcttgtctgtttccccacaaggtgttctgacctgggagggaagggacggaatcctattcatctctgaatcctaaatgccaggcctagcacttggcacacagtgggttccagttgtggaatgaatttttttcagtcctgacaataaatgttggggttctttagtttgtttgttgttattgtctgttttatttgtattttggggttttttgctttttcccccagggaatgaaaatgccttctccatatgaaccagacatatcctggggctggggctgagtgtcctttgttgtttgctctaattataactaatgaacagttcagctctggtaattgtaggcttgctggacccagtgcctgccttctaactgaatcttgactctgctccattatgtattttccatgatcctgatttctgtcaatctaatttttaaatttcattctaaggcaaacctgctcatgttcttcgctgaaatcaacctcccctttctggaatggacatatggaaaattggaggcaaaatataataatggtggtgactcagactgctttaaggcctgagagaccggccaggtactgtggctcacgtctgtaatcccaaca

SEQ ID NO: 47747 - DNA, 3682 bp, Homo sapiens
gctttgaaggatgacctactggctgacagccagccagaattaattccatatacatttgcagattttcagtatgagagacggcaattagcctacagaaacccatttaacccccgaggtggagctgtatggtgaagactgttatttatgggagtctgtgtaatttgcctctgtgacaagggacagccatggctcaggagggcccacgccaccctccttttcaaggactcctgcccctgcctgagtggcttggcctggcctggccatgtgagtcttgtggacacgtgcacatcagtcagggacccctgtggtatggaccaaagggttgttttttactgttttaacttatttaatagcatctcatcagtattacaggcatgtgccgccacgccaggctaattttttttgtatttttaatagagacggggtttcaccatattggccaggctggtcttgaactcctgacctcaggtgatcaccccgtgtcagcttccaaagtgctgggagtacaggcgtgagccaccgcacctggcccacagagcttctaaaggaaatgtgttggttttttaatcaaagttgaggcagtgcctcagtgaggggcaggctggagcagtggtaagcgcgctgaaggagtcgggctctctgggcccaaagtcctgccctggccacagagtggctcccttccccctgaggtgggatgatgttctccagggccttttagctccaggctgctacagttctaaactggtggtggtggtggtggtggtggtggttgtggtggttgttttagatgcagtctcactcttttccccaggctgggatgcagtggcatgatctcggctcactgcaaccttcgcctcctgggttcaagcgattttcctgcctgcgccaccacgcacagctaatttttgtattagtagagttggggttttgccatgttggccaggctgctctcgaactcctgacctcaggtgatccgctcacctcagcctcccaaagtgctgggattacagatacgagccaccgcacctggccatgattgttgtttttataaaatcagaatataaaatttgaaaatgttcttttttggtgagaaatgagaactaccaaaggagtaaaatgctctaaaagccatcaggtccttcccacagtattgaggctctgctcttaccattttgttaaataagttttgttcctaacactctttgtgatatgaagtattcttgctaatcaagctgcccggagactggcgtttcccagagcagtttcgaaagtggaaatgatgctgcatttcctacccacagtctggagggtggctgtgctctctgcacggtgggtctgtgctgctcagttacgggatggtaagggaaggctctaactcggtgtcttacaccatgcactagggagtcgcccgctttatttacgagcgagttgatgctttcagtgggttttggctttgcctggttccagactcaagcccttcctctaatgtagggcgggtacaagagagacttgagcaaggatattgggatttaagggaagggcagtgcaggccaaggtcagcaagaggacatctctaagatgaacagcactgcatttgtgggaagcaaccctgccataaacaactcagttaacgtttacatagtaaataattgcattgccttgggctggaatagggacgccagaaggtataggaccatgtggaattcagaaaagggagccctgaagaatgagattttattgttcttaccaggagagtccaggtgctagagttctctccttgtaagtgactaaccttctcccttttggtacacaatcctcagatgaacggagatgattcattaggccattctagcttaatggatgcatcactgtgcaaccacgcaaatgcctcatttctgattcactcatttaatatttattgaggagtgctgggtactaggccattagaagaacaaacaacaacaacataggcctggaccttgcacttgcagagttcacaggctagagaggcacacaagttaaatatagagacagctgaaagagctgacgtctgggacagagggagccccctgctccaggagccagggagcagatgccatggggggctggcagggatagggaagtcaggccaggaatggggttacctaagccggatcatgaaggacgagaacagactcaccaggggtcgagggacaaggaggcagcaagtccgcagcatgaaggcaggagagaacattgctgtaagcctttaccatggccactgcatggggaggaaacaggagatttggaatgagctgtgacactgggcaggaaagcaagacccaggtcttgtgaggccttgagcgtcaagcttaggagtcaggacctggggattttaagtacagcaatatcataattacattcatgtttcagagagatcactcaggcagcagtctggaaggtggagtggaaaacggagaaattagtcatgaagacctatttagaaagtagtaggcaagaaatacccagggcctaacctgaggtgtaggcaggggatgggaatgagagcaattaccgaactagaatgaactaaactcaatgaacaggagcggggaagagggaatgcagaaatggctctcagatttctgacttgttcgcttaatgactggggttgtcatttgtttagataagcaataaagaacctagaaacaattttaggcggaagatagttgtgttgggagcccctaagaccatgatttattacagcacaaggatacaaagcaaaattagcaaaaggaaacagcacgtggggtcaagtccaggggagctcaggcgcaagcttccagagtactctccccatagagtcacacaagatacacttagttcctccagcattgaactatgacgacacctgaaatattgtctgcagaagaggctcattagagactcagtccccaaggtttttattgggtaatggtcacgtaccaaatttcagtctctcagaacaaaagcaaatgttcagcatagaccattttgtttgtgaaatttaggcacagtgagcccctcttgtcagttagaggatagttgaaaccctcccacaatccaagttctcagactcaggcctgctacattatttctttcctacacagtagtggatttggttactaacatgttggatctgaagcatttgttgtaatttacagtgaagatgtccactgcacagttccgtattgagtctgaggttcactggagacatctgtgctatcaatgaaagtttctggagtcattagcccctcaaagggtcattaaaaccaggtcttctagagagaaagtctaaccctgtattcctttaaaccaccatagagaccatctagttcttcacattataaaaatgagaaaactgagtccccagcgatgtggcttggttgcacatttttctatttcaagtctgttactccttccatcataccagactgcctcacaaaatgacaaagtcaggcattgttcataaaagaacaaaatggcatttaggttataaatcaggcccttgtaagtttggttaatacaacttatttcccaaagatcctggtcctcagaccctcaaaaggagagctgatcacatcaaggcctctacctggaaggaatttctaagcagcctctaagtcaactgttcatgttcagtccaccttgatttacaaagaac

SEQ ID NO: 47748 - DNA, 4953 bp, Homo sapiens
gagttactcatcattttcctttcatattcagctcattaaagcagtttgtaggtctctgtagtccatattagtaagtgttaaaaatgtatcaatttgattttttttttttttttgagacagagtcttgctctgtagcccaggctggagtgcagtgttgcaatcatggctcactgcaacctctgcctcctgggtttaagggattctcctgcctcagcctcctgagtagctgggattataggcgtgcaccaccacgcctggctaatttttgcatttttagtagaaacggggtttcaccacgttggtcaggctggtcttgaactcctgacctcatgagccaccgctcccggccatcgatttgattattataaaatcaggttatattggtttgaccagttaaaaacatcacaggttatttaatctttttatttatttatttatttattgagacagagtctggctctgtcacccaggctggtgtacagtggtgcaatctcagctcactgcagcttcgacctcctacgtccaagcaattatcgtgcctcagcctcctgtgtagctgggattccaggtgtgcgccaccacacccagctaatttttgtatttttagtagagaccaggcttcaccacgttggccaggctggtctcgaactcctggcctcaagtgatccacccgccttggcctcccaaagtgctgggattacaggtgtgagccactgtggccagctaatcacttttttaaatcacaatttgtgttacgttcatgagtaatgggtgccagaaataatgttgtgtgttaaacataaatgtagatgggtaaccatgtatacaaatgcatatctcctcaacccagagagtgaaatttccccaccccagtgaccctgcctcgctgtatggttcattcttctccaggaattgaaacatggtggcagcctgccagcttggcgttaccattaattcttattctcttcccctgccgatgtcatggggacaccagccaaatgaactctgatgtgtctcacgtaatgcatgtggacttctggtgcatgtaaacagagggtggttattcttgattgcacatttgtgatttttagtgaggctctaagggagaagcaagaggacttgaataacagatttattctcgggcactggtacatgaaagagatgagtaatgccaaacaaataacacaattctgattcacgccattggtaatggaggagacttctgggtaaacaaaccaaagtaacagctagaatgcagatctgatcacagcagtgtgttttgattcagtctaaagatgacaaagaaaagtttctgctggtcctatctgtagcaacaagggcctgcccgcctgaccacactgcagtggaacagccacattgtgattttgcgggcctgaagcctttcgtctggtgaccctttaagaggaacttgagccaagatcttatcagtgatggagatggagacacctcaggattttccagtatcgtttttcactttttgttcttggacatagttaataacgctgccaggtctttcaaatgctgaggcatttcctcatagctccaagtagctgctgcgggtcagattctgcttgaaccgagggttcaattacaacatccgtatgctttccagcccactctctgacctttgttctttttttcagtactttttcaggctcttaatgtttccatccactaatctcaggagactctgtaaatattctgagtatacatagcccaattacttttgaaaagctaatttaatagaaacttcttgatatgaattgaataaattttttaacttaaaaatcatttacttacaacttaagacagttaaacttgagagtatttgaaagctagtaaacttcagagctttcttcagtaggcacgaactttaccatttttctgacactcagcacggtcagcaatgacacattcattggaggactcatcaatatccctaaaaatagtagcagtactcgtgcacagcctgatttcttttgaacttggctcaatttcttggaagcattgatcatgggatcccgctttgattccttttctgtagactagtgccagtttgcccagtttcattacatttttggaaagagctaaaactatggtatcgttttattgcagtcctcacatcaatcataatttggagcagtcttggtgaaagatgaggaattcagactgggatcctgggcaaggcaggtccagggggcaagagggatggaatgcagtgagtacttattttatatcataagtacagccacctcagcctcatgactttttagccacggcttcattccaaagtgaccacagtcataaggcccaaaactatcttctctctctttctctctctctctctctctctctctctctccctccctctctctgtcatagggacctccctaatcctccaggttgtacagccaggaagggtaaggtattgtcaaaaacaagtgaggtacccccttgatagctcagtgggccagagggcctctggatgctggctgatcatggcaaaaactaaatacagaatccatacagtggattctctgtgctttttctcttcacccctccttacccttgaccaaatttctgactgtgttattttcttattgcagtcctccctgctagatatacaactttgactttcatcagaagaaagtgctcccattgcattattagctaaaccatgttgcagtggcaacgctccttcttccagcttgcctcggtgtttctgtagttagcatcaggtgtccttggttctgtttaccagcctgtccagggatcacttccctggtgggatctctctggtgaccctcatctcagagctcagcggtgcctttggggctacttgccagacaactccatgtgacagagggccaggtccaagtgctcgatcaccccagccaccatttcagagttctcggattatagatccctcaacgagtcccagtgagacaccgaacatgccatagaagctatgtttttctatttcagcacacagtaaaacactacctcttagatgtcgatgagtacatgctgcttttatgttgacgcagaggacctgtgttgactcttcatcggcaaggtgtcttttttttaagtttcaattgacacataccacctctggcccaagtggaccacacagttatgcatgccctttggtgcaagatacatcacgtctccaagaactcgggtgtttttctgatcatggagaattagattccacatatagcttgtatttaggatctgcagattaggttttataaattatgtttggcaaatgataatccacaaagtagattctaagttaaaatactataaagtactataatttatgtttaaatgtctttcaacctgagagttactctcccttagaagtccccaaaaatgctgaaaccacaccaggttgatatctgacctttcacttttggaaaatgtgtatattgttgaacctctaatctagattcggacaccatcaccaaccagcttctctctttcagttgccatctgcactttactgtttagtttttgttgtctttagggaaagttgtaaaatacccacattcttctcaagttcttcaagtcttttggtttttagtaaacccttttgtgacattgtctttgagaacagaggtcaacaaacatttccttaatggactagatagtagatatatcaggacttgcagaccacatggtctctgtcctaactactcaactctgccgttatagcacaaaaccagccgtactcaatatataaatgaatgaccctgtggctgtgttccactaaaacttcataaaaataagcagctggccagatttgctgtgtgggtcttagtttgccaacccctgatctagaagaaaagagttttgtgtaatgtttgggtaataaaataaacataccaaaccatctcaggaatccctaaccttttcctcattgggaactattttcccagtatccccaagtactggtgggaatgagataaaaagggccaggcatgccattccctaaagcagatagccaaccctctttctttccctgtggaaatcccctctgcctacagggaggagaagcaactggtttggaagctgccagccagtccgtttatttagaaaattctaagcccagttccagatcactttgcgtcaactctaaaatacagccacaaatgaaataaatgttgtttataatcctaccaagtctagtaggtgtgtatgtgcttgaggttaaacttttgtgtaagctccagacttactttaggtttatagaaaattacatcgcaattgatacaatggttgtgttgggtgatggagatagaaagagggagaagaagtgaaagtgaaattttggtcaaaattggataccaccctaataagccgggagataaggggtgctgcagaactgttttctgtgatacagtgcatctacattgataatttgtgttttatgtacttttaaaatgaggctttattggcttgatttctgtgagaaaaatcactaatgggctgatcgtactgctctacttcaacatgcaagagaattgctcagacgcttgtcagatgcctgaaccacatacttatttgagaatgtgccatcataggaagctttcattcaccaaggtcaccgagagggcagcccagggaagcacgttgaacttcgcatggttctggccactcgtgtcagtagcaaagcaaggaaataaggagctgacttgcccaaaaattacaagttcagagaaaacggacttgttttgtttggaaaaggcagataacggagcagtaactaaagaatcctctttttttattattattgttgttgctcaatttataaacctaaacagaaaatgtgtgttgccttatttcctcttcttttctacagataactttcttttaaaacattctaaatattaagcaacattgtaagtacagatttttttttttttt

SEQ ID NO: 47749 - DNA, 475 bp, Homo sapiens
agcagtattagaagtggaggacttttttcttctatgttgaaaatattttaagtaaatttttaaaaacgaatagaaatttaatcaggaacaggctttctaccattaaaaaactttatagtcttctttacaaaagaagagaaataattgtacttgttcagtcattcaaggccactgaaataattggcatagcttgagctctgtagtactgtcacaatatgcaaacacagtgtggtaatttttatagtaattgaacatgacttacgtcttagaaagtcataagttaggaatttattctgttcgttcttttgaagtgaaaagtaaagaaagcaaaacattttttggccgggcgcgttgtctcacgcctgtaatcccagcactttgggaagccgaggcgggtggatcacctgaggtcaggagtttgagaccagcctggccaacatggcaaaaccccatctctactaaaaattcaaaaatt

SEQ ID NO: 47750 - DNA, 790 bp, Homo sapiens
caaggctacagaactgccttgccaccctgtggcactgcctctcatttcatagctggcacatgtcattttgccacccccatcacatgtcatgctggcatcaacccagggaggtgggtagtatttttgttgaagagctgcaagaactctgcccagagaagtcgacaacctgctcaagttgtgcagctaataactacaaaagccaagactcaactcagatctgttgactctcagtattaccccaacctttatgccccaaaccaaaggatgcccttttcatttcagtcacgggtaaaatgaactttggcccattccgaaagatgataccagctatttgaacagacaggtacttgaggataatgaggtaattttttctaataagtaaagataattgtttgggtattaaaagctatgattttgtcataattctttttagtccaagtataatagagccagctctttcctaattctctaatggaatggcatttctaccccttacccaccccccaatccaaggcctctttcttctttgtgaattgctaaatacagttctgggctagtgggcagtggttcaaaacccatcgtttgaccctgcttgaacaatcaaaaacagatccagtgtcctaagataaaaccactatacaaagcaaacattccctctcagtggctcctcggtaatgacccagcaagtattgtctgtttcccgtgcctctcactatagccatcagggaccacttctactaataatcagaggtctgcggctattcaaaatgcataaaataaaaatgttaaa

SEQ ID NO: 47751 - DNA, 1028 bp, Homo sapiens
tagtagagacagggtttcaccatattggccaggctggtctcgaactcctgacctcaagtgatccacctgtctcggcctcccaaagtgctgggattacaggtatgaaccaccgctcctggcctgatttaacagagaaaaaatgattaagaagcactgataattccaaaggaaagaactatagggaatggcttaaaggcctacaaggaaactctgtactgggaagtgagaaagagcatgaggctctcctgaatataccccagtggcatgttgaaggtgtcaggtctgagatgaaatcattctgcgagagaagagtgtgctgagcatagaaacagtctctccacatgaacagacctctcagcctgtgcagcttctgcttcccaggagctcagcccgtggcagaagttttcctgatgcaaagatttcactttcactattaggctgtcactatgccctgacagcttcccaggtgtgagttacagctactggtttgaggttattttttttttttctctacgtatcgtataggactcggcccattcctgtgaagagagcacatttcttgcttcccttagtcactacattggtgtcaatgtcagacactctgtattagggaccaaggttcctgaagaatcctggaaaaatggggtgggggtggagaaggcagtggctgggagtgagaatacatgctctaaggccaagagtccaagaggacacggacgtcctctccagccaggccctggtcagaccaaggacacatccaggggtggagagtggaagaccaagagctccccatgagccaaaaatgaataaattgtttctaagtaaaagtgataaaaaatgatgtgatgatacactgatcattgaaggcgaagaggagaacttaggagatttttaagtcataactatatgctaggacaccctggaaattaattttccaattcaaaatattttaattctggtataaacgttcatgaattattatttactgggtacagagtttcagttggaaaggatggaaaaagttctgg

SEQ ID NO: 47752 - DNA, 715 bp, Homo sapiens
gagcagagctttcccttacagccctgagaagacaccgaccttgccagcagctggatttttggactcctagcctctagaactgtgagacaatacatttctgttgtttaagtcatctagtttgtttaaggctgccctcgcaaactaatacagggaccacagagccgtcctctgtctatccctgggattctcttactaacagggcgctgctgctcacagagttaaaagaattcactccaggctaaccattgatctggttctcacacttcaacgtttcctttcttccacctggcacataaagaatcgtttgccagcagccagcagtctaatcattaagcggctgggaagggagacatcaaagcagtaaacaacacacagaacagtgttacttgagcaatttgcctaagaaaccactttatcttctcggagagctagatgcataaattgtctgcagttgtctttggggagagttgacgaggtccgcaggggaggagttactggtatggccagtgagtgtactgaatactgattccaggaaaattaggaaaacacttctggtgtgtttgctcctgtaaccccggctgctgcaccaagcttctagtgtgttgtttttcttctattctctgaccccctcctctcaagtaagccatattttgtgcagatcttcggtctttggggaatgtgtctcttccattttctccctcccagccctgcccct

SEQ ID NO: 47753 - DNA, 3410 bp, Homo sapiens
gccgagatcgcgtcattgcaccccagcctgggtgacaagagcgagactccatctcaaaaaaaaaaaaaatcaaatcagatgtgttagcgtcttcatgaatgtcataaaaagaaatgtttcagtgccaaaactgaacagcagtacagtgacctttgaaaatgttgtttagggtattaaatgtgtaactagtgacattttgtgtgtttttctttttcttcctatccagctcagtggaatagctgttgcttgtcccagtgttagaatttggactgatagaaaggagaggagctggagattcattctgctctgcaagggcagactcgatttcagaagtggcaccagatgatagccttgtgttgtccccaaccactggtgctgagaaatgatgcagaaccaagccctcagatcccagatcacccacggctcctgggacatctctggggaagggacttattaatgtagaccctgatgcaacatcccaagtcgtctttatccatgatttgcacagccaggacactctggggctgggattgggaggagaggaatggccaagttgccctgcccccttggctctgtggactccagaaggatggtcagtaccagcagcatttcacacacaccagcctcattattaaaattggagcaatttgtgaaatagagttgagacttctctagagaaaaaaggttgggaagcagctcagtggctgggtctgggagtcagcttccaggcaatatctcactgagtcaggacaaggcccatcattccctgttcccgccaggccgggtatttgccaggatgtgaaacggaagccaggcttttggagaggctgaagctgatttttgtaacaaggtctggttaccagcaaggaagcggttttcacgttgctcactctgggcccgagtgtggtgcatcgcgccccctggtgcccaaaaagtgcaactacgtgccatgccagccagctctcctggacttccatttttccctgattctcctgttcctcgcccacccttctctttgctgtgcccactgtggtctacgccgaggctcccctccctcctccctgccccaagcaataatgaacaagatcttcattctctgaagagaagtgcaatagtaaaactttcctttttgtttgtgtaggggaagagctggtgttaatgggtcaggcaggcaaggcatgaagtgataaatagggaaaggatgaaagaagggaacaaacccaggggacctaacggacccaccctaacaaaaaattggagtacaaaaaaagtgtattaaaattgtgagaccacaccaactcattcgtcactcgtgtctttacaaagaacaaacctgaagcttcaatgagaaagaattgaagtattctagggctgcctgaaatcttctgaacttttaacataggctttgatttccgagttgtgtgcttgcatgttagagatatgatagtgtctaaaaattggaacatggcatagtttgatctaaaaagttagctaacttctgccatttagaaaaagaccccatgctcaagtctgcttttgaaaagttgccttggtcaagtgttgaagacagcacttgttagaaggaacaagttcacttctgagagcccttctcaaagagtttaggaaacagcactactgagagttgccagtcttcagagcagtgcaacgtgtgtgtatgcgtaagacacagatggtgaaaatatcaaatgctacagatgccaagaagggaggtgttggcaccacaccaacctttaaacaaacataaggatgcagaatgcagtctttaaaatggagggagaatttactgtctgtgtggctatttccttgaaatgacttaaaaagctgagatacagaagtattagtaaatcggtgccaggaatgaagtaaccgtttagatccaatgcgccggctccagcatcgaactcatgcccagcaccctttaaaccctcccgggactctgcagaacccgctgaccactcacagagcccagctcgggggagggctttaaggtgaagcacgtgaccccctgcttgtgcggcccgggcggggaagtttgcgctcccgaagtcctggagctcagcaagggaggggccagcgccagcccgcgtgtgggtggctgggtgggggcgtgggtgggggtccgcctataattatctggggaaatgcatccgcgctctgcttttcgctgcggcagctccgagggcacctccggttctcccccatcctccgggagtgtctgggcgctcagtccgctctgatcccgccgaaaccacctgcggttggcaggcaggagactaggcgtctgccggggagggcagggacccgctaagctgatctcctgtacagtagtgctacttaaaatatgctggggaccatcaccatcacaggtaaggcacaagccaggtcgcttttgtcctccctggacggcaggcacggggcacgaaaaggggctttcttccgttgaatgagcgtttggtggggagcccgggaggtcagtggcgggaccgttattggcatttatttctctccgtgtactgagtttttcttcagaagaacattctcccttgggctcagcaagaatcagacaacctcagtgtttcatttttggctgagctggaatcttcttgactgtgcctatgggagacctttagtatattttgttcggggttgtacccttccccttagggagagagggatgtggagaggaacaacagcagccgactgaatagaaatatgtcagatttgtgtgaatttgaaaataagctgtgaaagcttaatctcttgccgtagtcatagacagaatacattcctcttctgggcaaattacaagtgtttgcattttgacttgtttactaggaactttgaataaaggtacacttggtggtttaggggactaacatttaagctctgctttaagtggtggttttaataaagccatagttattataaaatcggtggctaggaagcaacactatttaggcaacaaatagtaaaaaaaaaaaaaaaaagaaaaaaagaaaaaagtatgtttctttagcttactttctaggaatctggccgtgagtatgaattataatatttactgcctacttctagcaaataacttacacgcatcaaacttttagaatgctcttacagctcctctaacttgacatttgatagtcttatgccattgtactgtggcctaacctgcgtattttctcttcctgtcatcaagaaaattaaattccgtttgtgaatttaactttataggaacaggacttctttattctttaaatatttgagatcattgctgccaaatctttttttttgtttgtttgttttttgtttgttttttgagatggagtcttgctctttcgccagactgaagtgcaatggtgtgatcttggcttactgcaacctccacctcc

SEQ ID NO: 47754 - DNA, 3483 bp, Homo sapiens
gcccagtttaaaaggatgtcctattagtggtaaattactatgcctttaaaaactgccttcttgtccaggagcggtggctcacccctgtaatcccagcactttgggaggccaaggcgggaggatcacttgagcccagaagttcaagaccgtctcgggcaacatagcgagatccctgcctcttactaaaaggaaaaaagaaaaaagaaaaaaatgaccttttaacagtttgaaaacatcctggatacacaacaagatcattcaaaatgcagtggaatttaccttaccaatttataattttggtttgtgataaatcagtcaaatgagaattaaaatggcacagtcccaattctctattaaacgttcagggtactcccacactaaaacgctagtggtgtgtacaactcgccctggtgctccaacggggttggcatagatggatgatttacattagcaaggacagggcagcgcgtttaagcaaacccagagaccccctggagttctgataattctgaccttctttatgctttattttactaaaacaataccctgataaaatgaatagaatcaaggctcacaaactcagtggacccattgtatgatgaaagagctaatgaacaatgcagctgggggaggcggggagcgagagccgggttatatccccaaggcataattaggagttcacgtattcgggtggaagttcctgcagtaaaaggcgtagctgcagcttctcccggcccaggcactcgcctgctctgctaccctcgcttctttattgcctcttttactaccagctaaaagcggcaaaacccagcttcctttgcagcttctggctaaaaagttctctcttgcggctttgtttaaacaagaagggtttagaggtttcgctacaccgagaaaacgacgccggccccgggaagcagcctccccgccttggagtccggttggggcgtgagggccgcgcgggtcccacgccccaaggctaagcagccgaaagcacagcgcgctcggggccaaaccgggctgtatcgcaggcgcagatggcgcgtcgggcggaagctggaggccgccggctcaacacgctccgtacccgggactggggcccggcctgcagcctcagcgagcaggcgacaagggcggcgccacagaggccgacgcgtcccccgcccgcctgagcgcgccgcaacagccacctcgtcccacccgccccggggcggggccgggggcgcggcgccggggccctctggccccctccggtctcgccggccccgccccctccctgtccccgtccccgaggggctgagggggagggaggggcgacgcactccggccgcgttgcacgctcgccgcttccctcagtcccgcgtgcgcgcgcgcgctcgccccaagtcccgcggagtttaacacaatgccgacgcctacgccgtgcgcaacgccccggccggcgcaacagccccggcgccgggggcgggggtggcccagacagggagagagggagagggatgagcgcgcgcgagagccggagacagcgcgagacccgaggaggccggaagcgcgcgtgcgcgcccccgcccgcgagcgggaggcggagccgcagcagtagcggcagcagctgtaggagccgctgcagctgggagaagcgccagagaggccgggcctgctccggtcggaccggatccctcccctccccctccctcctccctcccctcccccaaacccacttccgcagctcgcggccttgccgccgaagcagcagcggcggcagcagcaggaggcggcggcgaggcgtcggaaggattacgcacctgacgggcccgcctctgagggctccagcgcgggacgctcaccggccgccgccgcccagggcgcacttcgcggtggcggcgggaagggagggaccggccacggggaaccgaacgcgaatcgcccccctccccttcctccctcccaccctccctccgatccgccgcccgccctctcggcttccgtcccctccccctcccacaaaaccccggatggaggcgccgccgactcgccgccgcctggctccgggggatggttttgtcaagcggccagagccccggcgccaggcgcagccgccgccgcccccgcgaggcgcccctgccctcgcttcccagaaccgggtccccgagtggcccgggccttccgcctgcctgcacccgtagccctggtacgagggtcattcgtcgtctttgttgccaccgcctctgccggaaccgtttgcgagctccggtggcccccgcccccccaccgccttcccggaccctgggctgggggtggcacgtgggcaccggccccgggaggcggaggcggtgcgcgcttacctgtcgccggtgctgctgcggcggggggtgtggaggaggcgcctctgggcagcctcggccgtgctgtcctccccgccgccgccgcctctgcctctcgctgctgctgctgctgctgccgccgcggtcggtgtctccggcgcggcggcggcggcggcggcggggcttttcctgtccggttacgttaaggtcacatgaccgagagagcggagagactagtgcaaagaggctgcgagcggctcccgccgggggggagaggcggcgagagagcagtggcggcaagagccccctccgccccccccccagccgctcccctccccccgcccgcctccgcctcctgctgctctgccgccgccgccgccgcctgcagcactccactgccgctcccacccaggctccgcgctctgctccagccaaacttctgcagaccatgtgcagccgaggcgaggaaacttctctccacctattggggctggaggcctgagtcacaagccccttgtttacataaagtgtttaggtagcacaagtccttgagatgctcggggtagagatggagagccactgctcgtatccttctgccggcttctgcttgagatctcttggcctttacccttgtcccttgacttttcgtgtttgttttaatctttaagacttgaaatggagtggcctttagaaccggggagatactgtaaaccagcagtatctttgtgtcaccaatggtaactgaaagtcatgctgaagtacagattcctgtagcgtgcacagaggcagaggtgcttcctttaccttgcagatgagttgagcggcgtaagatgtttctgttagggttgaatttcatggttatttcagcaacgattttcgtttttgaagttttggcccccccaaaaatgaaagtctgcaacgcatgtttgttaagagaacagtttattctcctgttaggttttggtctttgaggtatggattccagagttggctattctgttagatttagaggtgtggaaaatcttttaacggggagatcctgaaacacggaaacatggcagggaagttagaatttcctgatggtcatttttaacattttaaagtttactttttggttgttgccatttttctagaatccgtgtcttttttggggaaatacagt

SEQ ID NO: 47755 - DNA, 1180 bp, Homo sapiens
aaatataagtacagtgtttctgccactttgcctttagcaacatttggccttcttcctggaagattacaagattataaagctactgacataacaagaaccttaaaaaaaatagtgatgggaccacttcatttacttcattagcatatcaagtatataaaaatctgtgctggccaggcactgtagctcacacttgtaatcccagcacactgggaggctgaggcaggtggatcgcttgagtccaagagttccagaccagctgaggcaacatggtgaaacctcatctctacaaaaatgacaaaaatttaaaaattagctgggtgtgatggcagctcatgcctgtagtcccagctactcacaggctgaggtgggaggatcacttgagcccagaagactgaggctgcagtgagtcatgattgtaccactgcattccagccctttttctgtctcaggaaaaaaaaaaaaaaaatcaggaaaggttcccagaaagatctaagctgattctagaaggcgaaggtgcttttcagcttggggctgggcatgggagtgcgaggcatgtcagatacacacatgaacattccagacaaggtaaacagaatttcccccttatttacagtatgaaatgtgttattttaaagttagcctatagtaggccacacatggtggctcacgcctgtaatcccagcactctgggaggctaaaggctggggggatcacttgaggccaggagttcaaaaccagcctggccaacatggcaaaaccccatctctactaaaaatacaaaaaaaaattagccaagcatagtggctttaatcccagctactcaggtggctgagatatagaatcgttcaaaccagggagggagaggttgcagtgagccaggattgccccactgcactccagcctgggcgacagaatgagactctgtctcaaaaaaaaaaaaaagttagaccgtagtaatcaataattctttttttaaaaataatatgttaggtgctagagatagatgaatcaatgatctcagaattcaaagtctagcagaggaaaatgaacgagatgcacaaattgctctagtccagagaaaggagcatgtgaagagtgtggcattgtcacagaggtgacatttgaactgagtcttgaaagggcagaaggatcagcaagttaaacaccccaggcatggagt

SEQ ID NO: 47756 - DNA, 2370 bp, Homo sapiens
gtcctctgcctaggaaaaccagagacctttgtgcacttgtttatctgctgaccttccctccactattgtcctatgaccctgccaaatccccctctgcgagaaacacccaagaatgatcaataaaaaaaaaaaaaaaaaaaaacacaaccagcatccattctcttatcttcctccactttgcatttctccattgtttaacatcacttgcacacctttaatttttagtttattaattcatactgcaaacgaactcagttcttatcatgtgccaggtattgtcctagttgctgacaatacagctgaaaataaaatagacaaaaatcctatcttttgaatcttttgaaccttgcattgggagtgacagacaaaacgaggtaaatcagtaaaatacgtgagacacaaagctaaaggaaaaaaataagaggaaagggcagatttttgtgtcttccttccagaatggaagctccctgaggatacggatttgtgttttttcctattatatctcctgacaatagcgcccagcacatagtaggcattcgatcgaatttttaaaatgaaatacaaggcagttactcagttcccgggcacatttcaacttttagagaacaattacaccaattaagaaaatcgattacagctaggctacgattcgagagctaagtggcgctcatctttgggagtatgccgttcaattcctcaaactcaaaattattttatcgatttctacagttaccgcggtgcactggctcaaaaaaagggttcattaattgagtgctttttactcccagctaagctgaccaaagatcacggtaagaggcaaagggtcacagccgcactggcgtaacccgtaactgtacacgttccgggcggccaggagccagggcgcagacctccaagccggaccactcgagctgctaaagaaaaggcaatacactaacctctccgccggaagagaagaaggaagcgccagggacgcacgcttcctcggcaggactgcagggaaagagccgcacccccagcctctcactactgcagccaacccatctcctggaagggcgctcccgcccacccccgctactgcgcagccgcactgaactctggtcccacttagcgggagaaactcgggccacgtgactgtctgaccacgtgagccgcgtcgccgcgacctcttccgctccctaggccctgggacctcccggtcccttgcctgcttccggctttcgctcgcttccatatccgctcctctagtcgccctccgctggccccgccttcgtccccggaagattgggtcttctggcgagccactgtttgccgtttgatcgggcaccaaataaagtttctttattcaaaagcactttttttttaaagccacaccacccccattctcagctcctccttcgcggcggtaccgcctctgtttctgcggcgattgaacagccgagctttgcggccgggatcgcggaaagtgatggctgtcgtcccggcgtctctctcaggacaggacgtggggttagtctagcttttctcctccccacttttgcggaaagccgggcctcgccgggagcctgtggggactaagcggagggcgcccgctccccggtgggctgcgttcgagtcccgccgccgggcgcggctttccggggcgcctttgcgggtttcgcggactggctcggaggcgaagggaggcggccccggggagggagcctgcccgcggcggctgctcgtaaggatcaggacaggggtcagcttcgcggtctgttcctggcggtcactttttatttattcactttaatagacgcgctttgggggcgttaaaattctgcgtaagagttggggatctcagcgctattaagaaacgggtttctccctgttgttgatcaaatcgtaatctcacagtaagaactgtctagttttttgctttatagtcgtcacgctactgattcttgggtaaagttgtgggtgaccgtgcaaataacatccatttgcataaatcgaatggccaaatttatatttgaaatttgtccttacttcaaaatattgcaaaagacgagaacactttgaagaaaataaacctgggcagaaagtaggttgaggccaacaaagtggcgccaatggccccaaattgaggcagtcactgtttcaggtcatgcaagtatagagagtatctccttcaattttgcgccctagggcttctggcctcactccagtcctggccagagactttgttccagaggtgcaggaaatgtagtagttaggaaaacagtaatactttccaattaaagtaaaatctcaaaaaaggacttactatacctactgcctgggaaaattcaagtgacagttgatttaatgttcctgctcaccctctgaggt

SEQ ID NO: 47757 - DNA, 1036 bp, Homo sapiens
cccccaggtcgccctggcagtttcggccgctcagttgcaggccctcgccacggaggccacgctcgggggttcggggtccaccccggcctcctgcggccgggccaccctactcgcgcgcagccgcgcgccgccgcgtccccgcggtgtttacccgttgcccgaggagacacccgcgccacccgccggctcccggcgccgccgcttcctcagggccggttccgggtccgagcgcgcccccgggctcgggtcgtcatgagcctggactgcaccagccatatcgcgctgggtgccgcttcgccagcgcccgaggtacggtcccagccgccggccgcgcgcgggggtggccctggggatagacgacccaggaggggccgaggcgcccctgatttgcacccttttcctcccggaggcgtgggcagaatcagagcagctctgtgcccgcgagggctgtggcctgggactgccagggcgctgatttcaggaggggatgggcaggaccggagtttgcggagcgcgtctgaattttaggttgtgccactctgcttctctgaccatttaaaccggtgacattcgaaagactgtggccgggcagttcctccccgccacccctgggagcaaagaattccttcatttaactttccctgcttagctactgaagtgtgcttcggagcaatttctggaaaatctgatgtggcaggaggagggccagcccggagtagagtcaccggccctttcgttgcgaagtaatccagaaacgttggtaattcagttgttcctgaatgcatctactcatttactcccaggagttacttaggtactggggactttcaggtattagatgtaccaatgcgcgcgcgcacacacacacgaacatgcgcgcatacacagacgctcgtgcacacacgcgaacaggcacatacgcgaacaaacacgggcgcgcacacacacgaacacgggcatatgcatacttgggcgcacaagaagatctggctggctcagtctgggttaagaatccccctttggccttggcatcggg

SEQ ID NO: 47758 - DNA, 3541 bp, Homo sapiens
taataggcatgagccaccacatctggccttaaattctttttgtaagtaactctggcctaatcttaagtaataagctaatacggagaatgtgcctcaccctccagcatactgtgtgttttggctttaagatcttgggacagcttctcagaggaagacaccactcctccccacagttgcagctgttcacctcccagactcactggtaaagttagaagacgcttctgaaaaactgcccatctatattttcctcacagcagttgtgaagacttgctgaggtggatttaaggtggggctctcatgggatacagcattagaagaggggacattttgctcttcctaatgtttatataccagcaatgtcccattggtcagggcagaaagttgaaggtgcttttgcttatggacctcatagagtgtgtgtgcacataccagcaggcttaattttaaaatctgaccccagaattatgctgtctacagttttatctcattgatttttcaaataagggtactctaatgtgttgtttttagctgtaactgtcttaagacatgtttgtccagcacatatgcttagcaaaatctctaactgtttgggatgaactccattctttattcataaaaagggtatgaagtgaattccattgacttctgatttgtcatgtttatacagttttcctaactaaatacaaaaggagttatcagcattctcttgactttctagattaaaactttggaacagactaaagccattgaagatctaaacaaatccagagaccaactggagaagatgaaggagaaagctgagaaaaagctcatgtctgtcaagtcagaactggataccacagaacatgaggctaaggagaataaagaaagggccagaaacatgatagaagtggtaaccagtgaaatgaagacactaaaaaaatctctggaagaagcagaaaagagagaaaagcaggtgggtctaaatctggtgatgaaaccttgtttaggaaatgacaggacaattcaagagcttgatattaatacttattcatgcatttctttttaaaaaagtttggactgtttcatgaatttgtatgtcatcgttttacgagggccgtgctaattttctctgtatcgttccaatgttaacacatgtgctcccgaagcgagaactagtcacatatttattcaaaagcaatttacaaagctttctatatcttttcaacatatccacctgcccctccagcatctttttggcattcaagtaaccactatgatttaccccgctaagaaaaattattcacatttccatggcacaaattgtaggaaaggaaaagacattcttattcaagcagcggaagggttttggtgaaaaaacaggttctggttctggggaggtttttgttatgttaggtgatcgcctctgaagtttgcatcatcatagagctcttaacgttaaccagggctttggcctcaggagggaagccttatctgtagcagagatcagttgcaggaaacagccccaaatctcaaacagtggcacccagacttgatggccgaccaggcacagatgtaagccataaaaaagtactcatttgcttgctggctacaagaaggagcattttatctagtgagtccatcaggaggtcaggcgtaaagaaacatgtaccgggcagcttgacctccattgcttttggcttttgtctctttctccttttgaagctcaaaagggcatagagtggactctgatcctaggatttttttttccctgctttggctgcctctgttttggttcatgtgtcaagcagagacggggaaagccaaacgacacaatgagcgttctcagaaaggaaacttcttcggaatgaaaagctttggccacattggaaagggtagaagtctgagagaaactttttcatcagggagactaggtcggtgtcttagtcctttcaggctgctgtaacaaagtaccatctactgggtggcttataaataatagaaatctctttctcacagttctggaggctgagaagtccaagatcaaagtgtctggtgagcacagcacagcttcctggttcagagtcagccccttcttgctgtgtcctcacatggtggaaggagcaaggcagctctccggggcctcttttataagggcactaatcttattcatgagggctccaccctcatgatctaatcacccaccaaaggccccacctcctaatagcttcacattggtcattagatttcaacataagaattttgaggggtcataaaattcaaactgtaatagctaaaaaccattcccaaattggactctgcaagggaagcgggttgcagagcaaatgagcctggggtgggactgtttgggtggcattctcttggatgtaactgtattcagtttggatcatcccttttctaaaatggagggtgcctttaatgaggtgttggccagatgccctgatttatctgcttttgcattaacctagaaccacagaaaccagcctatgagaatttgaagggatatgaggcatatttcaaccattgtccccagcccctacttttctttcttcaatggacaaatagaagtcccagagcagtcccatggaatatggcttgtgaaatggcaatctgtgtgacatgacttgatagtaatttagaagtcctcctgttttcattagcttatactttcttgctgtttgttctttttttttttttttttttttttttttttttttttttttttttttagtgtaagaggttatcagccagctaaaatcccaaagcatgtttaccatccatgggcacaaccccaccaacatttgtttagttcttcctagtatgcagagcacacacacagtcaccatttcatgtgatctgaatttcagggcagcccttcgacgtaggtgtatggttaatcccaacctggagatgagaaaatgaaggcttagtgaggtctgggtctcattcatggttacttaacttggattcttgacttagtagccaataccacatcagttggctcatcagaaaagtgattgtgaaatctctgaaggttggcagttgatgtgacttatctggaatctggtattttataagtgagagaactaggaagagagtagataatttccctacctcatgcaaacctgggttttctacaggttttttgtttgttgcatttggctcagcagtagttgatacattttgttctcccagttaatgagtttctgtttgatattgcagctggcagacttcagggaggtggtgtcgcagatgctaggcttgaacgtgaccagccttgctcttcctgattatgaaatcatcaagtgtcttgaaagattggtccattcacatcagcatcactttgttacctgtgcctgcctcaaagatgtgactactgggcaagagaggcacccacaaggccatttacagcttcttcattgaacactgtatctcttgagagaggtggccataagacatggcacacaattcccaatttcacaaattcctcatgtctttgagatttgatcagtttgtgaatattttatgctttgatgatata

SEQ ID NO: 47759 - DNA, 1968 bp, Homo sapiens
tcgtccacatctcacactcgggcatctaatggctaaatccaaatcacatctggaatcctttctcaagggattcctggaatcatagcattcagcttcccaatgatggaggtacagaaaggcatgctggaagagtgttttccaaaagttctgacatattctactgtagaatcattttcctcacacatacatacagtcacatacgcatctacctgaaataaaagattcacaagacagttgaggcaccctgatggtttcaattctagtctatgctgagcagtgctatgctattccatgctatttcattccattaagaaatgctggtcttgacccactaagttggtttcgtgatggactaatggacgataactggcagtttggaaaaacacttcacaacaagaagggagaaatggatgttgagtgccaatccacaatatctacgatactattttatactattccttcccctgtcctgaattgacagaaagaattcaaggctgctcacagaagggactcagtgatatgataaactgcatagtgaactgaggatcaaaagtagcttctagtccatggaccagcagtttatttgtttgtaaatgagagcgttgtgatagttctgtgttgtaatgaccggattgacacctacctagtaggaaaactgagggaaatgttgaccagtctataccttgtaccttttactagaggatggattaagcccacgagggagttttgatggcaaatgcactatggtgtgcctttagaagcaactgttgtactcctgaaaaatattagttggctttagtccagttcctggttttgcatgtaggtgtaaaactaatgattcattctgagagcatgggggtatatattgaatgtgagaagcatgactcattcacctgccccatgtttgaaaagcaattgttaattacactgttaacatttgttaagactttaatttcttcatgtagagcttttaggtaaaagcttatatttaccaataactggggctttcaatgagaacttttttcctgatgcagtgctggttggaaggtaattggtttcaaaaaagaaaagcccattgagaaggcagaacaaagaaacgtttaacacatgtttcatctgtgccaaatagtacaccaagcatttccatgcacaatcactcgtgtagtccttacaatagctcttaatgaagaaattatgattttcctttttgtagatgagggagaaaggcttaaagagattaaaagggattcacccaaggtcattaaactagaaagtgaaagcatggaattcacattcaattttggatgactcacacctcctacttttcctactgttccaggatgtctctgttgctttcattatttgttcaaggtgaatataagtcaaaacaaaacccctcaacacaaactttattagcaagacggtaatttttatcttttggaaaaaagagaccttctaatgggtccttcagctgcccatttcatctcttccttagccatattttcctctttttaggaccctgatatctaaaagcaacagagaattgaacagatgatttgtgggcattattttggtttcatatcttttatggttttcttttggttgtgattgcatttaaggaaaccggaagaatttgtgttaaggaaagaatatgtttccccaaagttcatatgttgaagtcctaacctagatgtgatggtatttgaaggtggggccttttgaaggtaattaggtttagaggaagtcgttaggaagagcccacatgatgaaattagtgcccttataggaagaggaagagactggagagcttgcgctctctctactgtaaggagacagcaagaaggcatctatgtctctgcacgccaggaagagagagcaccagaacccaaccacgctggcaccttgattttggacttctagtctccagcactgtaagaagaaaatttctgttgtttaaaccacccattt

SEQ ID NO: 47760 - DNA, 1078 bp, Homo sapiens
tatgtaattgaatcttcccctaacccaccactggctggtctgaccctgctgtgctctctctctcccatgctattctgcctcttctttggaggggcccattgtcaggcctgaagctgggtatctgaccaggttgtgccctgtcctacacgggagtgggaactgctctgtacctaggcgtctgccactgactcagaagtccaggtgagttggctgaggaggaaagacgcctgccaaacagagagctttgtgtttgtgggagttcactccgacttcctggtttggggatcaggctgattggcttcaattgaatgttaaagctgaatttttaaagccatgcctctttcactacagtggggacctctatgccattctgcataggagtctgataacatgggtattaagggcatggaatttctaggtgtactcactggcctctaatctgaaccccactttggctgtttgcttctacctctgggcattggttctctcatctagaaaatgaaggttaacaatggtcctaatctcctatagttggtcggaggggtaagtaaaatcatagatatgaaaagtttagtcctgtgcccagcatattatcaaatcaatatgtataagttattattaatattaatatgaggcccttaataggtccaatcatcatgtattcatatttaatggctttatctctagactaaatcactgtaatcaaatacttatcttttcctccctctgggatagactgttggatggtcttcagtgagtcataccttccagtattgatgtccttttgcaatccttccccaacccacactgactctgggcttggccaactgactggctttgggcaatgggacattggcaagtgtgctgcaggcagaggcttggtaagcccttgcacactggggcttgccctgtggaatgcagatgccatgcaagaagagaagactgggctagtcttgaagagagatcctaagaccacatgcagtaagaggctggtcatcccagcatcccactggagcccacccctgagccaatttttcagctgaatgcaaccacataagggactccagttatgaacaga

SEQ ID NO: 47761 - DNA, 934 bp, Homo sapiens
atgaccagctcgtggcactaacacatttggggccatattatgtagtagtccatccagtagcttgggctttggaatcagagagatttagccctaagtcctggttcaccattgtcaagccgtgtgatcttggccaaagtagctttctaaatctcctgtttatcagcagtaaaatgggagcaaaagtaatgcctgtctcatggggtacagtagctgtaagggttaaataagaatgcaagtgaaaactgcttggctatggtagggttcaacaaatgtttgccattattacatcaaacaaatgcacgaacgataaagtcgtgtttgcataaagcaagggaggaatgccagttctccctggtagaggcagactaacccttggaatctagaggcacgattagagtaagactatggtgctaagagacaggagtgagctatgcctttgtccaggtgcactgggctagtgtatctttctgctgatattctttctctgtactgtggctgacctttgaccaaggacgcttgctcttaagggttcctggtgggacaggcatattttgagcatacccagggtagggtgggtaaagggccaagactgtgggttggcttcaatcccagatggccacctgttatagaccctacaccaggcttcagtggaacctgaatcaccaactcctgggatttgaattgattcaaatcagtgatccatctcttagtttgctagctacagccatagaacccacacactaagaagacattgttgcttacatgattcaatcctgctccaagtttgctctatgatctaatatggaagagagtgctaaggctgacaagatgttaactatgagttattaaagtttttcagggaagtcaaaacatggactcttgctgccattaggaattgatgtgcacctcataatattaaaagacttcactaaag

SEQ ID NO: 47762 - DNA, 541 bp, Homo sapiens
tgactggctgctttcacttagcataacttttttgaagttcatccatattgtagtgcttcagtccttgttatgggggaataatattccattgtatggatatactacatttaaaaaatctatttgttattggtaaacattagagctgtttctactttttggttattatgagtaatgctgctaaaaacattgtatacaagttcttgtgtgaatgtgtgcttttatttgtcttgttgatatacctaggagtggaattgttaggtcacatagtaatgctatgtttaccttttgagacattgcaaaacttttttccaaagcagctgcaccattataaattcccaccagcaatgcatgaggattcaatttctccacattgttgtcaacacttgttactgtctggagccagcctagtgggtgtgaagtggtatttcattgtggttctgatttgcatgtctctaataactaataatgttgagcgtattttcatgtgctcactggccatttgtacatcttctttggaaatatatctattcaccccttttgc

SEQ ID NO: 47763 - DNA, 984 bp, Homo sapiens
gttttataattttagcttttgcccttaggtctttgatctgttttgagttaaaatttgtatagcgtgaggtaggtgtccaacttctttcttttgcatgtggctatctagttgctccagcaccatttgttgaaaaggctctctttctcccttgaattttcttgttgcccttgtcgatgtcagttgactataaattcctgagtttatttctgaattctcaattccactccactgatctaagtttattcttattctagtagtcaccattattttgatcttctttctgtgtctcagattttttccccctgtagaacatctccagtaatggtttacataagtttgtgattagtgatgttatagtgtgataatgtgtttatttgctcttacactttggctgagcttagaaatatttgtattttgacctttgatacggtttggatatttgtctcctccaaatctcatgttgaaatgtaatcactaatgttggaggttgggcctaatgcaaggtatttgggtcatgggggtggatccctcatggcttggtgctgtccttgggatagtgaatgagttctcatgagatctggttgtttaaaagtgagcggtacctccttcctctctctcttgctcctgctctgccaagtgatgtgcctgcttccgctttaccttccaccatgagtaaaagcttcctgaggcctcaccagaagcttagcagatgcaggtgccatgattcctgtatagcctgcagaactgtaagccaattaaacctctcttcttgataaattacccagcctcatatatgttttatagcaatggaagaatggccgaatacaacctttgagatgtctgtttcactgtcatctttgcttcagagttactgaagaaaagtctgatgatctcattctgttttcttagttgataattggtttttattttatctctttctctgcaagactttcagattttctctttatatttagcgttctgaaa

SEQ ID NO: 47764 - DNA, 1591 bp, Homo sapiens
gtgtgagtcaccgcacccggtcctttccttcttcttcctcttcttcttcttcttccttcttttctctgtctccttctcctttttttcctccttgtccttcttctgtctgatgcatagtcaagggtttgataagtgtctgctctgtgctgacagtttcaggagcagtacagaaactcctattttgtactccaaataatccacaagaattaattggatcacctcgaaggaggaaagagaagctcaaagagatcaggtaagttgcacaagctctgaatcccagcacaccgtgaaaacgggcttcaaatctggtctttctgattccaaagtctatagtcttacctgtgattcactttcctgatttgttaaaaaaaaaaaaaaaaaaaaggatgcttcatttgcttaagtaaaattccagggaattttcagcagaagttttaaatgttggtagagaattttcttgaggcaaaactgataatcataaagcttgtctggctaccaaaattgatctggtagtcaaaacttcttggtaaagttatcagtatagagacccaagagaaacaaataagaagaatctgctactaaattttggcggagttgagaaattttttaatttgagctttcactctaagagataagagtctgtgaccaattgtattgtgtgttttgcattgctatgaaggaatgcctgaggctgggtagtttataaagaaaagaggtgtatttggctcagagttctgcagcctatacaagcagggcagcagcttctgcttggcttctggggaggcttcaggaagcttttgctcatggcagaaggcaaagagggagcaggcatgtcacatgagagggagcaagagtgggggaggaggtgccaggctcctttaagcaaccagctcttgcatgaactaatagagtgagaactgaatcattaccatgaggaggacaccaactcattcatgagagatccgcccccatgacccaaacacctcccaccaggccccacctccaacactggggatgacatgtcaacacaagatttggacgggacaaatattccaactattcacccatgttccctaacttgaagggagttcacattaggacaagttcactgaaatctttgttttggaatggggatggataagacatcatttattaagttatggtttttagtttctggctttggctaactcaaacaaaaagggaatatttcagactggtgcttggtaaatcatagaatgacaaacaattggaagaccaggttaaaatgaacttggaggacattaagtgaattaagccaggcacagaaagacaaatactgcaaattctcacttatatgtggaatctaaaaaaagttgagcttatacaaacagagagtagaatggtggtcaccagaggctggggaaggaggagttgaggagatatcggtcaaagcatacaaaatttcagttaggcaggaggaataaattcaagagatctattgtacaacatggtgactgtagttaataacattgtgactgtattgaattcttgaaagttgctaagagagtagattttaagtgttctcacttaaaaaaataagtatgtgagataa

SEQ ID NO: 47765 - DNA, 5048 bp, Homo sapiens
ttcccagccatgtggaaatatgagtcaattaaacctcttttctttataaattaccaagtctcaggcacctaaaccaattagaaggtgtgccattggcacacagcagggtcctggtgtctcccccaccatccagccaccactctgccaggtgtgaatgtattaactattgctggagtgaggtgaaaggaggcagtcctgcagaagggccactgccactgggatggcacaggagggcgctcgagagactcaccttagtgactctatcaactggtgaaaatatttagatattttcacaatcgatatggccttgcttgtatatacagggtgattataaactctcttgccacttatcacagaagtcgaagtttcatcatttcttttcctgtatttggtttatgtgcaacaatataggtttattttccagttctggaaaataatcatggttaatactgactgagaactgatcatttcctttcctctttataccaaccaatggggcaggtaccattattaaagggggaggaaatagaggttaaataacatgcccccaatcagtagtggggaaatgaaagaatcaggattcaaagccaggtttgtctgggtcttgggaccagctcagcgtctgtgctgtactgcccgggactcctgctgccaattctttctacctcattatccctcaaccctgcaccagcaaatccacagggcgtgagatgaagagaagagaggaccacaggcgagaaagtggcagcagcaagagaagatgtaccatgaggaagttctgggaggttctgcccgtctttctgagaacaggggagagacagagctgagttacaactgcactgcttcttagcttcttagtttctcttcagaattagtggcaaagaagagttttcgaagtctttagcatgtattaaacgaagaattttgtttataagaaaaaattgtggatcgttcccatgtttgtctggaaaactcttgttaaacttttgtgcagctagtaaattaagtcactgtttattctgtgtagtggaaagcatgcttaaactctaactcaggagacctgattccaggaatagttaagcctgagttcattataaaccacttaagttatctgtgtcattattctagtctgttaaatggagggcttgagctggtttcttgtaaggtgggatttggctaagtgctcttggatacagttgctcacctctttgagcctcagctttctttttggtgattatttaatcgcatgtgataacaaatacagggtgttttgtgtaatgcctggaatggcactgagattgtctccactacagtaaggaggtggtttagaaattagctaatttattaattaatggcctatagagcttcatgtaggttggtacttcaaagtcccattcatatggatcatgttcatatttatatattcatcacttttatttcaaaatctctttttctgctgagatcaactgagatttctagaaagcagtcctattgtcagcactttgcccagtacatttagtaagaacttgactagcattgactcaaacagttctcttagaagggctggcaccttttgtttcaatttttttaaacattaactgcccataataattgaagcatgaatgcactttctttggattatgaaacaaatcaatcacagacatgggaattaggtgtgttctcttgctttgttcaatatcatgcattttttttgtctgagctttcactgtgtccccagaactgtgcttggtgctaacagtggccccacagagtacggctttatattcaaggagatgacaatcttgttggaggaaaaaccttatacatagaacaattaaggaacaatgcaagggaaacacacattgcaagttttgattgtacctattttatggctatggtataaaacaaagcacctgttgttcctgagagtgaagggataagacaataactacaaaaaggtgaaatgagttaattcaaaagggaacattgagcatgtcattttcctattgaagtgctattatttggtatcggcttcctttggtggtgttggtttttgattccctctgccccggactctgttgtttaaagatgttctttctatgagggatcttggatgcattttagcagtgtttccactgccctttgttttatattctttgatgccatcccaggtacatcacattcttgctagatgagtaaaggtaagcatacttagaagtcaaaaagaaaaggctgaagtggtgacttagacttgagaaattatagattccatggagaaaactgtgtttaaatcacaggacaggctgaaaactcacattaccacctgatggaagtgaactctacttttataggttactaggagaaggtcagccttctgtaaaagcagataaacaaggataccattaccagagtttcaagtaatttaaattaagaactgaacattgatactgatatgatttctagtttattatctgtgacagaacccagtagcttattgaaaaactatcatggaagaaataactaagaaataaccatttaaaatatatcaggatataatgaggatgaagctttagataacacaaaaaggcaatttctctttaggctgaaaaataccagacacagatatatcgacagagtgacctgccagaatccctactttccagcccatctgataaaggtcaacgattgaacacccaaacacgttgatacacacagcacctgcctgatgaaaaccgttaacagtgtttttctcagcccagagtgcactgttttcttaaagttttgaaaacagtaatctaaatttccctattccatgagtaaagttctacttttttctttttcacactaaacagcattcgatgttttagctgaaagtcaattaagaaaaatgtattgtgtctgtgtttttcttgctttcttttaagcacctctaaaagaacttgttcttcttcctgaattgagaacgaggtaggaatgaaagactgaaacggtaactctcatcataattttattattatgacaagttgggtttatgaagtatttttccaattactgcctccaattgttaaataggtagataacatgccagctttaactgccaaaaacttgtagtccttaaaatattttttgtagtattactattagtatcatgaacagaaatagcagtgataaaaatcaaatcaagttttgtgaacaccaaaattccatttgcctgtgtgtggagggtggtttaggattggtagaattaatattctttgcaaacggctgcacctagcatggtcgccttgaagccctgggagttctctaattttcctggctcgagagacttccattaaacaagaaaatgaggtgggaaaggtcagaggattcacagggtaacaggaactggacctgaacctgagcttcatgcagtccgcagattttttaagtggtttgttttttagaagtgtttgtcacgacctctaaatcattgttaatttcatcgttaaactggcctcagagagattttgttttaaagagacaatgcagttagaggatcgtgatctctgaactcagaagcccagaactccaaagctggaagccaccagatcctagcaagtgaagctctgtcaatctggagccgcagattttgaccacgtgtgcacagccttccatctgggcaagcccttttctctccaccactccactccacagctgctgtttcttttcttttctttttttttcgctgaattcatcatccctccctttcccatgccgagacttaaaaggtttcaaatacttcaaaaatcaatgatttctaaatcacctcagatgacttacatacaatgttttattacattttcccagagcagaatggcatattaagaaatggttttattttcaactatattttctcttaggaatatagagacattatctcaaattattacctcgaagagacagagacaagaattttgcaccattctagttctcaaatcattttaggtattttatttcattttgcctaaatctcttagacggttatttcctcgtatcacttaaaaattacattttacttgggcagggcctaaagaattacattgaaaaactaagaaattattgggaaaaaattccattagcacaactatcatgatcagaagaaattggctaatttcagtgtcttttctttgggctcttcatagaaaattgttgaaatgtgtctttcataagtaactggcattctgaaattgatttaaagctgtagaggggaagaaaagctacattggaaaaattaaatcttaggtttggagatattttaaaaaactcaacaagttccatgcccagaggagtgcagacactgaccctctttttcagctattagaggtgaggaaaaaaagttgtgtggttggtgtggagagagagagacacacgcacttcctttagccatcatcctactaacaccttcacagtacattttcttgctaataatcccaaccatttctacagggaaaagtgcatgttcctgttctctggtagaagggccacccaaggaattcaggttcctggtgagtaagaatgacagaagtacccacagctcctgggccattggtctcctctatccagcctccactgaccttgctgggtccactgcagttttcttcttgatttaactctatgagctctctgttccttcaaagtactggagcttctggccttagcacatctgtttctgcagccagagcaccttcactgagaagcagacctctacttggctgggttcttactcaccctattggtgcctcttccccatccccctcctcctcctcctcctcctcctcctcctcctcctcctcctcctccagggaacatatagttggcagcaagggttgcagaacgaatgaaggcatgcatgaatgcacatgttggaggacgaaggttctgtttttactctcagtgcaccaaaacccagcagagttaaatagtggaaggttcttaagtgctcaagtgagtagatggaggtcataaggcaagcagagtgggaagggctagaaggagaagaaaggagaaag

SEQ ID NO: 47766 - DNA, 3546 bp, Homo sapiens
gagaattagtagaaaacagagctagagtcaaaaacagagtgagacagacagaaattcatagatttgctgtctggcccagatctcattggataactagagcctcccttcttcctttgggttgaatggtctttactcattctttatgtagaccatcctttacttccacatggagtttgtatgttcccatagacaccaatactttacatatcagaacacttgtcattttattaaaaattgttttttattagtttcttttcccactagacagtcaatgtcatggatgcaggactatagggtcttatctttttcatcacagtagccctcgaacctagcacagtgaaagttgcccataatacattactaaatatttgttgaaagcctaaagcactgggcaaatcattttgactttccagacttcaggatccccatttgtgagggagctggtctatttgatacctaagactcccctccagcacaggtcttctataattttgtatctacatggcttcctgcctgatgccaggaacttaagatttaactcaagaagacagggatgttgcttgcaaagaccctgaagatcttgtcatccaaactgtgactgcctggagactgtttatacaggatcttgaactgggctaggagagtgcaatggatggtagtcccagtccttgtttgcagggagaggaagacagcgacaaagcatttctatggaaagaaggagttgctcataagtctactatggacatcaaaatatgctgatgagccacagcaagttcattacaaagggatttcagatagaagcctcctccttcagagtgaggaggaagaatcatccaggaaagagagaaattatgtgtatttcatatattgctgtatgtacatattaatcagccagcaaatattaagtgcattcatgggcaaaatgccaaagagatgaagagaaaaatcagactccaaggatcatataatctgattgtggaagaaaggcatattcatcatgaaaatgtagcaaagatgttaagtgagtgtcttagtctattctgtgctgctataaaaaatacctgagactgggtaatttacaaaacaatttatttctcgtggttctggtgactaggaagtccaagatcaaggcaccagcagattggttgtcggatgaaagttcagtttctgcttcatgcatggtgcctccagaggacaggaacactgtgtcctcatatggcagaaggtagaagggcaaaagaggaaaaaccctttttttttctttttttttgagatagagtctcgctctgtcacccaggctggagtgcagtggctcgatcttggctcactgcaagctccgcctcctgggttcatgccattctcctgcctcagcctcctgagtagctgggactacaggtgcccgcccgccaccatgcctggctaattttttgtattttttagtagagacggggtttcaccgtgttagccaggatggtcttgatctcctgacctcgtgatctgcctgccttggcctcctaaagtgttgggattacaggcgtgagccactgcacccggccagaaaaactctatcagttccctttataagggcacctaatttcattcatgagggaagggccctcatgcctaatcacctcttaaagccctgcctgttaatactatcgcactggcaactcctgagttttggagggtgcacattcaaaccatagaagtgggataagccagacacttgggtttcctatgggtcctctccatttggttttcctgttaaagatttaaaagagcagaaacactactttattagagaaagggcatttgaacttggcctttgaacatggcaggatttggccacttagagattgggggtgccattccaggtagagagaagagcaaggagaatggagagcacttggcatttatgagaatagtgagggttcatgtcaggttacatgaagctgactcatgacaaattaatttggaaaggcaggttgtgaccaggctaaaggcatctggactttgctctagaggaaatgtgaaaccattgcagatttctgagcaagctgttggccagagccgtgcttcggggcgactcacaacagtggtaggaagctctttgggagctgggagagagagagagagagagagagagagagagagagagagagatgggaatccaggggagaacagaacaagtgagaaagcagctgcattgcggcccaggctggggttgctggtttctggaaagggggtagtgttgggggagtggggagaggggttaaatgtgagcttctgaggaagtacaggaggggtgaattccaccatggagaaagtattcaataacaagcctacagagaatttgaggaaggtggaggagtaaaggacaatgatgtcctcgagaaacctgctcatgaaacctgctcaagaaacctgaggaggcaaaagcctgattctaaagtgtgagagagcaacagcacaacctggggaggtggggtatcaagtccgaaccaagggtgaagggcagggactcaggtgctggagtgtttcaatgtggatcttggggttggcacttgcttgctgagttaccttgggcaagttactatgtggtcttagtttctgtaaaatggagatcatgatgtaaccacttggtagggctgttggaaggatggaaggagttcagaaacagaaagctcccagcacagagcctggcccgtaataaacagtctatgtgtttgctatcacgagggtacttttaaagaaatttagtgcagatgagtataaatgagacgtggagtgagtagcagaatcaacacaaggtttttcttataatggatgagagattgtaaaacacatttgcattggggagaaggacacatgggagagggaagaaatggaagacacggaagatttgttggaggcaaatttagatccacgacaaaagtacgggagtaagtgcatggggaaaacttagtattggagggaggaaaaatggcctcactttgcacttcgaataacatctactttctttacctggtcctccaaaggccaccagggccagcctctggcctgtttctttagccgtaactcctccattctcccccgctgccatttgcacatcttgcattttctcagagctgccaagatggtcgtggccgggccttcctctagctagcctatcttcctgcagagcccttccctcagcttcttacttggctgaatctgttgtcttacccagctctcactttaaattccgaagtccttccctgaccgtcaggtccaaagtagccattcaacattccttacattacccgtttttccatctttacatggcattgatcttcacttggtgattccttgtttatttatttattggtgtactgcctgcctctcttcaccaacgtataagcttcattacagcagagacctcttgcctggtcatcacagtatccttggctcctggcacatggtaggagcccagttaaacgtttgttgaataaataaatgaatacatccttctgtaatatgtgagaaaagtgggaggcaagtctaggt

SEQ ID NO: 47767 - DNA, 757 bp, Homo sapiens
agcttaaaccttagaggcagatagccagttagaacatttggcatatgaagcttagatagcagaagagaaaaattaaccaaggcaaccctcaaaaatattgagaaggcaactaagaaaaatttcttatcactgacagactgcagtattgagttcgtgttaatgaagaaatgtcagaatacataatgaatcaataaggagtgtcatattatggcaagtttcaatgttggtgtcaatctcgactgccaggatttatggtagattatataatggaatcctgagttctgagagatcaaaggaaaatgctggctctttcttcatccattctcttaggtcaagcctatgcagcaagaagccaagttgagaattgagcaattatctgaagtgggcagtggagacggccaaaccagataatatataaccagaaagtcaccgtggagggaaaatgtggactgaaaataggataaggggtggaggtagaatgtcaagccatttggtcagtgtccacagtccaaatttactgaataacagccaattccttacttcatgtggttatttagagcgagactagaggacaagtgaaaaaaaaaaaaaagagttcattcctaaggttgttgcatgtttgtgcaaaatttcttcaaatctctgttattatctgttacatgtctaattctgagtacttccagagattgcatttcattactttagattagtgggttgaagtggtggaggaagcccatataatctgacttacatggag

SEQ ID NO: 47768 - DNA, 1686 bp, Homo sapiens
cgtggtggtgtgcgcctgtagtcccagctacttgggaggctgaggcagaagaaatgcttgaacccaggaggtggaggttgcagtgagccgagaccgcaccgttgcactccaatctgggtggcaagagcgacactacatctcaaaaaaaaaaaaaaaaaaaaaaagaagaagaagaaatggaagtcatcccgtgggcctgagttggtgtagtggattatggcctgtgcgtgaatgaagaaatacttgccaatggcatcagtggtaactagcttaagccctactcagctttgtaaaataatgtaatcaaggaatttgatctgaacaggtaagccaaacattgattcttcagtgcctattgataagtgagactacttttctttttaacagccttatttcacttaagtggggagtcaaactagctttaattaaggaaatctgtagaaatcacccacatctccctttccttctctgttaaaaaaacaaaaggaagaagaaaactaggaaggagtaagcacaaagatctcttcacattctccgggactgcggtaccaaatatcagcacagcacttcttgaaaaaggatgtagattttaatctgaactttgaaccatcactgaggtatgtgtgaacatactagtttcctctttctctctcctgactttgtccgtgaattgataagatctaatttggtcatcagtttggagaacgatttttcatttaatttctttcattatcaagtgtgtattgtcaggggcttagcagtacacctactatctgatgggcactctacatgcgttgcttaggttgaaattaaggatacaatctgtgcactaccaccatttaaaaaaatccccaagtctactgtgtgggtgaggtttctttgcatagtatcagagaggttaaccaatttatttacatactcaatagtccactctaagtagggaaaatccaagctttttttttcttaagaaagagcttttcattcttttttccctcagagctttaccatagtttccagcaagtgaaaacatttcttgatttgaatttcacaacctccttctcctcttgccagttgtatggtgctaataggaagcaaaatgtgagtgtgcttttaatttaaccctaaaataggggaatatcttcagaatttagactttacatattcagtgacctacctaaaaatagagacatagttctaaccttctcaatcattaagaaacatttctattgaatttaattattcaaaacaacaggtagcagtttcacaagggaaaagacaagccatgccacttgtatttgtggtcaccaagtaattacattattttttatttaaaattaagataaaataacttactgactgtcaagtccatttctcatttcctccatagaacattttaaaactagttcacaaacctcttgaaaagtcatgcctctagaaagtgcaaattgtcaccattgcctagaagccaacttgagaggctgtgtatctatgcagcattttgcaaatccagtagcaggcatgtgatataaaagattaaatgcacccctgatttgtgaatactatcctagccttcaaaatgttcaaaagcacaggaagtctgcacttttaaaaatataacctgcccaaattgcaagggaggggttgggtgtaggacctaggtctgtctgccaatcagcttgagatgcc

SEQ ID NO: 47769 - DNA, 723 bp, Homo sapiens
aggtagtctgtcccttagcagagctcaaatattgtgctgggggatccgtttctctcttcagagccagcaggcaggaatgtttaaatctgctgaagctgtgctcacagccgccgcttcccccaggtgctctgtcccagggagatgggagttttatctataagcccctgactgggactgctgcctttctttcagtgatgcccttcccagagagcaggaatctagagagacagtctggctacagcagctttgctgagctgcgatgtgcttcacccagtttgaacttcctggtggctttgtttacactgtgacaggaaaactgcctactcaagcctcagtaatggcggatgcccctccccccaccaagcttgagcatcccaggtcaagttctgactgctgtgctggcagcgagaatttcaagctcatggatcttagcttgctgggctctgtgggggtgggatccactgagctagaacattggctccctggcttcagcccccttttctggggagtgaatggttctgtctcgctggcattccaggagccactagggtatgaaaaacaaaaactcctgtagctagttcggtgtctgaccaaatggctgcccagtttttgcttgaaacccagggccctggaggcataggcacccaagggagtctcctggtctgcacccaagggaatctcctggtctgtgtgtttcaaagaccatgggaaaagtgtagtatc

SEQ ID NO: 47770 - DNA, 1097 bp, Homo sapiens
ttaaaaaaaaaaagaaaacatttaaaatacaaaaacaaggctgtactactttaactctgaccttagaagactctcagttttataactgtttagagaaaatgtggaaatgtttgctggccccaatctttttattactcatctctataaagaggcttttaaggacatattaaaaagtttccatctctcttgtctcttgcctttcttctcatcttcctttcttgtaccccaaatggctgaaagcaagaccctgagagtctggaagaaatatattctggtcagagcagactgagctggagctggcctagaaccttggatcctgacctcagaattgctgctcaaattactgctctctgaaagagtgagctcatgcatgtttattattactgtgaacaaatttagctgttgtttcacccaaacattgaagttctcgcttggacccctttgcttgtttgtgcttttgcaaatgtgttttctcatgtgctactagaaccaagatgaaagcttcagttctcagaacaggtgccacgaccgaggagacaaaacaagagctatagaggggtgtggtgtgtgaaactgagaaagcaggtagtttttcagaaaaactgagagccaggaatgacttcatccatttcctgtaataaggcaatggtctgaccttgaggaacctattagagtgtgcttctaaacagaggccatttcgaggctgaatgtacgggagtatttacctttgactgttttctgaagcaaggtattttataaactgtaaagtggcttatacaattttaggaatggaaagttttgcaaagtctccaaaatccctgggagttttgaatgtgcaggccatatgaattctttgtagtttcatggtcttgctgttcagcattctttagagtcacctgcatggtagaagtttagtaggaatttgggtagttatgggctggtttctttgttttcccaaatagaggtagcaaaatggatgctaagaagcaaattacttttactattttagatgcctctggggacatcctgtcataatgcaacttaaaatatactcgtctcctcagttcctttttatgtatttatttaatagtcttcaa

SEQ ID NO: 47771 - DNA, 335 bp, Homo sapiens
tgattgaaatctaaaaattagtgtttgtattttaagtgctaagatcagagaaaaagtcacaagtttcccagactgagttaggcaacatgtgactcagagttataaggaatacctttcccattcctgcattgcaaccagtgttacagttacagaagtgactagtgtaacttcccctcctgggttccagctgccaggacttactttagttcttttaacatatccttcccaccaaagataagttttttgaacagtttccccatgagtgctccccccaccccaacttgtgccttttattcatgtctttataatatttattggttggctggtgcaattgc

SEQ ID NO: 47772 - DNA, 951 bp, Homo sapiens
ctaggactgtctgagctcagactctcctcgggtgagtcttgctgaggctgtgctgtggggcaggggggtgaggttcccaggtcaatggagttatgttcccagaggattatggctgcctctgctgcgtcatgcaggctgtcaggaatgtgggggaaagccggcagttacaggcctcacccagctcccttgcaacccccaaaaccggtctcactcctgtgccctaccaacagcatcaagtttgtttgcaggcagcggatgagcaaggctaagaacttgccgcaggctaccagcctcccagcaaagaatgtaagtagggctttcatgcctcccttcctgttgaatctgtacaccaaattcactccctcccccaagttctggccaggtgacttcatgtttggttggaattgttacaaagttcagctggaggtttccttctcgctgtggtcttttcccagttcctctggccaccctccccaaggacccctgtgagacaaggtagaaatggcttattaggggacccagagagcccacagggcttttccccttgctttctctaccctttatttcactcagctgtctaattaaatcagctccaggtaagttcatatccttctcccatgatctggagctgcagattccccagtgagggtgtgtgttcgggggtgggctatccccctttcctactttcacagcttgggcactcacagtatttggggtgtctcctgggtcctgtaggagcaaactgcttccttcacagggtctgtggattctcttggctttcctggtatattcctgtagtagttctggagcagaagtttatggtgtgagtttccacacactgctctgttcatccaagtgagagctgcaatctagtcctgcctcctttccaccattttttggccttgacgtattacatttattttatgtttgaagttttggcagttttatttt

SEQ ID NO: 47773 - DNA, 4840 bp, Homo sapiens
aattataagcaccatcaaattactagaaaattcttttaacactctgcttcttagttaaaaaatgattcctttttgtgataatcttataattttcaaagtatcattttagaaattttaaaaaattattcttgttttcattcagtccatttcatcagaacttagattttttcttccctctacagtatgtggtcttgatgtgctttctccttgcaaaataaaatctttagtttcaggatctctgtgttctattccttcaatttaaaatcataggaaaaataactatcatttccttatgtctgtctccaattcccccatcattttctgtgagccaattttcttctttttcttctgtctactgtaaggaactttttactctgctctattctctgcaattcagggctcacaatttctttgacttctcagattatcctttgtacttgtgtctactttttcattaaaaaaaaaaaggcttcggtcttattttgactttatcatctttatattgccatatttaaaacccatctgcttattgattgaaccaaacttttcatcttacttcatcatactgaatgtataacttctgaatgacttaaaaatcatcacataatgtgagagaattttctatcatattcaggtgactgcattgtaagcaatgaagttgaagaaaaatagcttataatggatataataccaagaaataataagaatgagaatctgcgtatatcatatactgggttaacaagctcacaaggcaaatcaccattttattagatatttaacaaatcatactagtactggaggaagtatagcagaaaaaaggagtatggacattgggattagctgccttgctaatcttttgtcagtccctagtgacatgcttttgggttgagtcattgttacctccctgagctgtttgtttataaaatgggggtaaatatctcagatgtttcagtgttgtgacatataaagcgtcctccatagtacataataccgtaagcactccataaggtaattcttgtccttttaaaaagtatacacttttgagttcaggacacgtacactgtaacctagttgtaaccattttaataaaagaaggttttgatcatttttgataaatgtactacatgaatagttaacttgcctttcacttcctataccaacggaaattttggtaacaaatttaaagaaagcattaggttgaatatcccatctgattaaatgtcaactaaatattgtttctggcttttaaaatatttctaattcagttataaaacaggtctattactcaggaggctgaggcaggaaaattgcttgaaccagggagtcggaggttgcagtgagccgagatcatgccattgcactccagcctggcgacagagtgagattccgtctcaaaaaaaaaaaaggtgaaatgaaaaacaaaaaagaggggtgaaatttctctgcattctccctttctgctgttgggaaagccctttcattaccaagaatgcatggaattctgcttattaatttctccatctatgtgtctctgtgaaaaatactaattatttacaattttgtaagctatgaataaggtctatgttttctctgaaattatagcaacaggagcatttcccccttatttgggccgcaatcttttcattctgattcttaccataacttctgacttctgactttatcatgtcttctgatttctactaaacatgaacagaatgaatgacttctagaaatggatacaggtgtaatacatataaggccagggaaccacttaattatctttacaaagtactaggacttcagaaaaatcaaatgatgaaatggagctagctttagtatgttctacttatcattggactattaatcatgtctgtctgatgagttacctaggacttcaactgtttttatagatttaaagaaaatattataaatgtatcttacctggatttaagactggacagctgattttggatttttttctgctaccctgttgttgatatcactgacatcagcctttgcattttgactggaggctcctttctctctttctctctctctctctctctctctataggaaaccagtagttatgtcaggttgctaagtattttcccactgaaggacaaatattctggagcagtatatatttagcatttgacatttgataaacaagcttgtttgagatattttcaatacaatttcagctttggcaattgtaagcaaaggatccagttggtaattggtgaaatgaacagatgtggacacgctgcctgcatcgagatgcattaatttttctgaaaagtggataagatcttgtgagaatgaataatggaattcaaatcagatggggtgagatatttgatattcaggaacaaatcacagtataatagatctgctactttgtttggttttaatggggagttgctaatgctgaaatatagtcagagaaaaggaacgtggaatttctatagaggagagcctggctctggggtaatactactgtccttggtggaatgttgtcttttctgaagacattggttcaattcaatacatgaaacattcatcgattattatttagaaaagctaatctactgacaagacacagagttaagtagtgaaaatacagagacctagacacagttcttattaagaaattttttaatttaggtggcatatttcagagagaaattctctgcttggggcaataggtacctcctttggaataagcatggtgagaaagaattgcttctggcagattagtgagaagagtgagatattttctttcgatgacctctctattaaaatttgagtggtaaaactttgtgatgattcaggctcttcataattcttaattttatcatcctctaataccaggacttgcccagatcaatattttaggaaacagtcatgcttgctaaacccagggatttctattaaccactagataagacataagtttgtcatgcaacaagtatttattgagtccataatttgcccagcactgggctttggtactctgggccttgatactctaggttgtgtcagagatgtctaatatatttaaggtgacagagttcacaaatgagactttatgaaaatgaatatccctttttaagtctcgagaaatatgatgtgcacccgcttgaggctttattaaatctccagcgagcatgaacttgtttgtgacccaattgtagaattgttgtatgatgactatcccactggcaggcacttcttgtccaagagaatgtaattggatgttggtgactcaagcaatcctgggaagactcctccatgaccaaattaaagacaacaggggcttggtttgtactcagctctacaccaatcagcatgagacaaagaagagatccatggcaaagtggggagactactgtttattttacaagctagagaaggaaaactgcagttcctgagttgcaaaactgctaagaaatgggagaacacagaactttacaggctgaaccttggtgtcttagttattcctcttggctacagaatgccaaccagtaggagattcatcactgagatattacagggaaatgaagccaggcaagaaaaatatgtattccctttcttctcagcccataaattttgttattaataaatcagactcttatagaacagcttgccacggctgtctctagaaatgtttttattagcagaatttttattaaaataaaatacacagtagttttaagagtgaacattatagttttaggtcataaggggtgtcatggagaacacatgtggatgctacttgccagttacttgatctaggccttgactcttggttttctgttgctcggataagttagcatgatttgacatgcagttaaaggtgtggtaacctgtgattgatttcccattcttgatgctccctgcctggacttctcggaaaatttcaaaacaattcattcttctatgagggctgcctccttggttgcttcggctaaacagtgttgagcaacaagttgggaaaggaacgttgcagtaacttttaaaaattaagttagaaacaaatgtcatcaaagtaaatgataatttgccaatatgattgagcaaaaagatgaagatgcacgctccctacgtatttgctttgcagaagaattaatttgaaaaataataacatattttaaaatgaattgtaaatataaacacatgctaattgcagaggggaatccctgtgattattcagcagtttgtgtttgtcaagtgcttttcagtcagtccattccagctcagcagggcagaggcttgggctgttgtaaacttgtgggcagatacccagtgatggggcagacatgagcaggtagggctgacagcatgtgaattgagttttcttcagtcatgctgttgcagctgctcccttccctcattgctgagtttgccacagcaggtaggaacctaactctggagcctgggatgaaggagaacccacattgggcttgaggaacaagatctgccaccctggtaggccctggttaaatctcatgcaagtgtagcaatgagagagggtatgattgagttctaatttaggaggaaaggggataatgtgccctttgcacccccaggagaaatcattgctcatctgtgcctaagtagacttatcaagggcagttggttcacaatggtgtatcaccccaaaggactatagtgttatgagaacttgccagtgtatttgaatttgggtgctggcagatgacatcatgaggtattatggttacccataaatatgctagtttattgagaaggtggtagacatgctagtggatgagagggaaggacagaagcagttagtaaacagcatctgcaacaattcag

SEQ ID NO: 47774 - DNA, 630 bp, Homo sapiens
ccttcttgtggaagttagtaagtctacaaaatgttaattctgcatttgaatgatcatttgggagactcttattgtcctatttgcactgaaaaagtcactgaatcattattttagaactggaataacacctgagatctaggccagcactttgcaagttgtgctctatgggacttttcatggaagtggctgaggagttgccttgaaggaaggcagagggagtgggtcttgggacacccttccagttataaaacaggacgttgattctgttttgtagttgcagcatcacatataatttcatttattaagaggatcccacttctaaaaataagttgaaaaccagtgatttaatccagcctctctgtttgcatatgaggaaatggaattccggaaaggttaggtgatttgtccaaggttgcagactagactatttattaatagagtagggtcaggaacaaaagcctgctccttgctggtccagcgcctgttactagttacataatgaatgctacctattgctgcacagtgccaaatcattgcacttttcagattttactctaatcaaaagaaaaaaattaaagtgcacttccaaatcagtacttatatgcaagagcttcaagaaacaaactagta

SEQ ID NO: 47775 - DNA, 778 bp, Homo sapiens
aatttccctctttctgctaatttcttgctttcttttatcatctttccatccatcctaacatacagttccagaggagtctttaaatccttccttattgcctaacaccgaggatcatttgctgaaatcttgttgatttttccctcagatcaacaaaggattttcagaatagccctgatttctctttatcaccacggtgctgtctcacgtcttctctccccctcctcctacctgccgtctcttccagactcgtctctctcccccaatctcctttgcgcactgatgccaaattagtcacaacaaaagtgtttacgtgatcgtgtcacccactggtaagctcttaatggtcttcccttacacattatctcccatttcatctcaggagccttttattaaccactcttcacagtctgactcagccctctttgccagtttctctctttacaaatagcaaagtctatgagctagattactcaatattccctgaataggtcttctcttctcccacctcttggcctttccagtaccattcaatcttcctggaaattcctgaaatttctttcctcctcactcagtcaatgttttgagacccacatcaaatgctacatactatttgttcctttactgatcatgccagttggaaatgattcgaatctgtaaagcagggtgctatggaatgacatttcttatagccctttggtcatttgggagcaatgtctaacataatatcctccaggtccatccatgttgttgcaagcgacaggatttccttcttgttaaa

SEQ ID NO: 47776 - DNA, 1973 bp, Homo sapiens
ctgtaacccggttttaaatgggtccagagcatccccattgctagactactgtgctgaggaagggcactggctcattgttacatcccatgaacactctgggtctcctagacctcatcctctttgagcttctctctctcactctctctctgcgcattcaggagtgtacacatttctgtccagcaccctgaagtctctggaagagaaggaccatatccaccgagtcctggacaagatcacagacactttgatccacctgatggccaaggcaggcctgaccctgcagcagcagcaccagcggctggcccagctcctcctcatcctctcccacatcaggcacatgaggtgaggcatctgtgggcttcctacaggagagacataaagaaaacatgcccccaaacctatgtgacagctggccgggaaggactggtgcctgcatatggagagtgcacttgtgacagttcctggcatagaataagcataaatgctataggaggacagaagagagaggttttaaatctgcgagggtcacagggcaagtgtcagagaaggcatagaggaagcgatacttacgcttggtttaaagcatgtgctttggggcagtggtttagagattgggtgcagtgtgcaaataggaggagggggccaatcaagagaagtcagtgaatgtacacatcccctgaagacactgggtacatctgttatggtccctgtgtacactcggatattctaaatgagagaccctggggccagatgcctcacggagagtcaatgttgactccttcatacctgttgaaccccttcttgtcacccccattgccattaccctagtctaagccaccatcattttctgttggacttctgtgccagtcactggatgtgtatccctgcctgtaatctagatcctttctagatcattctccatgatgtgtccagagtgatcattctagaaccaaatctgatgtcatcctcctgcttaaaacccttaagttctcattgcttttagataaaatataaaccctttcactttgtttttattactccttatgattcagcccttacttagcttacaaggacttcctcatgtctgagctctagccataatagctgactgttggatgagtcatcggggggaggttcttcttcaggctgcagattggcggtcagccctcctgacctcagctgggctcactcacacatctgggaggcagctgcctgaggccagggtgactctgctctatgcctcatgtctcctatcctccttgtacccacatgttagctgggacatgttctcatcgcaatggcagaggcatgagaaagtgatcctgtttgggcaagtgcattttactcttttctttcactcatgtccactgacatttcattggccaagcaagcatgtggggtgtccagagtcaaagagggacatgttgccggggtcatgactatttctgagcaataatctaacctatcatagctcagatctcactccttgcaggaagcatctcctaatccttaagacctagttggaacttacactctgttcttccctatggttactgcccattttactatttttctgcccatttagactgacaactctgtgagccatcattgcaatatggcttgcttacccaatatcacctagcatgatgtagagcacatagtaaatactcaacaaatgttttctgtaagagctaaggaaggacatcagcagacaaaatagagtctttctatgccaaaaggtgaaagtggtctcatttccattccattgtcctgtaatttggctagccaaaagcttagtggataccattcccataagtagacctcatctgcagggaagagatggggagactgctgggttatttattgcagactccagcaggaccacaacaatgattcaaagtgatgacactagaaggacaggtgccaatgggtgatgaagccacaatgacgatgtcaagtggtatcactaaaag

SEQ ID NO: 47777 - DNA, 1075 bp, Homo sapiens
aaagaaaaactcataagaacttttaacgcaaaaggagtatttcatcaaagaaatatgacaccttggacaggatgctgaaagctatgtccatactcaaatcctggagaaatgtgtcccggttgtctttctggtgggcagccgttgggtagggaagcttgaggagcacttccaccatcttcctggcacctgggggtgccagtgctcttggtttctgaggcccctttcctgcctctgcttcctgctgaggagtggttttcctctgtaccttggcaccaggaggagctctatttctagccgatgacctgagaccttgaagcctgcagcggtggcaccctcactagcagcagggcctgtctcagcctctgacagtttctggggcaggctcaccctccccccgttgccacaagaccatctcatggcccaggaagggaccacagcccacagtgaaagcacttggcatctatgtagaactgacaaactaggaactgtcacctcactaaatgaacgtgaaaaaagataaaactggagcaaggaagcctttgggcaaacatttaaaaaagtgatttcgaaagtgggtgggctgacctcagtggccaggccaggctgggtgcctgggatgcactccaaagtggcagacgctaggccgtttgccaagagccagtcgccccaagggttgcaggacagacagccctccgagcgacttcccagattcagtgcgctgctaggcctttctgcggacctgcaacctgccatcagctgccttttcattgagaaatcagtaattgtgggaaaggccagtgaaaggtttgtgagccggttaacatttttacaagctgattaaattctcaagttcaccccggactcaatggagtttaagctgaaaagattcctgagtatttccacatttccaaccagaaagaacatgtttcaatacccagggccccagaccacaggctggaagggaggggagaagggcagagagagggtgcaggcagctgcaggaaccgtgtcgctgtctcggtagctgctttacacgtggtctcagtgccttgaggacgccaggcgcagaccagtt

SEQ ID NO: 47778 - DNA, 1248 bp, Homo sapiens
tttattcctaaccctgtcactgtcttgagtggattactcttcatgtccttaatagctttagatccattgatcctcactcactcccaccccacttcagtcctccacacccttgtatgctgtcatcgctcagctggacttgtagttatgtctgaagttacttaaacccctttcttgccaagactcttgtttctcttgctcttttaacctttacttcatccacttggaaacccgcaaacatgactcaatccagagtcatttatgcatgtgtgtgtgttactgacacacacacacacacatacacacacaaacacgcacacacacacatacacatgcaatccaagctgtcaaggagatactgcaacttctcaaattttcaaaagtctatgtatattcacactcacccttatcttatgctttccagtttcactgcttaaacctgactctcccacagactctgagaatcccataaactgctttttcaaggatcttggtctattaacatcctctctggctttgttgactttctctcttccatccaaaaacacctgcacgcactgtttcttttatttgttttcttgaaggatatcacattttctaaaaagtccacagttcacaatgtgacggatcgtcacacgtgaatgcacttgcacacacaggctccatcctaatttctttgttttctccctttcatttcataatccaacttctgaaagggtgattttcatgggactttctcaccctcgatccacttctaaattccagtttggactttgatcctgatgactgcagagcttgctctcaccagcttcttctctttgacaaaaaatgatgaattttcatcccttcccttgccagacctctagcattcaatagcactgacaaaccctttccggaaacactttctaaaaaatctctctgttctcctcccagctttctagtcattcactctttctcttttatagtttgttttccactcactcgccaatattggtgaattgataagctccagactcacatatccagatgttcatgcatatcctgtaggctcttcaaagtcaacatttccaaaaggaaccaatttaggaaaaaacaatgaagtattatccatcttgcaataaatggaatgtcttctcacctaagctataaacttgggatttattcctgatttctcctcccccttaacatccactgcttatgggaggatggagtgctaacgatgcatatcctggccacagccttggttcaagt

SEQ ID NO: 47779 - DNA, 1403 bp, Homo sapiens
aagataaatgcacccaaagtactgttattgccaaatgggctcaggtatggttactcattacctgaggcacagcacatataagggaaaacacacagcactgggaaacattatagtcaccaaaatactcaatgcattttagatggcaagtgtataggaaaatagtggtgcagaatagaaaataacaaagttgatttattttaatccaaagccaagctttagacggtctgttttcatatttttctaacaatagctgttcttctaaattgtattacacatttatacagtagagtacatgcacatatgtagttagctagttagcgtggagaccacaactaaatatatatgccatgaatttcccatcccccagacaactaaaacactgtgcaagtaaattattgtttaaagctcagagcctctcagtattattgcgaaattataaacaaatacagggtagacctctgacatgttaagtaattcagctgtctcgagcacatagtttcattttaactgtcattgtttacagtgtcaaagattggcccggcccaacggtagtcaaagagacttaaggaatctgttcctccctctgaatctgcaagatcgaaggctggtccctgaaatcagccacggagagggaacatggagccactcgccaggctccagtcaaagagcaaagccgcggggacccactggatccttaccatgaccacagaggggtgggccgaaggcgtggggaggagctccccatccaggtcctctgtcccttccgccagcccctcgacctcggtcaccgtcagcagcatggtggcgtgcttggctttcatcgtcagcatcttgcacttggaattcaaagaagcgatctgctcctggtagcccttaattttctgcgccagctcctgaggaaacatttcccccaccggggtgtcagagcagcatcaaaaggaaacagaagtagtagcgttcatcttcctgcagggcgagccaatgagcgcgcagagccgcgcgggcccgggaggcaggatgtgtaggcggcgagtcctcctgcatctcgctaccgagccagaccgcaggctgcgcggcgcggcgcaggcacagccaaagtgcccgagcccgcgtccccgcgtcggtacaaaaggagaaatgaggggatgaggccgaatgagtggtttctaatcgcgagaggccccatatggaatcatgaacttccgcaacattaggaactgacaactctctttaaaagcagaaagcatctgaaatttaccagatggttcctgccatggaaattaggtcatgtgatggctaaaaccacaccaaaaaaaatgcaaggctcagctcttaccctactgagtacattcaacagagatgacagtcatttattttacatagggtcacatactcaatagcct

SEQ ID NO: 47780 - DNA, 1908 bp, Homo sapiens
gcattatcaacctgtctaaccataattattctgtgactaagaatgcctgacgtgggaatgctacccaataggtgtcatcctcatttacccagcccctattcaggcccctacgaagtcactctggttctcacatctctgacattagaaaaaacacaatggattttcttttctttttttttttttttttgaaatggagtcttgctctgtggccaggctggagtgcaatggcgcgatctaagctcactgcaacggctgcctcccaggttcaagcgattctcctgcctcagccatccgagcagctggaattacaggcactcccaaccacgtccagctaacttttgtatttttagtagagaatggggtttcactatgttggccaggctggtctcgaactcttgacctcaagtgatccacccctcttggcctctcaaagaacacaatggcttttctcacagtgcactctttttaaataaacacaggctgctttacttcctaaagggggcacgtgagaactcaccaaaagagtctacagtctgcgttctctcttcagcttctgagccagatcatctcaggacctggtgtctttttcactgtgccccatgatgcagtcaacccaccctactgctcgagtcatagaaacctgggaatcatccttgactcctccctgtctttcatcgttgactcctccctctctttcacccaattcagtctccaaattggagaattccagctgcttagtatctcttgactttgtcttctcctcctaatctccaaagagaggccttgtcatcttctactgaaatactgaaaccatcttttatattgtcttactgtcctcaatgtgttttccaaaggctgctaaatttgctttctgaaaatacaagtctgaacttgtcctttgcaggcagaatatcagtttcagaggcttcagagtgacttcaggataaagtccaaattcccaacagacttttaggatctttttcttatctctctattcttatctcttatcccttgtaccagcaccagaaaacactcctcacatttactgctaggatttcagcatacatttttatctaaacacattccacaagtaggctgtcatgtttttcaggactcagcccatcatcaccttttcctgagaagcctttctgcactttcctcttaaacccctggtgggcggttgggttgagcacactcctgtgggctccttcagcacctgggccctctgtctttgcacaaatcacactatattgtactgtttccttctatctgtcccctcccctaaataatcaactccctggggtggggacagggaatatcctttgtaccctaaatgcctaaccaaagtcctagtttgggaaaggactgtatgtttgttgaataaataaacaaacgcttgtattcccagaatttggggatgccaaggcgagtagatcgcttgaggccaggagtttgagaccagtctggccagcatggcgaaaccccatctctactaaaaatgcaacaattagccaggtgtgatggcacgtgcctgtagttccagctattcaggaggctgagggacaagattcacttgaacctgcccaggctgtagctcagtggcgtgatctcggctcactgcaatgatgacgaggttgcagtgagctgagatcacgccactgagctacagcctgggcgatagagcgaaatgctgtctcaaaaaagaaaaaaaaagtcatgataaccttaaggacttcattatattttattatatgcaaatatttacttggaaaaaaattatttcacatttaagttttctttaaactttcactacagttattaatactgtggaaaatattttctatattttggattgtagccataaaaaggagtccaaaaggagccaacaggccagagtagtaacttttt

SEQ ID NO: 47781 - DNA, 2111 bp, Homo sapiens
cactctgtgactggaatagaaagaaagggaaagaaaaaggaaccaagaaagtgtaactgattttttcatattataccatgtagagcaattatcaacttctttgtccctctgtgacagaactgatttctatgctttattctggtacataaatctaaaggacaggaaatggaacagaataacaaaaacaaacccccaaacctagaatcattataaatagagtagcataaagaggtagaaagctttattttatggcatgctgcatttgtttcaaatacttgatttaaaaccagacactgctggaaatactacatgactttcttactggcaggagctattttgaaatgattgtaatataaataggagcagagaagtttactaaatttccttttaaggacatccatgaatcagggcattataaaactggaaatattgaaaaggctttcaaagatactgtttaacagtgaaagaaacgaagaagaggttacactcttgctcattcttcggtctcccttgtaggcttccctttctcacattctaaagaagctgccattagcttcaaaaaaaaaaaaaaagtctcgggaaggtgaccagggagggtgacgtagagttctgttaacaggctaattcaagaacagctgtcaaaaccacacagaggagagctaatcggggagataactatttgctgtgctgtaggagattaccaagtgagtcttttaaggctataaattcaatcatttagttgtatgaaatagttaactggcaagaaaacagctatgactctctgtctatttatgcccctgcccacaggccatttttcagactgaatggctgaatacagtattacagactcttacaccataggaatgaaagtaaaatgtctccactaacaacaaatgtttcctaccgcaaataataacccaaatctttatttttacaaaagtttgatatataagaaaaggaaacaaatcagactttgcttatttaatgagataaatacttcttccaagtgtgcatgttgcgtgtttttagttagcaagattttttttttaaggaatgatgaaagtcaaaacattttttaaagcataaccaccaatagaaaacaggaagccaacttacttgtcctttgtgccagcattccactatctcctcatccgtgttcttgccttccaggagggttaactgctgagcccaggttttcagaagggcactgaactgttccagggcctgctccagttgagccacttggcctgagaattcctgctccgaaagggccatctggctgaccaggttctccaaacagctctgcgtttggaatacactgtcttcccactgcttccagtcggcacgcagggcctgcatctccgtgtgcatgagctcacacccactggcagttgtgttctgtttcacttcgggagccagcgactccactctgctgagacggcttgcaccaatctctctggaatctatcagctcctgtaatggaatatcaccatggtaactgaagagcctgtgagtcacttggactgcaagttttcaactgtgtacacagggggaccctgtcctgccaggaagttttaacaagtgtgccacaaggacccagaatcaattcatctgtccactcttaaattataatagcgggagttgtcatcacgagtgcctaaggcttatggcaaaaaaatcccgagaatcctcaatatcctgaaacagactaaacagagaccctgaaatcaggcattattcgcacacgtgaaaatgtttagtgactcaagtgtttgcctgtggtggattgctcctgtgaatgattaaacccatatttccctcaaagtggatgctcaagtaaataaagatcgtggcagaactgtgttctgctcacggtctctatactcaattcatcttcttcaacagggtggtggcttaaatcacacttccattctactaggaatcaagcagactcatcacagcaaaagaatgagccctactcgattccaaatacctcaatactaagtaaacatttttgtagcatataaaatgaataattcattcatagactgacttactcaaaagtttaaagtaacctctagactgagtacatttattagtatttttttacc

SEQ ID NO: 47782 - DNA, 1016 bp, Homo sapiens
tgttcaacaatttatttatgcaaactgctgaaaacatgaaaaagagaagttatattgcatttcactacagttcagtaatccaataggctgttgttccattttaagattgtggagtcaacataaataaacatgatctttgcagtcagaacagcctagatttgccacaacttactagctatgcaaccttgaacaagtttctcagcctatcagaacatcagtttcatcatcactgtaatgaggaaactattaacagctacctcacagggttgcttgaaagctaaatgaacaatgtatatgcaaaacacatagcacagtgcctggaatgtaataggcatttaatgcatgctacattattactttctatcttagcaacttgaggtgactgtaatctcttttaaaatattcagtgtaaacaaactttctcttataattcttgcagcattattagtaatgttctgggaaacggctattgcataatctgccaaataagaacaaagtggacctcggctaatcagcaaacgtgcctgtgcatgtctttctggtagcaattcagtcagctattaaattgttcctgctgtgttttttcaaaaaaataagtaccaacccatctttctttgctaatgttaactctaatctgcgttagctgcttgcttttgcagttattggtatgcattcacattctgtatctataggatataaataaaatcaatagaacttgctttgcgtgagccagtgttcaaggtccaactacagattgggaataaggaattactaggcatttacagcagaaatactagcacatagcacagtcttggtttttgagtcctactatgcagtttacaacactcccatgtatttagacagtgttaggtttttcttccaatcactcagtttccaagagtacattatactcaaatttcttgatgacaaatcctatgcaatttggtgtgttttcctttctaaacctactccttttgccaccagattaacttctaaggcctaccttgttagatctg

SEQ ID NO: 47783 - DNA, 494 bp, Homo sapiens
ctggttgcatggaatgtgtacagtcatctcccaacaccccggcagacgcctgaaaccactgacagcacctaaccctacataaaccatgtattttccatctgtcaacaaattggctaagtgactacctgggaggtagcatagacagcacagatatgctggacaaagggatgattcacatcccaggctggactgggcaggatggcagaagatttcatcatgctatttggaatggcacacagtttaaagcaaataaatggtttatttctggaattttccattaatgttttcagactgctgttgaccacaggtaactgaaatcatggaaagagaaactgcagataagggaggactactctatgtggtgggggaacatatacataagagatgacattgtgaagtaggtaaaattggttttaaaatctttaatactctatttttcaacttccacatcttagtattgtgtgttcctgtgatttctctatacccttcttttt

SEQ ID NO: 47784 - DNA, 2110 bp, Homo sapiens
ttaaaaggcgccagctggtacttttaaaatctttgaatttggtgcctaaatccgcgcggtccaatgagacgcgtcgcttgcatgcgcgcaccaataggagggcagtgggtgggggcgccctcgtccgcgcccaattggaggctgccgaggcggggccgagccgcgaagcccagcccccttccagcttaccggctccccacgtccggaaagatgctacggccgggggcgggacctccgagcacggggaggccgcggcccggccacacgtgtggagggtctatcacgcatgcgtgcgcccgccaagattccttccgccgtcttctggaccggcctcctgcaagtcctaatctcagcccaaattcagcgctggcttccatctggagatctttgatgggtacaaatggtagccgactttcttcgatcatctctcgaacgggagttcggtgagcagcaactcggctcgtccgggaatccagactttccggaagacggaccctccccccagtccagcttagcccgcctctctaggatttacgcgcgcgctctgctctccctcctaactcgaccctccccttgacccacgcctctgcgcaggcgccttggcgggctgtggctgcggagttggcgggtcggcgcctgcgcactggagtcccccgcgattttttcctccggggtgggcgaggaggctgtgcggccttccccagcggctgtagcaggagacctgcggctgcatctcccagggccttccggcggggccgagggtaggaccgaggcacttcttccttgcaagcgcgtttatttgtattttcaaccacacttcagacgctactggtttataggaacgttaagtttactgagtgtgcagctacgctcccctgggtttttgttcctttccttaaagggccaggtgtaggagacagtagtcctgctcccaaaaaaagaataaatagaagtgcccgccctcttgggctggacccccgtggccaagggagtttttagtgatggctggcatggacgtcagtatgaaagtgtaccggagtattagtgatgcttaacttttcacaatttgaatatgcacttaagtagggcagtgcattccctgaactcagctttatggctacagcccagtgaagcaacgggatgtgaactccaaaacggcgaatcctcctttgctgtttccctctggtgcctttctgcagcctcggagtgagttcttggctgtagtcagttttcagtaccgttagtgacgagtccggtggggcgcggccaggattaggatgaatcatacaagtgctgggtggatcctgtctttacctaaaattttgataattagttgtggggcgcggccaggattaggatgaatcatacaagtgctgggtggatcctgtctttacctaaaattttgataattagttcatcatgggttttttgcctttttcatttttaaaaatgttaaaatagtgtcactcttgatgacttaaatttttttcatccccgtaaacgcacctgaggcctgtgcttccttgcctcaccctaacctggccctggggctagatcctggagattcagggttgaaaagacaaagtcctgtcctttagggagtttacagagaccaatgggaaagaagttgacagtgaacaatttcagaacacgaaagaggatatgaaagaatgtaatcgggggtagagaatgcagattagtataggttaaggattttggatggtcaggacgctttctgaggctttgaacccagatgcgttgaactggcaatgcagggctgcataataagcagagggaataataagcagagggaatgcctgactacgacttagtgaacaagagagagaggagatgaggttagagaggtaggcagaagccagatcctgtgggaccttgtagtttttccatgcagagtttagactttcttctgattgcagtggttagctgttggaaggattttggcaaggtagttatttgttgatagaatattgaaattataatagcttttttatgtaaaaaaaagaatgtaaatgttagcctttcattctcacaataggttagcattattttcagtgtacaatggtcgtgcttctcagtgtgagttaattct

SEQ ID NO: 47785 - DNA, 2114 bp, Homo sapiens
tcaccatttcttctttggattgtttcaactgcctcctccctggcctgtcagccaccagcgtttctggagaatactccaatttatcctcagcgcatgccaccattaacttttctttacaaagacgtgaattctctgcttaaaaacatttgctaactttccatggtctataaaaaataaatccaaattctttgtcttgcaaggttcttaactatttttctggcttcatgtttctatgacatcatctcccacctattctatacttaggccatactgaatttcccaatttagtacctttacccacgtataggtctgagattctgagtcctaagtctgctattaacaagcactgccctgatactactgcaaatgggtctccacaccacactttgagaaacaccgctgtggagcccatcacagggacagtgccttatttatccttgctgagctaatgagctcttgcccgagtccacaactaataagcatgtaaaaggcggcagagcgccgtggcaaaggagcacaagagagcccacaggagaggatgggatcacagcacgtaatgatgtcctgacctctgatccaaaataaaaacggctgcaagtgagtaaagagtttcaaactcgggtagtgtgggcagtggaaaagtcaaacgaagagtcaagaatgtgctctgacgcctctcccccgggcccgacccttaccgtgcagcaagtgctcagtctcccgcagctcccgctccttctcgttcagcagtttgatcaccgccagcaactcgggcctcctgaccttcaaatgggcttcagaccccgcctggcgctcgaggaaggtccgcaagggcccgccccgggtgaacagctcctccagcggcgggctaccggagctcaggggccggcgggctgggccaacggcccggcggggccagagccaccgggcagcgccccacagaacccgggaccgcatccttagtccgagatcgcggaccctgaccggaaccggaagttccggacacagcagccctcgcgacaacacccagaatttggagataagggtgagagcgcaccaagccccgcccagcgcaagcgttgctttttaaaggattttccggaagccttggcgggaacttcctgccaagcgtgagaacgctgcgaacttcccggaggccaaaagttgagggggctgagcggagcgtgattggggaggggcgggcctgggagaccttgggcgcctcctctgaaagcctcttggtaggtatccggttgatgggtgacgtgtttggccggaaagggagagcagcagattgcccctctgttttctgatagtgaggatttctttcccatgcactgagtcggggcctccagagccgcagtgcagggcagtcgagggtccgctgcagggcggaggtcacagccgcgcaagtcgtcagtctccggtgcagggctgccgctgagtcttcaagagcgagttttattatggacaggcgtgtgtttattcctcctccttttttcctgcttatgtttctcttgtccacggtgggtgaggttcgtggtaataaggacttgataagtgtattatgagataaccactgaatgaatttgcacaatagacgtgcgtgcccttcatctgccgcgtcatttacttgctttcaaaggactttattattcacctgcccattcattttcacttagtcccacttatcgtcagctttttaaagaggtggagtgattccgtgttacagcaacctacagcccaacaaagccttcagatatctgcctccaggagtccaaccctcatccctttccaaagaactggtagcggataggtgccagcaataccgacatttattggcacaatgctttgcacttttcaaaagacctgttcacagctcaacggagaaataaatatgagggaataaacacaaccaagacagtcctgggaatgcaagggctaaacgctcaatctgagaactgccactacctaactggtttgggcagcgtctactaagtggtatttcactgttgagagaggtgatatattagaagtacgaaacttctaatttattcataaaaaataaaatggtaaaaaatgggaacccttatcaaggttaaaatatccttagg

SEQ ID NO: 47786 - DNA, 1112 bp, Homo sapiens
actaagtgtgagatctgtagagtgattgactgggtctagcacttccccagtgtgacttttcagaaaagtggcagccatttttggttgtgacagtccttcaacgattatgtgacatggccttgcctaatatttcagattctcataaacagactgcactggctatattctgtaatcttaagcatcagtcccaaaaaaggactctgttgcctcagtttatattcctttgcacaccaccctaataaagcgaggttggtttttgttctcaagcagtgttttaattatatagtttgcatttataagagtaattgtgacttaagtagatatgaatgataatcgttggtttcttttccacattaatctatcatctctcaacttcattgattggaacatactaacttatgaaaaactcctcatgatcatgacttgatcctcaaacaaactgccttgaaaagatgaccatgcagcctaatgtgaatagaatgatttatcagaacagtctataatcttgctaagcaagcagccaagttggaaaatcttttctgcttcctatcttgtgaaacgaagggccgaaaatctgtgtggccctgaatgatttgggaatcgcagtaaaatgaccccagtggatgaatggggtcattttactgaatgaataaaatgatgagtaatacaaaattgtcctgttaagctgctcgttacctagattccctgctaagctgcaggaagtcagcaagagtcctcagccaccagtgctgaaaaatattgatggcctaaatcattttgtggagtaaatctatacataattataggagattgtttagaaattatagtaatttgatattatgttgattttcatgaacatttaaaaattaatataaatatcttgtgctgtatgtttgttttcccggaatgtacttgttaaaaattaagcgctgactcacagaaacatctgggcaagagtgtggatgactcaggacaaactcatcactgttattgaaacacagagagtatggcttcctgaaaatgagttgtgaacattatattctcataaaatgggcagtggtctcaactatttctccaccctactcatgcatctcagtcctccccacatgatt

SEQ ID NO: 47787 - DNA, 512 bp, Homo sapiens
gtgttagttcttctatggatgaaagaaaaaaatgtagacaataatacagaagaaggaaattaatgaaacaacagaaccttccaagctccttcctacaccaggcatcctggggctgggcctcatccagcagcccagcttctcctggatggcgcatgaggcttttggagggctttgaactactttcacaacatccgctctgctttctggcaggcaagcaaggtttggcagggattccaaaaataccatgaaagagagaatgctgtactttcagtttttactccaaatagtcagtgtgtggctcgactcaagacctaagcattggaaatgtgttccaccagagtagctacgggaagaaagggttcaccgctcttgtgacataggtcagagtaactcagagagagtttcagttggacccattaatcattccattaataacttattttaaaataaaagcagacttagccaaaagtcagtgaatgatgagctgttagaaattcctaaatatctgtatt

SEQ ID NO: 47788 - DNA, 829 bp, Homo sapiens
cttacagttcttattttgttgtgttaaactacaaggtagtgaggtatcatgatttatctaaacattttttcaaccataattatttcaaattataagagttaaaccagaaacagtggaaaaaatgggtattaacttaaaagtgggcgatatgttaaaataaatgagtattagctgtattgagtaagctaacactcaaagtgattggcttttcttcatgtttttgcctttgctttggtgcaactaatgatataccagctctttctttctccccagaacaagatcttatgtcacttcctcctacattccaaagcaatgaaaacagtatttcctgaaggagtcatctgtatgtttacaaaaactttccagcatattaaattaggtagtttttcttatttactttttgccgtgggggcctcacaatcgcagtgctgtttagttaagaatcaagtcaagaaaagtttgggaatcggtgtatgtaacttgagtcacaacttataacatgaatctctaaatagacattccagccagaaagagaaacaaacaggtttcccaacctataggtcaagggtactgaagctggcaaaagccagacaaggtttagagtgatactgaaatctaaaaagcaatacaacccaagtccaggtcagcgcaactgcagatgcttatctgggtggcatcagactcagatgtaccatctcaatcactttcagtatagaaagatcttcaagaaaataggctgcaattgtccactgacaaaaaccactttactaagcctcaagctaagataacagatcaagatccatttactgcttcatccatgcaccatttc

SEQ ID NO: 47789 - DNA, 479 bp, Homo sapiens
gactagagtacaaattttagtctttcctcctctgtgttcctctatgttttgcccctcatacacttattaggaaaaacaacagctccattctgatatcactgggttattgtatcagcctaatgtatctctattcccaagaatgccaaagtttaaaagagtcactttctgtttcagtaaatgagatagtaactggagcaattttagcatggattgttgcataacattgacctgttggctaataaatcccagagagtgtgcaatactgttgggtaagatccttgttttaccatttctgaatcaagccttactcggagatgatcagaagaccacccccatgtcaggggtgcgcaatatctggactgtttttacctcccttggtcttgaggatatcactgagctaagattctgctggtgatgtaaagacccaaccaacacctatgagccctgagtcaggctgtaatttgttagtgaagcagcct

SEQ ID NO: 47790 - DNA, 746 bp, Homo sapiens
accagtcccttgtggaagctccaaatctatctacacttttgtaaataaccccttcacaacactcaatgatgaccctgtttgagggtatcatctgtttcctgcagggaccatgaccatactttgcatgactgatttttttagcctgcacatcaatgcatctagcatttcactcttttccaaatgaaaaggaaactacaaaagaaaataataagctaaccgcagagtgcacaattttacataactaataaaatgtattaggcattttgctgcaaagaaaatgaaataaagatgttttattatgtacattagttaatgaggcacaggaaaggaatgttaagaaaagcaggaatgtttatctagttcatggtccatgataaccacagattgctgcatttgtagccacatgagtcattcaaaagtgatatgaacatgcatacataacaattcttctgcttttaatgaaacataagaaactgtcaagctttggaaattagaaacaaacatattcaatgctttttgaaaaatcaggccttatttaaaaagaaaaatgttctatcatcaaatgtattatgcatttattttttatcatttgaaataatagcttataaataacattggtccagaactaataaatgaatttttacaagagctctctctcccttaaataggtttaaatttgcttttcaaaataaacagcaaatttcctggatgtaaggaagagaaaggagtttccagaattaaaatcc

SEQ ID NO: 47791 - DNA, 1096 bp, Homo sapiens
ctcagaaaggccaagtactcagtctacttattataacacatttagaaacagaggtgaaaccaggccctggggctgttcactccccatttgctgttccttggtttgcttggatgaaacgtacctttcctgccatgacctcgaggtctggcaaaagggtccacaatccccatccagttcccatcagcaggcatggacaaaggccgtggcttgccttcagagggacgagaaagaaggtgacaagtttgatgagttctggaactttagtgaaccgttccctttatgtataacttagacctcacaataccacacccacttagacagaagcaataacaaattttaaaataaaagtattttaaagcactgtatttccatagcaggaaatagagtgctactaagatagaggcacattaaacttgagcctgtgagtctacagagcaaagcaactccaaagctaaaacccaggcactgaaagttaaaactgtaacatgatctcacccagttgggctttcatgccaggcagagtaatgactcaacaaggatccgcttgacagagatgaataaaggtctcatacttagaatttcattgaggtttatgttttcctcagattactcttgaagtctgccaaattcatccaacagttccaactaaggcagggggcggggaggagaagtcaaggccaacggcagaacaaaacaaacacttgaaacttaccataagatggtgttttctctctcatttttgtgggcagaatgttggtttccaccgagtacccaggcaactgatccgagtctgcaatggtgaatcttcgtctccggctttcctggtccaagaaggaattcggggactctgaacccttaggaccaggcaatggttgtttgcacttactggaccctccataaacaaaactgccattctcatccctggaagataatatggacaataattaagttgtttacaaagatgttctcatactgaagaattccagcagtgctgctacctccagcacacagaagataatttaaattctccttttccactggaggaaaagcattccttttgtcaaccccagttgccgctcaaatacatacagatcct

SEQ ID NO: 47792 - DNA, 921 bp, Homo sapiens
agatagcacattcctaattacataatggaaggcagtctaaattaattctgcttttcagaattatagtgaaagcaataaggaatttttttaaaaatttagtaaatgatgatgtatgttatctgaaaataaaacaagtgttattagaacttaccaggccttccccaggtttaatgtttggtaagtgaacttcctccagacatgcacactggctcatcacaggatctgtggtagatcggattgttttgtcacagatgccatttaaaaccttgacctagaattggagaagcaaatagtcaggaaagttcaatcattaaccaagtttatctcaagctgatttttagagaaatgcatttcacctataattgttagttctggttggcaatcattttgataattctgctcagtgaatgcatggcatttagactccatgtttaccatctgtgggaatagtgccactatttcagctttgtttagaaaaggcagcttttatattagctcctttatggccactgaagagcacaggccaggcagaaatcccctttcagcaatgaagtggaatcatctctccccaaccacctacctgacttttcaatgattgctcacagtctctgaataccaaatattgacaaggtaaaaaaaaaaaaaaattgttttgagactaagccattttttcaatggactttacttttttaagctgtttcacgtttataaaaaaaaaaaattgaacaaaaagtacattgagttcccatatatcccctccaccaccagcctccattcccagtttcctctattattaacatcttgtactaggtgtggtgcatttgttataaatgacaaactaggacgggcacagtggctcatgcctgtaatcccagcactttgggaggctgaggtagggggatcacctgaagtcaggagttc

SEQ ID NO: 47793 - DNA, 1071 bp, Homo sapiens
aagtggaaggattgcttgagcaaggaggtcgaggctgcagtgagccacgattacacccctgcacttcaacctaagcaacagagtgagaccctgtctcttaaaaataaaacaaaatcaaaatatgaggaaaatattacgggaagagggaagcaagggagaaaatggacactcaaggtaggtatcagggaaatgccttcaaccacaaatgccatgccttcatggctgtatgactaatgcatcacaactggtatcagactcttttttgtcaaaattactttatgcaccataaaaaagagcaaaaactcagaagctactttacttgctctgagcacctttctaagatcatgacctcaaaactccatgtgccttgagaacaatggctgctcaggactagagcaaacaactgccacgtgcagagacaaagttcacaattcacattccagaaacaaccagaaaaagcacggcttttcagaattgcatctctgttatggcatggtcaggacagaagggaggatgttctttatgttttgccaaatcagcagtagaaacaaatgtggaaacagaattttagaaccaagtgggacgtgaaaaaacaacaagctcttccttacatttcatagcctcaattcaattcaaaaatattttacaagcatctgctgcatgccaagtaacaggacagaaggtagtcctaagagctgatggtccaagaagaaatttttttttaaattaagatcacagaagctcaatcagttacagactggctaatataaaacttcctgagcctttactaagatacctaggtctgggcaatgagccatgagtgaaattgacatgtgtcacttgcagtccagaacatcagtcagtgtgaggaccttcatggtttttacctttctgccttggggaaaggcaacatgacatactagtgattctgtcaacctatgtcctgtatacatcttgaaatgaggagtcggaggtgattgccctctagccctgacccatttggatgtaaataatcaaggaataaactgctaaggtttgaggtttgggggttgtttgttcctgtaccacaac

SEQ ID NO: 47794 - DNA, 1406 bp, Homo sapiens
ttttcattaaaaaaaaaaattaagtgctctaacattttaggggaagtacaggaactattagttcgcctattttaaaacacacacaaaaaggtaatctttaattcaaaggccactggtcagttttcagagaaaccatctttacaatgatctaatttaaagcctttcatctcttcccagctctgatggaaaaaaaactgaggtggggagaggagagtagtacttcatacctgcatgaaaatcctttcaagaagaggaaaagcaaaaaaaaaaaaaaaaaaaaaaagaaagtgaaaatgacatactactgaccttctggactgtagtggtcaggtccaagcaaagctggataattttgttcttcgtgactgagaaatcagtgatccctgtaaacggagccctagaaggtagcaacaatcctcttaaaaaggggtagggagaatccacggggatcccactggatgttggtaagcatagctaccccatgggctactctaaattcctttttgttttgttttgtttgagactgtgtctcactctgtcgcccaggctggagtgcagtgggatgatcttggctcactgcaatctacgcctcccaggttcaagcaactctcctgcctcagcctcccgagtagctgggattacaggcatgtgccaccaagcccagctaaattttgtattaaattagtttttatttaactgttttctctcaagtgacacataaaatagcaatctgaatagaaagagagaaggaatagattaaaaacaaaacaaaacaaaaattgacagttaacatcccttctgaagtcaactaacagctttcataccaatcaaatcctcaaccattaatgtttaatctcagtaaaacacaacctttagcacagtttcactcttctctaagctgaggttaatttgttcctgctattaaccttttaagttaactggcaaaggaatcctaaaatctaccactgatcgaggactccttaagagccggtaaaaatgatatgaaaagaacaatggttccttttcctaagacaaagtacagcttccatgcagcttggactctatctactcttgcagggcagtaaaaggcacatctccaacttaccggtccagccacgccagcagggccttggcggcgccgatgagctccaccaccgaggtcaggaactcattgggggccttgcgggaggtgttgccatcgtaagcgggacttttccgtcggctacttatgtaattctgtaaattgtgggaagatgctctcagtttcagaaccaagttcttcatgttatcagtttcgaggccataattctgtggaaaataaaatcaaagagaaaaattcaaaacaatgcacaatattcgacagggcgcggtggctcacgcctgtaatcctagcactttgggaggct

SEQ ID NO: 47795 - DNA, 1385 bp, Homo sapiens
gcattctgttctgtcatttgtctctgcagagtatcccttcaccatgtccccttctgctcgtggtcactgtcacagctgaacttatgtcttgcccggatttctgcaataacctagaaagtggtggccatgctcactcccttcttcctcttaattcatcctctatcattccatctgagcaaaaccatcctgtcctttacagatcccagtccattagctcaacacagcatctcaagtcctttgggacccgtcctcttccaaacctccctgcagtcccatcatcctgtaactcaccctactggtgaggacacagtaagcacctgttctgctgagtttctccaaaagtaacaaaaatgtcacgcacaggttggcaaaaacagcacccaggccaaatcctgccagctgcctgtttctgcaaacaaagtctgaatggaacacggccatgactccttggtttacagattgcctctggctgcttttgtactacaatggcagagttgaatagctgtgatagagacgtatggctctcccacagagcctaaaatatttactacctggcccaggtttacaggcccttggtataactgacagcagcgatgagtacagagtgatgatgacctctgccgaccagaaaaatagactccaccagtctagtctggaattaagggaatgtgagtttttctttttttgttgtattttttaaggaatcatttcatacagttacactgaatttaaaaccatagaaaatgctcccccctcccctaatgaaagacctgaatgttttaggaggttccttacaacttttgagccactttattattttctttttgtcagttctcttgaggcataatttatagacattaaaagtcaccaatttccagggtacaactcagtgagcttggacaaacaggcagtcattcaaccacactacaatcatgatagaaacattcctatcacccccaaaaaaagttccctcgggcccctttgctgcctactccctccctacagccccgtccccagctgccactaatctgatttctacctaaatgagcccaatttctcctcctggctgtactccctgtcctgccccagtaacactggctaactcacttagttctggttctcaggcttcccatcagtggattagcaggcttccattagaactgacacccacgcacactactaattgcagctctgattttatcagtcatccttcgaggtttgtggttaaatttaatttgaagaacggggaccatgatgaaacataatgtctgaaaactggattggaaagctgccgtgcttctttcaggtctaaagatccatagttccaacatatgtttgagctactcagaagttacctttacttacaagagcagagaatgaaaaag

SEQ ID NO: 47796 - DNA, 2052 bp, Homo sapiens
acgtagtaatgagcccacagcttcaatttcttacaaaaggcaaaaacaggtggaatggaaggacagtcaaccctaaagcgctttcttgttcccaaagcaaactcaactttcttgttagtaaccaatgttctctaagacttaggtcaccctgaagacatcggaagacgtaaccaacgaacaaccacactttgagtttcacaacataagtagaagacatattatttaaacaaaatttggaactagcaaacacatccatgccaggataatttaagaaagtaaaaatagaaggaataccttagctcaaggattcaagttaaccagaaaacaacagtcagacgggctgccctcatttgaggtttctgaatgggtaagtaatgtgtcccagctgaaaactttaaccaggaacctctggctctcaagttgtagggctcccaagcctacgctgcctcaaccccaaccccaacagattctgtacaacttctgacgactgtgaaatggacccagcctgcccccaccccctcctgggaccctgagctgctgaaaaaagtctagccatggagggagaagcacccagagcagggacaggcgaaagaacagaagttggtattatctgaaaggatttttggagggagaagtttatgctgatctaaatcacaaaaaaagaaccgacatgcaaatcttaagtcaactgaagagatcatcagaattcagaatataatggcagccctcaatattctcctttgagtcctccttctttgctcctccctcaaaaaacaatgtatgaggagcttgaaagataatactgagggcagggaagaaacacaacattgacttatatgtttgaaggtgtgtgtgcgtgcatgtgtgtgtaaaagcatatacctatatctcacagcagacattaaaaatgcaaaatgagagactctaaagacaaaaacacaactgtggggatgaacacaaaacctacgcaatactctggtaaacatgtactttccaaggttgtttgttgtaattcagtaaccacaccattgtatccaattttgtaacagaccttggaccaaacaaggggaggggaggggaagagagaagccacatatgaaacagaagaaaggaatgcattttacccaggaagctgtactttttgcctcctctagtgcagcctactttgccaaaaccgtaaattcgatttggtctaaaaaccaaacaccggcaaaactatcctcagttcatgcttacgctgaatgaagggtagaattaactagctcccctgccacacagcaagtttatgtttttagcacgggggagaaccaactcggcacagagacatgcagtggccgcgacagctgcacccattgcttgagtgtcaagttgggcgagttctaccgtatggaggtgagcacatccatcacttctgctccacctgagccatcaggatttccatggaaaaaccattcagccaaccctctcccaacactgccatcatcatttcaaagtgcgtggtccaaacagccaggtcttgtattaaattaaaaccccgcatgaatagggggcggcttgatttacaaagttcccacccacacagtggctcatggatccctgcagtgaccccacggagggtgctggccgggttatcatcatctccagtttattggtaaggaaagcaaatcccagagactatcaggaaaaaggcaaagctaagacagaacccggacctcaactgggcacctagatccttgtggggtctgaggtggtcaatgaagaaataagtggaggggaagacagttaagtacgttaatgtgcagagtccattactgagtacttactatgtttttggcaccacgggatgcattgtggaaatggcataatttatagttgctgttcaagtagctgaagattaaacaattgtaaaataagcaagaagaagctctgcaccaactatacaggccaggagaaacagtatggcctgtggagccagaaggcctggattcagctctaccacttcccagctgtgtgaccttgtgcaaattacttaacctctctgtgcctcacttt

SEQ ID NO: 47797 - DNA, 1357 bp, Homo sapiens
tgttcttggaactaatggaaaacaaaaacaaggttagatgggaaagatatggccaaagtaaaggaccgtggaaggattgagttcagcagggtctaaagaatgtgcaagatagacgggggcttgctagagtcagagatgcccttgggaaggcagctgggccatccggatgtggggtggtgtgcccctggcacagccgtagactatagtgtcatgggagaaagaaatggacaggatgagatgatggactacgacatcacatgaaaggcaaaaactagccaaagagggtgccaagggtttggaccaggttcaaactctacactagacagaaaatgtggcacaaaagagagaggagaagtgtgggaagaagatgaggtcatgcctttcctcctgtgcctgctgacttgacagtggctgtgagtgagtcagaaagttgggcagagactgcgggcctcaggaggctccagaccagggccctgcggaagagctggcccaaggaaatcaccatttactgagcatatactatgtttacattgttcatggttaaatctaagtcttgttttttccttctgaaaagtctgcaagatcactcctgatctcccttgtacacgaggaagctgatggagagggactggggacattgctgaagatgacacagctaaaaagtggtagaactggtcttgaggtccaggcccatccgactccagaacccattgtcttcccactgggaggctcagccagagaagccgggaggtagaacaagttctgctaagaagccagcacctcagagttacaacacacgcctggcccttctccacctcgtccctcctggccaccatctctccccctgggcgcccttccctccccttctccaatccagcactgtgctcattaggcaggacccagcaataatccaccctcatccatgaagttttcacgccccctccccggtggaaatggtcacctcctccatctgctgcggcccttgctgtcctccctacccaccggcatgtatagacaagcttcaactcaggtgtggtgttctggccaccttatgccacccgctgacagatggggctgattctgctattgggcatttcccagggcctcttgctccctctcagctccatccaagtccccctgaaagctgcactctcagtcaaatgtcagtcttctggggacaggaggactccccagccctaggccttcctggggcggagccaccctgctgcacctctgacaaattccaagtactgtggctagctctgctccactacgtcctcctccaaactagaatgtaagtttctagaaagaagtcatttccctgtgctgtttgtagtgccttacacgtggtcgacga

SEQ ID NO: 47798 - DNA, 2240 bp, Homo sapiens
tgtgggatccagttttctctttaccattcctctcaccaatgggcagtttactatttataaaaggcagagtatccttgtttgatttgagattgaaactaccccgttggaagatgtgatttttttttccaggatatgcctgagttctatgcaacaaaagtagcacctaggctttattaagcacttaaaatatggctgatattatgataaatgcttcactcacattatctcatttagccctgaaaacaaatcctgaaagtttagtaacagcatgattccaagtttaaagatgagctagttgactaaacaatgtacataaattggccaacgtcaggcaaccatgagaggagtaaaggatccaaacttgggcagctcctgaacagccctggttctccagtactgtgtcaccctgcagcagccacaatgtttcagaatgaggaacggcccacccacaaacacactgatttatccagccccaacagagacaggaagagactgtgaatgaatggacacatgaatacattttctctccaggcaaaatccctaaaagtaaaacaattattctctattgcaggcaattaactacaggcatgtgctcccacctttacccaaaacagacgcgctgaagccagagccatggtttttataggctgattccaactttgttggacaaagagactttagggttttaccttcttccctgtcaaatatttaccaaagacctttattgccagggccctaatttgaacaaacagatgccatccttgaccatctcaaggacaaatgttaacactactatcacttgactttgagatgaaaataattatttttaaaagagaaaaaagaatgttaactacatgaaacaaaaaacaaaccaaacaactctaatctttacatcttatcaacagtatgtcactctcactataactttagatctgtaaagcgcaaacaaaactagcaataacaacgataagatctaaactatgcaatctgcttttataagaaaagtaaggtagtcttataatgtttttataatgttatagttacataattaccaccaaagatgataattaccaaccttaacccacaaaattggtgtgagatcttttgatgacaattaagtcattataacagattgatttcacatcatttaccactcccaggaagtctaccacagtttcatttaacaaggcagattcttcttagatttcttcctgaattcctaaggttgcttatggacatttgtacttttttatttctttgttattagttactactcttaggaaatgttccttttctccttaattcatgagagcatgactttaggagatggaatttctacagcatgactggaacattacatatcaagttaaagttcatcttaaaatctgaaaatacgaaaaagatactaatccacatgctatcttaaggaaatattttttcaatattcattctagggatggatctttttaaaagataaaagaaaagaaataagaacaccctcaggatgtgaaaacaattgataccaaaaaaagttacaaaacacaatttcaaattgctaaaatatacagatgaggatgctaaattcaaagttaaaataacagctatccatgtcctccaagagatcatatactcagaaatcatgactggggtcaggggtgacaggagcagaaaaattgggacttttttaaaaaggtaactattaaaaacttaaaatgtaccttgttaaattactttcaaatcacattccactgaattctaactttggactgttgaaaatggaagctttcccagaactgagtgtacgtttaaccccaggaatgatgcgacaacctcaaccacatgaacaatctggaaaatgacacaaaggggagggcgagcggccacacccttcagaggtggggttttgtgggttttgagttttttttcattctgcctaatcaattcccattcatttcaagtataacctgtgtgttcttacagggttcaggaactcagaaataaatacccacatggctgcttctggatctggtacaacaaatatatgattcccctgggcctgtgtctgagatgctcactgtatgtattttcaagatttcggtgtaaagtcaccctattgctgctgggcacgatgactcacgcctgtaattccagcactttgggaggccaaggtgggcagatcacttgaggtcaggagttcaagactagtcttggtaacacggtgaaaccacatctcgactaaa

SEQ ID NO: 47799 - DNA, 4977 bp, Homo sapiens
gccagacaggttaattcattctgtagacaagaacttctttcctaaggcacacatctgtcaaataacaaggaggtgagatccagctgtcgactgtggccaggtttagacagttttaaatctaaggccttctatggttctcataatcgccctacccagattcatgcaataccaagagtagcaaagtctacatgaagagctgcttatcagtagcatgtatttataaaataaaggttgggtaaagagattagcaaagagcactaaaaatagtcctataagcagacgagcttttgtaagtcgatagttcattaaaaagtcaatacttgagcatcattattatgagaaatattcaagtaatgggtcacgcaacttggaagattgcagcctcttatcatcttagccatcttttttagattcgaacacagaacgtatccaggtctttctactaagctgtatttcagggtccaaaagggcacaggcattttgtataacgtagtcaagtgccaaccacaggtatgtaacctagtaagtatcgtaggtattgagccagccatagatgttctttcaggtcaggagaaaacttttcctagatgaaagtaactcaactaactgataacgtcaaggcaactggctaacaaaaacgttttaatctactttcccttttaaatactcaacaaacataacaggatgtgattttacgcttctccttttccaatcccaagagggacaaaaacaacaacaacaacaacaacaaaaccagacacaaatcttgagggtgtgaagatctcactccataatcttcctgtgcgcctgttaccatttttctgattgtacattatcaactaagctggcagaggctcagaaaagccagggtgataagatgtaaccctttctttctgctacagcagaactgtccaatagaaatataatggaagccacaaatgtgagccctgtgttattttagattttctaggagacatatgtaagaaggtaaaaataaacaggtgaagcttattttagtaatatattttatttaacctaacgtatcaaaatactatcatttccacatgtaataaaaagtattaagatatttcatgttcttttttttcataccaagtcttcaaatgccatgtgtattttagacttacagcacattgcaattctaaccagccacatttcaagggctgcagagccacaagtggtactggttactaagttggacagagcggctctagaagtcaacagtagctgaaatttgcagtgtctcaagttggctctatgagggacatacagataaaatacatatcaactcagtttcaggaagctgccagcctagggaatttggcagcatcttgaatggaggaacacacctcatttcaagctagcgtgggcatggatggcttttaagctcatgcttcctaccaagtactggcaatgccacttactctttaccaagggaaacctagtcaccaaggcagaaacatgtgttgtttttagcttcattttatataggagtccaggaaattctgctcacttgacaaacccgttctcaaggagttctcccagaggagcaggaaatggtcagacatacccactgacacaccccacacacctcggacatcctattccacgtggtctatgtgtaagtcacaggcgtgagaaatgagatgtagcggtgatcagttttcattatgctgcagccatgggtgggacggtttgaaagacgacctggtcttaccagtattacctacctcacaggcttactgtgatgaccaaggacaataacagagagagctcttagcaaactgtaaagcgctacacaattctagttattactgagaaagaacaccattcctcacctggaagagcagatagaaaaacaaatagtaacttgaaacagagatgtcgttgggggtggggggaaaccatgaaaatacagattgttcttggtggactttgttctcttgaaagtacagaaaagggttgagtaaactctagtacctttccctcgaaatcgtaggagacattgaaaagtaagcgagccagctaggaggacaagcttctacctctgctcattccccccaccacccccccaccgccccagccccactgccttcctcatcccaaatattgtatgaatcaagacagtggttccaaacaattatatttctccttcccagtgcttacatgtggcctgaaaatgcagcgccaccggggatactggcgcctcccggagcaaaagtcactgcctcccggggagtcctggctcgaggtttctccctggcgcaaatgctatggtgttggcttttgcgcggccctctcgccttctccaacaaaaacagacaggctcggcggacccgccggagtctccctctacctgtccgacagccctgtcacgcctgcggacggctctgggcaggcggcatggacgaggtcccgcgggagtcacccacacaaaggcaccttgtgcctctgcactcgggcccccgggtcgccgggcaccgcaccggggccaggcagggagagcgccccccggcccgagtgccgagtcccgagatcggcatccccagccctcaaccgccacagaaaggccacccctactccctggtttaaagatagggctcccctcggcttgccacaatccgcaccctggaaaggaagagctcggagcaggtacgagagataggagcgcacaggccactcggcagaagtttgcattgtcaccgggctgtgccctcaccgcttctcgccgggaggaagggccaagtaccctcttccccagctcctcgtccgccccatccccgaggctggaggactccggacccccccaaggcccgcgcacctctagtccagtccaccacttgtttggggctccacttggtcacgggttccatggtaaaccgcttcgcctctcgctgggctggagagtcgcagataaagtgctgctgcctgcgctccggtgccccttcccgggagggcgcgcccgcggctgctcccctgcgcccgagcgactccgtcaagactgcatggccgcggtcagccagtcgtcccagcgcggctccgccaggggagcccggccctctccctccagctgccacagtccagctgcagctcctccttcccccgccgccgccgggatcccgggcacagctgctgctcccgagcgacggcagctgcaggcacgccgggctgcgaccccagacccctggcctcggctcggcacgggagcctcccggcccgcgaccacttcctcggatctctcgaggcgcgatcggctctccctcggccggtcttctcgcctgctggctctccggggtccccgctccgcgtgcgctggcgtcccggagccttcccggcgcaggtcccacctcctgcgccgccctcccgtgccgccctggcagggccgagcgcagagcgtgcgcgctcgggttgcaaagtttcagctccggttgctgcaaaccgaataaaagagagggcggggccgagggtctagggaaactcgtgggagggggcgggtccgcccgaagcggcggactcgggttactttccctctctaagccggtccggctcacacccgcagcgtcccgggccccgctttccttttcaaggggcgggttgtagatcgcgcgcgcaccctggagagcccgctggtttgtgtgaggccctggccctgtgggtagcagaacactctgtctcgctgtgagcaacaatacactaaaaaaaaaagaaaagaaaaaaaaaagtaagatctgcatgttctgttcattttaaatgctttatatcgtaatactactctgccattaagccgtcattttaggtttcttaaagtagaacaatttttttttttagatggagcctcgctctgtcgcccaggctggagtgcagtggcgcgatctcagctcactgcagcctctgcctcccaggttccagcgattctcccgcctcagcctccggagtagctgggattacaggcgtctgccactacgcccggctaatttttgtatttttagtagagacagggtttcaccatgttggccagactggtctcgaaatcctgaactcaggtgatccgccagcctcggcctcccgaagtgctaggattacaggcctgagccaccgcgccaggccagaacaattttatttcatttatatgttgactgaaatcgtaacaatgtaactcttttaatgctattgctatgaaatttcaactttgcgactaaaattagattgatggcttttagcgttatattttgctatattataatttcatatttacagagtgagctaatgctccttgggattagtcattaaccgtgagaggaaagctgttagccaagaaaaaaaaaatagctcgtgcacaatttcagcgcctggcaggggagggcccttccacattcatggactgcaactggggccagagttaatgctaaactgggggaaaatctaatttgaatgcctgcctctccttcaagttctccctgcatcctaaccgcccccccaacccctgccaccctcgccaccacccctcccctcaccccccaacaccccccccaaccccccacccccgccccgccccgcccagcaacctcttcctcccactctttttggcactgaatgattcttactttcaattacggttatttatttacatcttcctcttggagactattaaccccttgagggcagaacctacttgatctcatatagagttttctctcctccctttcttcctaccacctaacttgtagcacccagcacgggaccaaaggcaaggttggtatttattcattcagtaaatatccgggaatgcttcctatgtgccagccactgtattcattcagtatttgttgaattcgtgtgatatgtgctacttacacaggtctgtttggacgcacatgtggaaaaatagctagcagccagcctagcatctgatgagctggagcatccaagcaaaagaaacatttttaaaaagcaaaacat

SEQ ID NO: 47800 - DNA, 1594 bp, Homo sapiens
gttaaacatagatgcttaatgaccgtgtgtccctgtgatgattatgctgctcactagagatgcgtgagctcaactgtattgttttctttgacaacaacagcaaagagctgcatctgcgtgctcctcttaccccgcgctcatcagttccctgtccccagcaagaccagcaaaggccataaaaccccagctgagcctgcaaggctgtcgcagaggccccacagcccgtgttaatgcgtttgggaggtgtgtgagtgagtatgtgtttttctcctctgtgtcttctatctcccccttttattgagctgctgcagttaaaagaagaccaaaggttggcgggtgttgaatacttgcccacaatagctgcatctcacgtagtgatttaagagttcttttaacatcagcagcaaactaaaacacttaaacaaaagggcctttgtgtgatttttagtaacaaagggatctagaacgaccgtcttgatactacatttcttatttttcccaatcttacatgttattgaaataactaattggcacaaattaaattttctttctttttggagtatatgcagacaatgaccttactacttgttataaatcatcttccagcaggggaaaactaaagcaataagaaaggttttttgtctcctaataaattctatgacaagttaaaagccagggggaaatacaaaaataaataaaatccagcccagatttcaaaggcattacaacatagtccaagggtcaggcagcccaagcactgtagctgtgatataaggagatgttagggcctttgcccatttaacaacgcactgcgaaattgcagaacaaaaagttttgtattttcattcaaattttaggttaaaaaaaggtgttagggcctttgcccatttaacaacgcactgtgaaattgcagaacaaaaagttttctattttcattaaaattttaggttaaaaaaaggaaaggaggactgagaatgcttatatcatatgttattaaactctgccaaacagatttagctataatcactaagaattttaaaatagcaaatcctatatttaagaagctcatcagtgaaataagagttccttgttttgttttgtatgttttcagcttttaaatactaaattctttccccaaccacagctttccttatgctagattctggtacagtggatttacttttatacggtggcaaaaaacgtgggtgcactgcacaagaattataaaacatcttttggggaataattagaaaaatagatactgtgagttaggaagagaaaacatagataaagcagaagctgagggttttgtaataaagccttgtatagatcatggacataatgttagagaacatgggaaagcaaacctgatactcaaagctgtctttctgcatgttaggagggcaggagctgagatggattacaaagatttgttcatgctggcatgaagctattgtgggcagagccaaggctacacaaccttgtgtcctgggagcagctaaacataaggatcgggaaactgagcaatgcctaactgtatggaatagctgaagtaaatatttctctgaactttttccatctcaggcattcaggt

SEQ ID NO: 47801 - DNA, 2141 bp, Homo sapiens
caattcatcttccgaaacagacgggttcccttttcacctattcaagtgttgtgcattctagggtccccttcccgccttgcagacaaatgcgctcattgtgccactccagtccctggatcctatgcagcgggcatttcctgcaaggagctgctgcatgcctgtttccctcgccgcctgccccaacccgaatccaaggctttggtttctaatgttccctccctgtgcagttaaaacaattgagttcagttactaaatagatgaccaggaactttttcttggcgaaggctgcggatgtttagggcactgtccagtaaagttgtgaaaagcaactaaaccctgccgcttgtgcaaaaggaccaatccaccgggaaacaagggaaacgcgcacatttcctcaacttgccgcttcttgggcacgtttaggctcttattagagccgcgctttggagttgcctcctcctgctgtacaaacccgccgcggcgttcccccggatgccgcagcgctcactcccgcgtccgcggggcgcggggagggggcgaggcgcgggcggccccggagccaaggcgagggcagcggagcccagccgggcctacgggcggcgacgctctggccccagcgcgctcgatggtttccgcgcggccgccggggctcgcacggtccagtcgccagggggcgcgctagccggcgccgcggatccccgaactgcgcggcccgactcgagtccgccatattggatgccgcagccgctgctgccagcgcttcctcctctgtcttcgccgagcggggctggttcctgcggcccgagcggcggggaggtgaaacaggagcccgtcggaggaaggggcagaagggagtggagagtgtaggggaaggggctagagggagggggaccgaaacggagcggggcagagaagagaaggcgccgcggcccagcccctcccccgcccgccgccgacccgccccggcagcgcctctgttccctagaacggcgctccccccgccctagcggccatgccggtgccgctctgccgctgagggagcccttccccgccagcgcgtgcccttccactccgccccgaggtcgcagcggcccgctctcccgccagcgccccctcctcgcggccacgcagcagcccgcgtctcgctctccccacccagtgcagtggccgccgcctcttccgccgccgggctcggggcctccgcagcgacaacatggaggccgtgaagaccttcaatagcgaggttggtatggcagccgggttcccctgctcctgcccgcaccgcccccacccctggtcgaggccggggcccggagggtgggcgcgggcctgcgggttttttaagggtggggtgagcggtggcctagcagtgcccgtgggggaggggtgtttctcctctgggtgcccctcccccgggtccgggaggagggttgggggagggccgccctggggcggagggaggttctggcgtctccggcgtcctatggaatggctgcgagctcggagggaaagacccggttgggccctcacccggagactcccgacaggtccctcgaggtcagttccgccgaggcctggcccgcccacctccttcctgggcctttgaggatttaagtggacgctggacatgactctccagaccttcccgggtcctcactgaggctaacaccgattgggggcggtgggggaaatgaacctacggggtgttgatctgtggtcacgttacacgtagtgtttataattgaggcattgttgactaggtaatttgccagctagggacttgagctaattggatggttggtaggcaggcaaaggttattctgcaatatcttttatttttactcgctcctcttctaatccatcacgacataaagacaaatggtagggagagatctgtgcatcgagagatggaagattatgggggaaacatttctcgctggttcattcacgtgtcaaacaagattttaaaaagcagattccattttcactgtgtagttgaatttactagtctggaagaagacaggttttgatgtattcaatttctttttaaactccgacttcaataggccttaatgtaaacatcaaacatagcaagtacacatctgcacagtcagcattagtatccctacccgtacgccttg

SEQ ID NO: 47802 - DNA, 457 bp, Homo sapiens
aacctttatgtaatgtacatcagaccatcaagactggcaaaaattttaaaaggcaacaatacttgctggcaggggatcttcaagcgttgctggtgggaataaccattctggaaagagttctggcagagtctattaaaatttcaaacacacatagcctttgacccagcagttcctcccctgggactctctcccatagaaataaaagcagctgtatgtaatttgtttgcacaagaatatttattgcagcattgtttgtagtggcaaagaattagaaactaagtggatgctttcgacagaggaacagttggataagatgtcacacgtccatgccttggatttctgcacttgacctggaaggattcccatgagaaaagaaaaggcaagaaccttgtatactataatcccatttttgtagaacataaaaggataaaaaaattattgtgtagatgttaatggt

SEQ ID NO: 47803 - DNA, 532 bp, Homo sapiens
gtaggagaagaagatcctattcctaaatcgctgtgatatttaggtctttaggggtgggatcttgtgaatttgctattattgtagactgaaatctatatatagggacactcaaatgtggtataaatccatgtctttaaaaaaaaaaaaaaagcaattactatgtttgaaagccaagctataaaaagtaaatgaaatcataggagagccaagaaaggatttcattttactgagcaaatgtccttgactttcttttcccttttgtgtcctgcagtgacagagtggggaatgcaaatgtttcgaaattaggatcacagcttttatttacaggtggttgagtgttggcatttgtccctgtcagcactcctgctctagatgaagtgacagatccagaagggagaaatccagaaaacagacactcagcttgtaatttgttaaatgtcattttagttatttagcattccatagaacctggttttatttgactttatttaaagaggaggttattttttatttttattttatttttagagac

SEQ ID NO: 47804 - DNA, 752 bp, Homo sapiens
ttctatatggaaacataaaacagctcaaatccaggcattcagctttgtcttcttaaattgccgcattgctttggctaggtactagataaaaaaagaacttctaatgagaggaatattttaagacctgggtaagctgtcacaccataaaatgttaaacagtattccccttagggatctgttcagaatttcaaatgttcaaaatctctgttgattcctcagcaaatacagatgatcttggcgttctttctgaatgcttcccccaggttcttcccaaggtttccattaagaatcatctttttgcaatgataattgagtttctcaattttttttccctcctggtgggggtagactgtttcaacgctaagcagttaattttctttgcaaaactcactgtggtttatcatcatgtttcgaagggcatggacaactacagaacactgggggagggctggatatgtttttgtaataaagaggctgcatgctggaggtagatgcatcccagtggggactggcagtccttgagggactgactcatccatgactcacatggcagcctgggtggccccttggccctggtgccagcctctggaagtttggagctggtgctcacctctcccatgagaccttgagagttaaaatatgcggtgaggcttctggtttgattggagtggggctcacctttggttagggacttggtgagaagctagaagaaatgcacacaccttttggcttttgtatgtagttacgggaga

SEQ ID NO: 47805 - DNA, 2345 bp, Homo sapiens
ttcacgcccatatcctacccccggcactagcacaatgttgcttgtgtaatatgtacttatgaatgaatattagcgcccccgaggcttagactgaacaggtaaacgtttaaaaaacgaatcatacgagggatactcttttcaccaagttattgataaaatcctcgcatcaatttaaattctggtaactttaaactgcatgtaaagcaactgcagtcagcatgtgctgtactatttcagaatgattgatttcacagtgacccagattccaatattcactagcgcctttcacgacccatgaacccttcctcccctagggagcttggcatttatgcagcctgccggcaggctacacccccccgaacgcggagttttgtgagcaatcaacgcacttcacgtgtctcctgggcggtgggaccggagttctgatacaaagaggtcgaaggacctgaccaaaagcccgtcgcacgccagtgcctggacacccgcccgcggggacgtgcaagaccccccggcccacgcccccacggacactggggagacatccggggagcactgctaagccatccacctgtcagcctcaagtccaggaggaaattctgtgatagctgcttcgctgcttgcagtcttaacaacttaatgatttctcgaatcgtgggcaacggagggagacggcaagtgctgagttttccggaggcagccatgatacgcggcaagcaccatccaaccctacctcacccaggaccttcaccgccgctccgaaagaaacgcgcaggggaggaacctgcgagacctaaggcccgcctcggagtcagccccattggtcagacctatcccaccggaagcgatgaccgcggacaggaaattcccggcgtgctgagagcgcatgcgctaagtcctgccgcgagaagggcaggctgggtggtcggcggcttccgcctgtgagagccgggggagagccgggtggactaggcttctcctgggcgggctatggggagagcgcccaggagggcgggacgaggcggggcctggacagggtggggtttttcggaggagttgctctgagaggtgcagccggtttactcccgccctgaagttcccaagggcttccggctctttaacgttctaaatacctgtctgtgaatattagaggaaaagcgggtgcttagaggcaaagctactgtttgttagcaattctttcttactgtgaggcgtttttagaaccgccgctctgcagatgctgcatgatgggtttttaacttcgttcagcctcagttttttcatcagttaaatggagctaatgtctacctcaaaattgtgagcactaaatgagagagatcgcctggtgtgcacgttcagaacatagtgcacgcatggcattgggtaagctcccacgtgatcagtggtggctgttattatttggcagatgaataattggccagtgtaaagaggtcattcgatttgctaggattacagctaagaacagagagaagactgaaatatgagttctgtctttccgttatacgagataaaaacaacgaagcaaaaaaaaaaaaaaattaaagtttctctgataggtgggagaattttgctgttttaaccctgcttatgtttggacattgctgcgttgatcacaaatgaattttaaagtttctgttcctcaattagtaagtttttaaaaaagctaatggaaaacgaaacaactatgggtatggatataaaaatgaggagtactttgaaattccagtggaaaactcaaccaccttctataaaagctgttttaaaaggaactgagataatctcctagctttaaaaaatagtgatgactaccatagaggtaaggagatttgcccaacgtggcatcaaaatgtagactggaagtacaaactcttgattcagatatcttatcgtccaaaacacagtatacctgacaaagcattatttcacagttatattcattatttcccgtactcctcacaatggtcccatgtgaatgagattattattcttagtttgctgtgaagaaataggggaggtgaggtcatttgacaatgcccagagtcagacagcaaagtacagagagaagacaacctgagttgtgttttttctgagttctgatctcactggccacactcaagtatcagcttattatttttaagttaatatgtgttaattttgtaacatctaaatatatagaaatacgaatctaggtgtaaacataagcttacagttttcatatgactatttaaaacaattgcaataaatatatacaaaaccaatacaaatggtcttattaattgacaaggatgaacactgttaaatcacgacacttagtgctaactggcagg

SEQ ID NO: 47806 - DNA, 606 bp, Homo sapiens
ggtttcaacttgacacatggatagggtagcagtgtgccacgttcattaccatcccttctactggattaggtaactgagtctaataaagataaaaagcttccaagataaaaggaaaaaacaaacactagtaccaaaagtaaacaataaattaaataactagcacaaaaccaatttggaaatataggattaggatgttgctttatttttttgccacattgcaaaagatatttgttacatgttccaaagtgcagagtcaatataattttcaccccctaaaggtataccgcacatgtatgaagatttcaaaaccagcccagcaggatttccaacaaatggaaagtgaagttgcacatttcatttcagatacctgtttctaaatcattgatttttgtagaaatgtcacactgtactgaagagaagtctctctttctcaataagcatacagccaacttcccagaaaatgccaacgtttttagttaagacagaaagcttcagaaaagcccatgaaattcaactcactctcccaccttatgcacacaatatccagcgacttcagttacacaccagccttcatccctgcacttcagggggagttttaagcctaaa

SEQ ID NO: 47807 - DNA, 683 bp, Homo sapiens
cattcatggcaaagaagcccaatccaacacagatgccggcctaaacccaacatcaccacagaggaaactcaaatgtcctaaaaacaagaccctgcaccaaaaccaaatagaaatgggcaaatggcattgggctgacatactccttgtagttggccaatacgggttggtctagggaaaagtactggcccatttttgtagtcaggagagtcattgacatgcttcagtttaggcctttgtaaagcaagattgtggaactagaatgacctctaacttctttgtagccatgaagacagtggataacataatttacaactttgcattgactcatatgatcaagatatggcttacgtaatcttgcaggaaatgttggagggccttctctctgctagatggcatctaggtcctgtgctaatcttgtttactttggtaaataaacatgaccctctgcccatagagttcacagtctcacgggaaagggacaagaagcaagaaaacaaatgaggtataggtaagaattgggacaagtatgaattgaaatgattacatgaagcacatggaagaggaataacaggacagataagggggcccccatctgatggttcctactttttgagtgaggtatggggtaaagtcaccagctaggtgtaccctggggagaaaaggacagagagatttgagaagaa

SEQ ID NO: 47808 - DNA, 2640 bp, Homo sapiens
agacaatttaagtccgtggtatctttcaagctattcgtttagtttttcatacattttttaagtgtctatgttcttgctgtcaactgttaaaagctggagagtttagttttaagaacttgagccacagtacaccttatttgtccccttgcgtctcgctactgcagccctaggtgctttgtataatgcatgagtgaaccccgcttagaaatagaaatgcattttcaataagtatttattatgttgttctgagcatacagctttaaatttgcccgctgtagcttgaagcattatacaaactgttggtctgctgactgcctctctggcagcaacacacagagaaaatagattgctaagggtttttttccctcctcctccccctctcctctctcctctctctctctcctctcctctctgttttttcctttttctctttttaaacaagtcgtggacattttttaatcttgtggcatttttaatcaacacgtatttccttccaagacctatgatcccctattgattcccattaaaatgcttttcttttctttgccccctctgctgatcgaatttcagatcagccacaggagatgcaactaaccttccggcactactgaacccaaccgagcgagggtgatcaaaaggcttgatgcattcattaaacattcccatcgcccgggcaggagctctgatggaagctatctctccgcattgcaattttttccccctttttgtctttccccccacctccaaaaaaatgttttttgcctttgatcgcaaggggcgggggtagaacatgagaacaaaagagacctatctttttcctcagggctgacgtcagtttgattttactgacaactattcgagcgtgtgtagcagttggaagcggccccacgaccgccccacctcccaccttccacttttgggagaaaacaagacttttagcggctccggagacgcgccctgaaaatggcccgctcgggctctgcgcttgctgccctcctgcctgctcggcaaagggcattcgaggcttatttgtgtggcacgatctttactggggcggaaaacacgcggcgggggaggagcgggcacagacgcagccgggcggggagagccaggaatgttcctcccggcgtggggagaggagaggacacgggcagagaaaatagtccccgcccggcgcggggcgcgcggggtccgggtcccgggcggctccgggtggcgcggcggcgcgagggttccggccgcgcggagtcggggcgcagggagcctcagacgccgcgggcgcgcgtgcgcggtgcggcccccacgccccggccgcggcggcctcggcggcgccagcctccggctcggcgagcgcggcggcgggcgggccgcaaaacctgggccggagccgggcgcggagcgggcggcgccgcggagtttgggcggcagcgcggcccggcgaggagctggagaagccggcggcagggggacgcgcacgccgaagaaaagcccctctcccgcgtccctcactcgctcctggaggccgaagagcggggctcgcgatgccggtgcaagattcccaatcaggcctgggaggaaatggatgcaattagggcacacccccgtcccgcagttgccaggagcctgaagatctatgaccgacttaagccatttctggaaaagtcatattttccaggctttcgtgaaatactcattgctcctattctaaatctggaggcgaatgtgcatctatttcagggggaatgaaagatgtgaaaagtagactgggctccgggaaatgtgggtaatgggactggacctgcgcctggggtccgcccacccgtcatctcccgggagccccccgacgtgtgccattaagcataaggcgcgttaagcgctgccacaaagtcccgaaaaggcgaattaaaaaggatcacttctccctcaggatcttgatttttactaagggaaaacgtgcgttaaagaaaagccagcgagcgctggcgtggccctgtcattatcttggcgtctctgctgacctccatttcagcctggactacactgggttccagttctgttttcctatttccccggactcctagagggtggataccaaggctgattgttgtctgttctgccccagccctccagggtacaccataggtgctcagtagatgactcctgagtatatattggaggtgatagtaaaatgctaccaagcacagaggaaagaacagttaaagggtcagacggtgctttgtgaaaggccaggcatttgagctggattctgaagaccaactctagatgacagtaaaggccactccaggttgagggaacaacatgagcaaagcagggaacctacaatgagtaggaaagtgatgaatctgcatagggggttactcagggggcatagaaaaggaagccaggaagccactgaataccttgccacacaggtaacagccaggaaaagcacaaaacatgctgttcagtggttctggaatatgggcatgcaaatatataataaaataagcaatgtggatatacaaaaacaaaagtaaaaagaaaaacaggacagtttattggggaatttcagaaaaagtacatgaaacaaaaaagaaatgtcaaggaaaatccctggcctgaaactcccagaacaaaaca

SEQ ID NO: 47809 - DNA, 2601 bp, Homo sapiens
tgttttttgggttttttttttttttgtatcaacttctctttttttttttttttttttttttccgagacggagtctccctctgtctccacactccagcctggagtgtggtgcgatcttggctcactgcgagctccgcctcccgggttcaggcgattctcctgcctcagcctcctgagtagctgggattacaggtgcccgccaccaggcctggctaattttttgtatttttagtagagactaaaaattcgccatgttgtttcgccatgttggccaggctggcctcgaacccctgtcctgaggtgattcacccacctcggcctcccaaagtgctaggattacaagcatgaaccaccgcgccctgccattaacgtctcttaaagcacacactctgtctcaaaggctggagggtttgggaacgttctcgtcctttctgtgacccatctaccacagtcttgggggtaaaagccccggtttaaaaagctgggaaattccacctcatggccacgcggtctcagcagctctggcgactgggaaacgtagggttacagggcggtaaagatcatcagaaaggagggctgaggagagaaactaaagactaaaggtgagaggtcacaaaccctgaaattagtaaagatctacgttgtcgggggtgggggtgcgtgtgcgcccagcaaaaagcctctgcgtccacacagggatccaccgcggggcttctggaactcacaggctccctcggagccttcaaagacgcgacctgattgacaacaattttgtttacacaccacacgccctgggaaagccacacaccagtgccggcgttccagacgcttcctctgcgcagagccggcccaggacgggggcggggcgggccctgttgctcaactcacctctcccgccccgcacccgctccccggggaggcgccgacccagcgaaactggtgcatgtgtcagccgcccagcaccggcccaggaggccggccgcgccgcaggccggcctgggaaaacgcccagcggctgcaggcctcccgctgcgcgctgcgtggttctgcactgcactcaggacctgtcaggagcaacacacacgcacatgcacacgcccacacacatgcacacagacacacacgtgcacacactgcgtcggtaggaatagctcagaggtgcccttcctttccaggcaaagtgcttagtagctgaattcagcgagaagaaatcatccaaaggtaacccttgctctgagccctccccaggaagaagagagaggtcactctggaaaagcctggaaccttctctcgcttgagggtgcggacagcagcccacctcccctttggctaggccaaagatctctccttccttttaggcctagctttccctgtcactaaaagggctacatttatccttaaatatcatctaagctgaaatactactacattgctttgcagtcggtcatagtggaatcttagtttcagaactacattcaacacctactgcgcagaagcaccacatggacactgccacaaaaattaacacagtggatcctaacagagctgaatggggttgctgtgaatatctccctagtaagataggaaaaaggcccatgtgggctatgatatttgtataaagtggtgtcgatgagctcattgcaggactagctatttgaacttaagtttcaatgaagtgtaaatgagaactgacttcacccttgacttttatttttctctccaagtatttctcactagccattttcatttcctccttttcctaccattctcaccctcatctttctaccctcttcttgaagcagagcactttttctccacactctggaaggccagagaggagagaggattagaggcccgtaagcaggggaaatcctatccattagaaaaggacaagggcagaacaggggacttccgtgcttctcctgccaagttaatacgctaggagaagcagctgggtcgggtctggacacgcttttctgttctgcagctcacagaattttttttgtcactttaacttcagtgatctccggtgcccccgaaggcaagtagcacacctgaatcattaagcttcagatgagttgagttcaaagttttattttctacttttaaagccctcaataaattagggcaaaggtactgggaacccagcctcttgccctggcgttcctctgggattgttaaggttggctaagcaatctgctcttgagaaaccaggtgtagagagacctgggtggagagatccgggggttgtttgtggaactttctcctcctctgtggcatatgccagcgtctctcaggagcaatcctgcaaggttgcctccagagctaggtggtgtcgacctgtctttgttatgcaagttgctgaactcacagtgttccagcggagtgttcctggccagcgcatgaatgaggaaatgggtcgacacgaattctgggcagcaggattggaatgcaacacctccccacccctgccttccctgcacccccatcttcttgggatagctgatactcgaagagaagctaatgcttgattaaagtgatacaatactgtgtagtcagacgaacattctgaacaaatctaagttgatcttttaaaaaacaa

SEQ ID NO: 47810 - DNA, 701 bp, Homo sapiens
tttccatattccctgcaaaagtctgatttaccttggagctgatatttcagtttcagctccctagtctgcaaagacacttccaaggtccgggaagaagaagtagccccaggagagttagaggaaggcagctctgccagcctggaggtcactctgctcaccctagtggtagtcctggagctgcagcatgggggttgggtaccaggccccagtgacaacttgaaccttaggacatcagcctcttccccaaggaaaacattctgcgacacggctctactcccagccccagggccatgtgaccgggcttcatggtccctttggcacacgctctgcccctgacaacagccctggcaaggccgagggtggcagggatactgggtgtggtaaaacccagtcgaccttgaccagcttgctgtgactgtgagatcaaagggctgaagttatgtctgaggattcccctcgactaccaataacaaattgtgaagctaaaataaacttttctcaactatgactgattaaaaacaaataaattttgctacttcgggagctgaggcaaagaggatcatttgacaccaggagttgggggctgtagtgtgccacagtcacacctgtgactagccactgcattctagcctaggcaatatagtaagatcgcatctctaaaaacaaacaaaccaacaaaccacaaatattgacctactgtg

SEQ ID NO: 47811 - DNA, 4429 bp, Homo sapiens
actgttttatattattattgaagttatatttattaaatataatgtctataatattttagtttcgttccacatctctttgaaatgaatgtatatcgagagggttaactgtgcacacgaagctctgaaacatgatgaaaggtgtcatatagatttatgaagatacgagctaacccatagctgtcgctgttctggcaccaagagttaaatgttcatgtgaaagttggcgcagaaaacaccactgtacatactccacagaggacatccaagtgcatgtaagaaaaatgctcctttgggaatacgtggacatattcctttggaaatacactgacaaacctacatacgtgtttaaggtgccttcaaaaagagttatgtaaacattctctttggggcgggtgcagtcagtcataagcatttattgagtacctactgggtacaggccatagggctctctgaccggggctaaccttcatttcaaatctttcctaattttgcagttggaagaagttgtgggaattacgccgatggcccgaaatcaaggcagaggcgaacgttctgaaaattacataactcctgggagagaccgtgcttttgcagattgcctaaatattttctttctccgtcggctccttgtaacctctgaggccaatagacaactttgtttcccagcccttctccctcttttgtctgctcgtcagactcgttttccacctttgtatcgttccttttagacgtgaaaacaaacatgcgaacgcccggttggcaaggagacagcggcccggggggaaagtgcaggttccggccgccccacgccgccgcgctccgagcggccgccgagccgccccggccccggccccggccccagccttagcccaagcccggctgggtcccgcgaggctgcgccggggcgggcggcggcggcccggggacgagtccagtccgcgttttgcgagtgcgcgggagtaatgcgagcgaagtggataatagttgctcgagctcgcccgctgcctctcaagccatgctgggcccgataggctcagctagtcgtgtatttacccatatccgggctagagaggaaaagagaaaagtttcatttaaacctgaactaaaaactttcaccatgaaagcacacagcaggagcaggcccagagcgtaaggcgtgcccggcccggcgctccggcggggcctgcggagggggagggggtcgcggcttcccggcgggccgcgtggatgcgcacaggaggggccgcggcctgaaaagtgggggttattgtctccccccgccccccgcccggcctcgccacgccgcggcgatcatggccgcgcgggcagcagcggcggcggcggcggcggcggcgcgggcgcgggcgcgggcaggcagcggcgaacggcgggcgccccccgggccgcggccggcgcccggagcccgggacctggaggcgggggcgcgcggcgcggcggcggcggcggcggcaccgggacccatgctggggggcggcggcgacggcggcggcggcctgaacagtgtgcaccaccaccccctgctcccccgtcacgaactcaacatggcccataacgcgggcgccgcggccgccgccggcacccacagcgccaagagcggcggctccgaggcggctctcaaggagggtggaagcgccgccgcgctgtcctcctcctcctcctcctccgcggcggcagcggcggcatcctcttcctcctcgtcgggcccgggctcggccatggagacggggctgctccccaaccacaaactgaaaaccgttggcgaagcccccgccgcgccgccccaccagcagcaccaccaccaccaccatgcccaccaccaccaccaccatgcccaccacctccaccaccaccacgcactacagcagcagctaaaccagttccagcagcagcagcagcagcagcaacagcagcagcagcagcagcagcaacagcaacatcccatttccaacaacaacagcttgggcggcgcgggcggcggcgcgcctcagcccggccccgacatggagcagccgcaacatggaggcgccaaggacagtgctgcgggcggccaggccgaccccccgggcccgccgctgctgagcaagccgggcgacgaggacgacgcgccgcccaagatgggggagccggcgggcggccgctacgagcacccgggcttgggcgccctgggcacgcagcagccgccggtcgccgtgcccgggggcggcggcggcccggcggccgtcccggagtttaataattactatggcagcgctgcccctgcgagcggcggccccggcggccgcgctgggccttgctttgatcaacatggcggacaacaaagccccgggatggggatgatgcactccgcctccgccgccgccgccggggcccccggcagcatggaccccctgcagaactcccacgaagggtaccccaacagccagtgcaaccattatccgggctacagccggcccggcgcgggcggcggcggcggcggcggcggcggaggaggaggaggcagcggaggaggaggaggaggaggaggagcaggagcaggaggagcaggagcgggagctgtggcggcggcggccgcggcggcggcggcagcagcaggaggcggcggcggcggcggctatgggggctcgtccgcggggtacggggtgctgagctccccccggcagcagggcggcggcatgatgatgggccccgggggcggcggggccgcgagcctcagcaaggcggccgccggctcggcggcggggggcttccagcgcttcgccggccagaaccagcacccgtcgggggccaccccgaccctcaatcagctgctcacctcgcccagccccatgatgcggagctacggcggcagctaccccgagtacagcagccccagcgcgccgccgccgccgccgtcgcagccccagtcccaggcggcggcggcgggggcggcggcgggcggccagcaggcggccgcgggcatgggcttgggcaaggacatgggcgcccagtacgccgctgccagcccggcctgggcggccgcgcaacaaaggagtcacccggcgatgagccccggcacccccggaccgaccatgggcagatcccaggtaaccctcgcgccagccgggcctgcttccgcccggcggcctcgccgcgccgcgagcctgagtttctttctttgccgcgtacttttccccgtcttcccgcgggggcggcgggggcgcggcgcccaaagccatcttgacgggcggccgcctcccgccgcggtcggggcgccccgggggccggcgcgctgtccaggcctgggagggcttcgccgggccgggccgggccgggtggcttctaccccgccggcccgcacccgcgtcccccccctcccccaggcccgggaacgcgaagcgagatcccgaggcgccacccgcgcggtcgccgtttggggcggcggggaccgttcgggtgcttttgtaacaaataggctctcccggccaggacggctggggcgaagagccacccgatcggttctgggagcgcccacaatgtgctttaacgggggaaagaatgaggaactttctcacacctttagccacagcacgttccctcttggcttccgaggtccaggcagggaaaataggttagctttgtgacaagcgagtgggtttttcctacttagggagagccattcagagacactcggtgcgggcttcgagctcgaacgtttgctggtaggaataataacaaaatttacaacgacatggaggtgcaatattgtaaaatacatcgattcgttccttagaatagccagggaaatccattattgggcttacgggctgcttgcagggagtcaccttcaacaggcaggctatgtgaaaggagcacgttccggatcaattgaacttattttgatcatggattaggcatgcattttattcagcaaatccagtaagatagcagaccagtgaaaattgatcttttgggatcgtatttatttggattttctttattttgctgtcacccgagtcctacagcgctgttaggaagtgtcctgcactcttgctgtttcttgctagtaggctgagcctaaagactgacttgatctcctttgcaaggtttggaatttgaattgtggaggtaaactggctgtaatagtctccagacagctgcctctgagttgacatctaatctgccatctgattggctcccctctcaccattgggcatttagcactgctgatgtaaatagaagtgctgagcagtacagtcacaaaaattcttgccacaaataataactgagctctattacaagcaaatgtaaggttcagtatttaaagctgaaactattatgaatcatagttattaataagaggatcaaatacagaaaaacagttcgctggtgtccagtattgggcatttacaaaattcagatctttgatgat

SEQ ID NO: 47812 - DNA, 614 bp, Homo sapiens
atgaagaggaaggtgtactagcatggctaaactggtaaagctgaaatctggatttgatttgcatatgtggtatttttcagggactctcaaactttcacacatgaaataaacgaggtaatgtgtatggcatcacatgatcaaaatatttttccccttgctgctgccagagctatctattgcttttcaacagtctcacttgttgggcatcatgccaagatgtttaagacaaccccttacgtgagctgttccattcttaacctctttgactgaagtgccgtgaccttcacatatgtagattagccatgtgctctgtgaattgaaacttgctgcctcaggaagaaaagggtttttctttttattccactgggaatttgacggccattcatccctgacctgggcagaggtaatgcaaggaaattggattcaaacggaacacggacagataacacagggaggcagtcagcgtgtacaggcaggcaagctttctacctggtccagggtgaaaatacccaccgtctgttcacaatgtgctgatgtgcaggatccgaagagcaactgacagatggagatagagagataaatgtaggaattctggaaccgtgtccttttaaaaa

SEQ ID NO: 47813 - DNA, 1062 bp, Homo sapiens
gttcactgatggcaacctctctctcctgggctcaagtgactcccacctcagcctcccaagtagctggagttaaggcacgcaccaccacacctggctaatttttgttatttttttgtagagacgggggttttgccatgttgcccaggctggtcttgaattcctgagctcaagtgatccactcaccttggtctcccaaagtctgggattacaggcgtgaagcccttctgcacctggcccacattcttataattcaggagcttttagtgtattttggctctgtagtcattatcagacatagaagaggcaagaatttgggctacaagggctggagggtggcattgggattttctgatcacatcaccagacattaatttacatttgttcttcagggaaactccctaccattatctgggtcgttgctccctaccaccgtctgggtcattgcatagttacccagggtggccgtgaactagtcagcagccatttagaggaaagcctgcttggcttggctggttcaggaggcggaggctgctgcagggcctgggaaggagtaaggcagcacacggtggctgttaggtcatttgtgttggatgaaagagagttggtgcacagactggacggtgtctcagattcgctggggtttacgagtccagaaatccatgagtccgaggaagtgggaagagagaataagggaagggaggccggaaggtaggagagaaggggaaatccaggcagccggatgagagataattttagagtaagaaaccaacaaaatataatattcattatgtacccagattgaagtactatggtgctaaaagttgtcaaccaaacaccaaaattagcatatctaaaaatcatcaagacggtaatgcatagttaaaagaacagatgtaaggcagaaaactcctccagttcttcagtgaggttatttcatgacatagagtcttgattatttctgtctttgtagccacacggtcattttggagccagattcagtggtgttaggaggttgtggaaagcactcagcggacaccttctttccctccctccccaggctgc

SEQ ID NO: 47814 - DNA, 560 bp, Homo sapiens
gcaggtgtgtacagcagctctgaagtgtgtcccacagtggcttctgggtggtgccactggcatgtggtggggaacctctgtggtgaggtggagtgggcgcccactgcccactgttctgtgtgtgccgtgaccaggcgggtgtgcgagggaggaagacaggctagacggccgtgttgcatccacctcctgttctccctttacagagagccagagtactgtttgtaatatgctcagggaaaaacagaggcattttgagctatatttagacaccatcacagaaaagtaaacacagattgcttcccgatatgacagcaactatctacaggccactgtggctgaccccgatccttatcgagcttgtttcacatggctgtgatctgtgtgcatcagtattgaagaaatggcacgttacctgacatgtcttctctatgcccgtgtgtagtccgctgtgttggtgtgttacggccgggccatggattctttacttttgcacagttgggctgttccattttttctcaatgagtaggtgggccctgggctccaggtgctgccatagcccc

SEQ ID NO: 47815 - DNA, 899 bp, Homo sapiens
tataggcgtgcactaccatgcccagctgatttttgtatttttagtagagacggggtttcaccatgttggtcaggctggtctcaaattcctgacctcaactgatctgcccgtcttggcctcccaaagtgctgggattacaggcatgagtcaccatgcccggcctctttttttttttttttttcaagagacagggtcccactgtgttacccagactggagtggagtggtgtgatcatagctcactgcagcctcgaactcctggggtcaagtgatcttcttgccttagcctgaacagctcggactataggtgcctgccaccacgcctggctaagtttttaatttgttgtagagacagggtcttgtgatgttgccaggatggtcttgaatttaccctgctaattcttaagccttcctgaaagtccccatgtacttacctcagtgtgaacgcagcatctggcacacagttgggatcagtatgtggttttggaaggacagaggagggaaggaaggagctgctgggtgaatgctgcctgctactgtagcaccgggtgagggcctttctacctattgctttgttcctttgacgtcccaggacatgaagggctgaggctccacgcctagccctcctgtatgacctcggccctgaagcccagggcctgactcaccaaaccaaaaataaaattcaacatctacttgtgaactggttgtgtttggtaagatgctgacttacatggggagaggtgctgtgactcatagtctgagtgctcatccctacacactgctggtctctgaacaaaatctttaccctggacatatgcatgatctaaaatctatcttttcactttttaatgaacactcggttgcactaaggtttgatcaagacttgcagactcagttcta

SEQ ID NO: 47816 - DNA, 654 bp, Homo sapiens
tattttgtcaaaaaacacactgtagactttatagatctgtggtatcgaatactctcgattggatcctcaggaagaaagtgttttaaagtgtgtaattagggcacttgagcataaaactacaattatacacttgcgtgttaattttgtgtacagtaagactttagttcaacactggttgtaaatgagaggaagcatttgactgccagtgaatgcctgcattttatgaatacttgaataaaatctcctctaattggctgacctggaaagaaaggtgaaaacatctgtagttcagtgggagaggagaatacaaaatgtgtactagagatttccttttccaggtacctcgaaaagtgatctcactcttgtgtacagccgtgtttgctgtgccttcgggatcgtttgtgctattctagctgctgtttcacaataaaggcgaacagggtgaaagcagtttagataggcaaaggaaaagaatcaagggacagactggcatggacagtagttggcaaggaatttttgatatggttaaaaaaaaggctttgggctgatataattgacttgcgttggttgactatacatttgttaatcaaattctgtgtacaagagttaggcaacactccttgaagcctgaaggagttaattttatgaaaacta

SEQ ID NO: 47817 - DNA, 794 bp, Homo sapiens
gctatgacacaactgtggtcagagctttttatacaagacattcaggtggcattgagtcacgtcttatcagtgctggtgatttcagaggaagagaacactgccttccaagtctcccaacccttttgtgaacacctggtgtagaagagtaatgtttatgctggctttcttgagtggcttcatgaggattttattatttttactactttttttgctgacttaattggcattttctatgttttatagggataaaaacatctttcatataattctggcctgttttaggggtatcagatatatatatctaaatatgcacgttgttgtttgacaaagaacatttcacacctaattgagcttttcagccgggatactccacctagagtactttgcacatacatgagatctaaggttcataaaccactttggcagtgcctgccacattcacaagtgtccactgaatgtcaatttcttgccttttctttgccctcctccttttgtgaaatgatatttggcttccagggcctgtcagggctgccggtgcaccacacttccctgagattcagcattcctttcctatgagcaaggaactggaacaggcggctgactcttgtctaaatcagatccccaggactcctagcctgtgacttcattgctgaaccccaatgctgcagtactctttggatgcagagaatgttggtgtaaatgccactgaggttcttctgcatccattttatttcatgttcctcagttttatattttttatattttatcagttttaccctgcacagaagaacata

SEQ ID NO: 47818 - DNA, 917 bp, Homo sapiens
tatatatgacttccaatgatgtaacacatataaaggctctgtaataattgaaagttatacataatttgctattgacataattttatctttatcaagttttctacatgagaggagaaaatctaccttttaagctagttcaccttgccacctgagtgatacgcctcagctccttccctgtgtccaggaggaacagccaagataaacatcaagaaaaggtaggagaacctatgcccatctccagaagggccctagaaacagagcctggatgtcatggggtccaaggcagaagatactcgccctggacttgggatcttagaaatgaagtagccccatttcaggggcctaagattttagggaggagggctgttggtctcagaaaccctatcctgttaggaaggttactggaggccgctggtggtggaagccgcgcctgttctatttcctcaccttcctgtgttcatctgtgtatctgccaagtgccctgtgctttgctttttaccaccaactgcttgacagccgtccaggactgctgggttctggacataaggtcagataaaactggcctagtcttttctagggatgtaaaccttggggaagacatgcaccagtggcctggtactggggacaagagcagggcctctgcttctgtagtgcacaggggctgcctctagcaggggaaggaggtgggaggcaagtgggccactcagaaaaagacattcttttttgaatgagtcccaggtacttttgtgagttcatggaggctggcccataatttccactcggacttgtcataaactctccctgcttcttacccccacccttctctcagaagccaggactcagtgagttctgggcatgggaacctgggaggcagagcacttacaaatgaaaatttggcaataagttttatagactgg

SEQ ID NO: 47819 - DNA, 1244 bp, Homo sapiens
attcatatggaataagcctgtttaagaaaatattaaagaatctaaatagactgtgtaactaagtgttgcttaatttagttgtcttttttgttatattaatctttagtgttcagaatgatacttaagcgtttaaaaaattctaagtagtatttatgaaaatggatcaaatgctacataaaatcaaaaccatggaagagtttgtttgttttgtaatcaaataaatctcctgaaaccaaaacaaacttctcctctcagtatatttatttgaaattcttcttgtttacagaaattgtgtaatatttatcttgcacaacagaaattttaaatgtgcttatgaggtagcagtccgagaggcaggacatacaataatctctagcatgaactatgcccacgtggcttaagtttggattctggaaacggttttctgttcccttttctttagtatgaatatgtgcttgccaattgtggaaaggagctgattaatcgcacttgaaggagaaattcttctccactgctcgtttgtttcagtttcagaatctctctgtcacccttggaagcagtcacaaggattctgccccttggcctgcagttgtgggggatgttgtccccagccttccccaaagcctgtcatcatggactcagctgcatgccttattaactcatcttgcaacctttggcttgtcaagacgatgagctgtcaaagctcgcagtgacatcagtagtatgtgacttgaatggatataccacatatgctgaatcagctctttttcattctctttgacatcagaaaagcaggtgctaagtctcattttgaaaatttattggtatctgttgcagacactttagagaccactctgtttatcagactaatagccaaagggaagctaatagagtgttttggcatttaaagcctaaaattctgctaatttcttctggaaaaaaagtcccgtcatccctcatgtgctgtgagaccacagaaaggctaatttaatattctatgtagggaaaatcaggataggattatttgagaaatttgtggttttaaattcttttatgatggcgtaattttatgcgtatactcaaggccatagaatgttatgtatgtgtataaaagttgaaagtttggaatcattgattttacaaaaaagaatatagattttaaaaccatctttttttgacagcttaacctcagttgaagtatggattctcttaatggaaaaaatttattttcattaatattttag

SEQ ID NO: 47820 - DNA, 2229 bp, Homo sapiens
atatataactacataactgtaaattggaacctaaaaatatatatttaatatgaaattaattttttttaattaacccaaactttaacttttttataaggggttgtgtttgaatgctttagccactaggcatgtgtttttctttctgatgctgttggagctataaatagtaggtagaactgaatgagatggcatcacataaacaacagcctagcttggtcatttctcctactcagatcgcgagtcaaaatattaaacagtggtggtttcaaactatatgtaatttcctcaaaattatgcttctctaatattttttccatcgctttttcctcaccaaagatttgttacctctccccttatataactcttggtcataactcaataaattatttttttaaggagtggtacgtgagtttatgctgtacgtggtttctttggctgatctacttgagtccttaattttcttacaaaaagtaacctggaacttatggctagaaacgatacattcttacaatattaatggccgaaggaacgttacttctttgcagaattcgataaagaaatgagaaattcggggacccggaaacttttagcgcttgccctgaacagcggcccggaatctcccgcccacccgtccctgcccggatgcctgcgcggcggcggcgtccttccctcctcggctgcgcttttactcttggtcagggcccgcttgagagagggggattttagagagagggtgtgaaggacgcaggaccgctttcaggccgccagctctcaggcctcgctttccggtcctcactgcgcgtccacacctcgccttggtttcttttgttttattcaagccccggccccgcggtacagcggggagactcgcccgcgcccacggaagaagccgagctcctccgaagggagaaccagtgattccacggaccccggaatcccccgggagtgggaccaccaggcagcgggcggaattaaccctgccgcggaggcgctgggcgaggatgagggcggcgagcgcggaggggaccgagtcacacagcagcccggcggcctctgccggcaggccccgctcgctcctttcggcccgacccgggcgggggttccggtgccgccctccctaccccgcacgtaggctcgtgggggcggggacagggggacgaaaacaaccgcgtcctcagcctgactgaacaggctcggactcctccgacggcgccgcgccgcgcacagatgagcctttgtgggaccccgcggaaggaggcgccggccgcagccacattcctttccgggcaagcgcggccgccgcctgcaggcaccgtccgccccgcgcgcccgcaggctcctcctggaggcgggaggcggcggccgctcgcacagcgtgttttctaaagtttctgctgacacagcttcgcgtacacatgagccggcgcggccagactcacgcaggcaccgagtgtttcccctgcgccgtctcgcgccgccgccccgctacctcgccgcgcgcccctaacctctgcgtcccgcgtggcgcgcccagcgcttaaggttttatttttcccctacttcctttggtgcatctctttccccctctcaaaaccaccacccaaacttaaaggctggatgagttggaacccgttcgcgtaattaaaacgagtggctgacggtggaaaagccaggaactacagacgaaggacgccagcagggccgcggagcccaggccgccaagaacagggcggggaggcggggcggggccgcggaagggggcgaggtggaggggcggggccggcgggaggtgggcggggcgaggctggcaggccgccgccattggctgttacccgacgcaccgaggctgggcggcttagccaggcacttggattctatttgtgtaatagctgcttcttggagccaagtgcatgctcatcaaccttccttgctgggaaaaccaactcacagcattttttaaaagccgagaaacgcctaggcttgtaaagtttcatctcctgcctgtgctttcctgttcttaattaaatgctgaagagtcttgtcgggatattacttttcatcctgtctctgccatggagactttgggatcactgggtggtctcttggtcacttgcaggtgttttaggtaggatgttgcaatctgcaatctaggaacatttgacgactttttcaagtaagctaaacaacacatgaaactatagtagattaaccaagacatgcatttaatcc

SEQ ID NO: 47821 - DNA, 875 bp, Homo sapiens
gagcccctggcgggctgagagcctctttcttctttttgtccccagtgccaagaacagtgcctggcaagtagcgctattcagtaaacatgggccaaattaaagaactcacagttctcttagaaaaatgggaattcaaaaggagagagttctgaaattggtgacttataacctttctcctgtgggcttggagccatctttctgcctttgcatttcaccctccatgggatcattcttttcccctccctcctgaaagcgactccactgtgacagatacctttcacaagtgtgcttgccgaatatttagtccaatctgaaagaagtaatggagagtacttgaggtcgtgctcgagaaccttcctctccacattgccacagtcagaggctctgtggcctgcacagccctccttgtcccctggcactcagcatggagagcttagccgtgcccaggctggcactgcctctggcagagtttactcctgagctgcggggtccctgagggtgcccactgccacccgcctggacctcccagttctagcctcgtgctggagaggtctgctctccccccagcaacctcacaagcccagcactgttaaaaaggagtctggttattgattaatccgggtttcattgtgcaactctatatctcttgaaaaagcacttatttaaacacccaaatgtattaatatgtcatggtgtgaattgtgatagtgaagcaaggtaagcaggtgctggtttccttcaaatatacattgtgaagtgttgatttatcccccttagatcctggagatttcactcaggagcctggggttttttgtttgtttgttttttaagtttttcagaatagtaagtggttttagctgtctcgttctttactt

SEQ ID NO: 47822 - DNA, 535 bp, Homo sapiens
ttccctctatccagaacaggttagcaggaaaattaagtgatacttgtcaaaccatgcccacaataactggacagttaggagggccattgctgtgacctccagcgggctaggcctgaggtgtgacaggggagctgcctggggtgcagatttaaggagctatccactgtgtgcttgcttgactctcagagtgagtgcgtcctgaagtctcataccccaggcaccggctttcctcactgtagccctcgctccttaatcaggagtctagttgtaggaccacgccctgtcataggaacagggaaaaggtactcactgtgtaacctttgtctttctaaatacatgagtcaccagccccaaagcatagatgagaaaactcctgtgtaacaaaatcaagtacaggatggggtgcagtggcttacacctgtaatcccagcactttgggaagccaaggcaggaggatcacttgaggccaggagttgcagactagcctggggaccccagtaagactttgtctccattaaaaactacaaaacttagc

SEQ ID NO: 47823 - DNA, 1035 bp, Homo sapiens
gctgtgtggcttctcacaccggatgtctgggttcctgtcttccagccaccagagcaagtcagtgattgagactcccaggtgaaccaaggcaaggccatggggtgtggtttgtgtctttaaggtgccagtggcgatcttgttataaagcatctagaaaaggttgtgggggagttccaatgagcgctgtaggaagcacctccccagcctgtaagctggagatggggaggggaatggaagggaccaggctgggagaagtggggcaggggtggggcatggagctccacattcggttaataagtctgtaaccaaaaacccatccatcttggctggcaggtggctgactgaatttctattattagctgacaggtgatgtcacaaaacctgtcatggatccaactagggaatcctcagtggaagataaatgagaaagggactcaggttataaacagaggtgccctctggttgacctctagtcactgtagacctgggacatatcagctattccttctccccaccctacttcgctcaaccccgccagaactagggcaccaggttcgtgccgggtaaattatcttcccagctaggagcctggccatgctgtctgaagtgtgtgaatgtacttaaccttcagtaacctttccattgtttactttagagtatacatttgtagcttctggcaaaaggtagggatgtcctagagagcctgccagcctcctctattaatggagttacaagaggttgcattcattttttttttttccatgaaaggaaaggaaaaaaaaaacactggcaagggagatttttcctttttttttttattagctataaatgtgaatacttgtaaataagggtctttctgaaatcaagccttgcaagtgatgtttccaaggaggctgtcggctggagcggagcctgcctgaatttcgaaagcaagtcatttctcttctgcagcactaggcgggcaaccatgtctgcaggattattacccttttatatctgcaaaagacggctttcttcctttactccaatatacct

SEQ ID NO: 47824 - DNA, 1129 bp, Homo sapiens
acccgcagccacgccttcaggacgcgtgggcgggacgggctccgtgggcttctgatgaggacggtcggggagatgtcgcctgcgcgtttccgggagcctccagtggccccggttccaggggaccagacagaaaacaaaagagcaaaaggcagccaaggcctccagctaggggtcatccccgcagccccggtcccggacggggcgggaggccgctgtggggacgcgccgccgggcctcgctgtcaggtcgcccgcgccccgctccgcccgccccgtacaggcggcgacagccccgcctaggcccgcgcctcggccgccctctgctgggcgaagcgagcaccacggccgagcggcggccccgggagcgccgcggggactgcagagcgcggggaagcggcggcagcggaggctcggcctggaaggcaggggccttgggggcgtccggggagagggccggggacatctgtccagcgtgggccgtgcgcggtgccgagcgcgcggggagggccgaggagctagacgcggacccagctcctctaggagccgggagggatgggagggacggagggtaaacgggcagtgccggccgaagcccggtgggactcggcggcagacagacaggcggcttccgagggaggacccggggccgggcgcgggcggcgggaggcgaggccctggaggcctggcgcttctctgcaccgcgaagacccggaggcttcaagcaacagacgcggttctggaggccggaagtccagagtcaaggtccccgaaggctgggggagagaatctgttccatgcctttctcttggcctctggggtacagggtcctcagtgttcggggcttgtctcccgtcactccagtctctgcctctgtggccacatggccctgtgtccctgtgtctgtcttttctccttttacaaggacaacagtggtcttggagtagagcccactctcatcaaatttagcttcattttggacgggcgctgtggctcacgcctgcaatcccaacactttgggaggccaagaagggcgaatcacctgaggtcaggagttcgagaccagcctggccaacatggtgaaaccccatctctacccaaaatgcaaaaattagccaggggtggtggcgggc

SEQ ID NO: 47825 - DNA, 912 bp, Homo sapiens
ttttatttacaataagtcttgagataaaaaaggaaagcactaacaaagacgaagagatgtatgtgacctccagagcatatttaggtctactcaaagatgtggaaagccaagtatagctagacagctccctagtgacttcctatcctaggtggctcattattccttctgaattgaaaacctgactcaaattatctattcaaaacgcagtacagtattatagctaatggcaggattacacctcagtactttcggttgtaccacttaggagggaggaagcaggaaatgaaaacaaccagcaagtccctgggccaagaatggctgccactaagtcactattcctttcacctggactcacacccagctctcaaatcctccttttcctctccgggagtccagttctgatattccattctctcaccaatctttgccaatcccctaagcagaactggctttctaaaagcctatgtcaccactgtactttgtacctctctccattagaggatttatcacacacagttaaatgtaaaatacttacgaatgtgccactgcaagaaggatcaccttttatttaccagcatatccctgtcctctagaacagagctgggcccacgaatagggatttggtaaatgtagtagaaaagaatgaggaactgtagagctgagtgagtaaggctggggagtgggctaaaaggtgagagagacagaaaggcggggccacagaccccatctagagagagttctgaaaatgagggtaagtaaaatgggtaggtggcacccactggggcatctttagaaagttgatgcatatatttcaagtaaagctttggataagctaaaagattttgtggctattttcaaagccaatacccacttttaccaagttaaaacattaaaaaacaaaacaaaaacaaa

SEQ ID NO: 47826 - DNA, 614 bp, Homo sapiens
aggaagaggccgggaaactggacaggaaactcttaaaacactaggcaacagaggaatggatgtggagagatgaaggaggcaggcggtgttcagcggcagagctgacaagcaggacttgcatgcatcagatgaagggaaccaagggaaatgagagaatctaagaggattctcactggggtttttggtttgaagtggaaggatgagatgacggtggcatttacggaatggggaagaccaagggaggagcaagttgggaataaagtgaggaaatcaagtgctctagttgggacatgggtcatgtgacacgcctatgagggcgtgtcatattgtgagggcacacaatatgaagcagagacgccgatctgaaggtcagggctggggctatgtatctggacggcatcagatagtactgtttgttttaaagtggcagggactggacgaaagagccaaggggcggaggatagatggaggacagaagagtttaagtaggagctactggacactgatgttaagaggctggccaggggaggggttggcacaagagacaggcaaaatgtccagtgaggtggaaggtagctcagaagccacagtgtttcaggatggagggggggctc

SEQ ID NO: 47827 - DNA, 2292 bp, Homo sapiens
aagcacataagtacatccttctaaatgaaaataaagacttggttaatttgtacatttctagaatccatgagcgtatataaattcacatcttaaagcaatgtgaaagaccatcaatattttattttttctacgcaaaagctgccatatattgtaaacaataacaatgctatgaatggatttcagtgtcaccaaccttattgaaccattcagggcttttctttttagccaatgataatgttgtaataaatccagctagcattcccgctgcagcaacggtaccaaggaaaattccacctgccaagagtttcggggaggaggggggatattaaaaaaaattaaataaaaagaggttaaaaagatgtacaaaagtaagtttaagatactattcgagttacaatcaaaatcacttttgaaattcaagaaaccatggctaagcagctcttgctaacagtaaatgacagcggctgagaaacacgcgtgaccgcacgacctctggttccttgggtcattccgaattattattcccgagcgcagagaaaaggttcagcttcccttcccctctcccctgggaccacagcgtgaagtttctcacggggaggagaagagacgatggcaatcagaaaaggcaaggctctagaacaattgcagaggtgacggggaaatatggcacgcccgggagaatagctcgcgggatctgccccccgccccgcccaaggggagactccacccagtaagcgacctaccctccctgggccgccagactccgcgggctaaactcaggggcaagcacaagctaagggctctcagagcgggatgtgtgtgggaatgcccgctccagagcaagccagggtccggggttaactcaccccgacgcccgcacctcaccacagcacatcttacctttaaccaggaaaagccggtcattcgtggaccccggagcctccagcccagaggccggctgcccagttgcagcgcccgctgtctccatgtttaggtcgcctctagtgcgtccgtccccaactgggcccgggtggaagcgagaaccaggcggaggagaaaggttccgctaccgcctcctcctgtgcaatctgaagaagggtccggagtgcggccgctgtccccaaaccctcctcccgcgccggggccgggaagacgtgctgtgcccagccccaggggcgatgccctccaaggccgtctcttagggaggatcttttgatttctccaaggagatcattgctggacttaagtgattactttggctgtttgaaagaacgctcagccccgactgtaggaggcagtgagggtcgcagattgcgccaagattccaggccccgcctgtgagaccctggagctcattttcctgatcaagcttacattgtgtccaacgatttggccagcgctaacactccacgattctaaaacgcaagcctaggtcttctgtctgtacttttctaggtaacttcccaacagtgttgaggaataagtgacaggctttctccctggaggagagccagccacccggttctgcggtgacgggtacctccgccgcggtgtgagtgctcggcctccgtcgggaagtggaacactcacaggatgaccgaatgaaagtaccacccccgaaaggagagcgacgcccgctggaagcgcttgcagagctgccggcaacgttgaccgctagcaagcttggtcttccgctgggaggctggtttgcccattctgtaaatggccgtggagaggaggaggctagtggtgatagaaaatcttttcagcctctcagagaacaatgacatcttgtaaaataaggcggtctctctgctatttgtcctgccccccatcaccggagggcatgagtttcctgaggatggagatgggactctatgttcagtttatatcccccagctttcagatattaactggttaccaacatcaaatgcatgttggatgaatgagtaaatgaatgcatccatttttgcgtcagtgaagtgcagttaatagctcaaacctgggctcgggtcctaaaccgcttctcaggtgtgtgaacttggggtaacttagcccctctatagctcagtttcctcacctgtaaaatttaaaaactggtagtaggccaggcgcggtggttcacgcctgtaatcccagcactttgggaggctgaggcaggtggagatcagaagttcgagatcagcctggccaacatggtgaaaccccgtttctactaaaaatacaaaaattagcggagtctaatgatgcgggactgtaatcccagctactcgggaggctgaggcaggagaa

SEQ ID NO: 47828 - DNA, 795 bp, Homo sapiens
agtacctaactcataggattactgtgagaattaaatgaagcaacatctataaagaagttagcacagtgcctggcacatataaatattcaatacatgttagctctaactattaccacctttgattccagtagctattttgcagcattgcctatggggatttttaaaaatgatggattatcaaggtctatctaccacgggagattagagctctgaaggcccgcgggtggcagggcagaatgtaaaagctccgtggggtttctgatgataaaaaactactgctctgttcaaatttttgtgtggatgagatcacacagaatgtatgtgacctttggatttcctggaaacacgtcagtatctgaaagggcttttaagctggtaaatgctgtgctaatttgttgaaggacctatcctttttccttcccctcatacataacagtaaccatagctgctaacatgtattgagtgctttctatatatctgacattgcactaagtgcttcaagtacattatctcatttattcctctccataaactcagaaagactaacttgctcaagctcacacagctgttaagtggcagagacagggcttaaaagcaggtccttccttatccactgtgccagtcgtcctcaagtgtgaacttgaatattggaatcacctggaaggcttattgcactcagcttgctgggccccattcccagagtctgtgactcagtgggggctgagaacgtgtatgtctaagttcccaggtgatgctgttgccacggattccacttcgagaacatcttctgtgtgc

SEQ ID NO: 47829 - DNA, 925 bp, Homo sapiens
acaaaccaatggtttacacttcagcctcaaaatttgcattttgaggatctttgtgggatacataccaaggagaggaggaggtgcgagctccttggtcaaggcctgtttgtggagactactacagccccatttctcactagcccccagcacctgccctgtgacttgcttggtgccagatcctgggagatggtgtttccagagcctcagaagcctgccacacactgggacgggaagtccctggccctgggataagaccaaattccaggcatcccaagttggaatgctgaaagaaagcattttttaaagacaatgtttcccaaggtctcatatctctacaggacacccagttgggtactttgggtacaatttgattaattgcactgctctaagaattccacaattccacctagacttgttactagaggaagatatgacacaagctccaaacaggtgagttgtagacattctaagcacagtttctttgcaagatggggacttgagcagggaagcatttccaagtgtggaaaccagagattagaaagtcacagagctttgttgcttcacgcagcaccagcaggactgatatttcaatggaagcacagtactcttctagaaaaagtaatggaaatctcttacaagccaaggaggctgctgggaaagcaggtttatctgagacggatgctgttgctatttcggtatttgttttagtcagctgaaagttcataccagggacacatttgaccacattcttatttcaaacgttttggctcctgtagattctatttcaaatgttgacagctagaaacttgttagctttaccgttcctggaatttggatggccctagctctagcttgttttgaactctgatggactcttttccccgtcactttttaaaacatttcttcagagcttcaatctctccat

SEQ ID NO: 47830 - DNA, 3003 bp, Homo sapiens
acaaagaacatgtgtaacgtgcaaactgcccagtacagagaaggcaccgttccccacaaccccctttgttggttcccatctcccaccacctagccccagaacgcccagcaccacgcctctcctgcccttgtcgcgggggatgcagggacttgtagtttctaaggccccgagtcgtgcttctcctcggcgcaggcctgcgggcggaagaactacacatcccagtgggctgtgaaaggaaagtggggctcgggaaattgagcatccctgcccagctgccttcgttttctgcggccccggggctatgcccacctctgcgggggctcggacccgcggcaacgcctgggagggcgcgagcgagcagaagccccaggctccggccgtcccagggccgcgcccgcagctcctcctgggctgtcgggtgggaaggggggaggcgcaggcgggagaggagaagcacgcgacccctccgctgccgagggggctccacgggggaatggagggagaaataaagcgagcagctgtaaacgtccgtggggagaagtggagaccgaaagagctgggcggcagcaacccaaaacctggcctccaagggcttatactccgggagggaggccggggccggaggggaccctgaccgcttcctctgcccttctttctcggcccggaagccggccgagccgggccccgagaccctcgcccgcagcccggtcccgaagtcaggccggcctagggccgccccaccccatcctggcacccggcacccccagcccatttctcgggcatcaccagagtccccgggcgacgcgaccacgcgcccagctggggaggaggaagaagggaggcgcaggccggggagggtcacctccgcgccgcggctcctcaggtcccggggagtcgccaggagtggcttgccggtggccgtgggaatgagcgtgtcccgaggcggcagctgctgcgcgggataaacccggaagaagccgcgagacggactgaagtcggccaggagcgcactgcgcggcggggccgcgggcgcccgaccccatccctacttgggcgatgccacagggagccccgcgccttccacaccccagggcgcccgcccgagggggctggggctggaatctcgctgcgccggtgccctggcttcgcgggcgaggaggaggaggagcaggaggaggagccgcgggtgaggcgcgaggccaccgcccacccggcccggaggaggcggacccactcggagcgccgcgcgcgcgccgggctgagccttgcaaacaagtgtctgtgctgtgtccccgcggccctcctcgcgccggggccgcttcctccgggtaggagggagcaagggagccctcgccgcgcggcccgcgagccgccgccgccctcggcccgcgcatccccgcgcgggggccgcggattcgactaggctgccaggcgcagcgacaccgggtcgcggtgcgagcggcgccccggctctcgccgagaggctcctgacagaaaaacgtgcgtggttgtccccacccctgggaggggttgccggtgccgcgcgcggccgcccagtcgccagcgctctctcctgggaggatccgctgccggaggaaggagtggacccaacctggccgcgccgcagaagtggctcccgaggaagccggcgccggggccgccgcctcgtgtcccctcggggcgcagtgctcgggggtcggcgggccagagccgaggcgcggccggggagccgggggctgcggggccgagcgggcagccgcgcgagggggcgggcgctcggcgacccgggggccggccgggctgagccccgcgccccgggacgcgggctggaagcgacggaggagtgctgccgcgggctgcggaccagcgccgtcccctcacggagcggggattctgctatgacagttgggctccccggagggttaacctgggtgtcctcggcaaagttgtcgccgagccgggagcccgtgtaggggccgcggcgccgcggctcggggggcggccgggcggccggcggcggtcgtggctcggcggggcccgcgcggccggggggctcctgggggtgtgcgcccccagccggctgccctcgtggatgcctcccggcggcggcgggcccatgaaagactgcgagtacagccagatcagcacccacagctcctcccccatggagtcgccccacaagaagaagaaaatcgcggcccggaggaaatgggaggtgttcccgggaagaaacaagttcttctgtaacgggaggatcatgatggcccggcagacgggcgtcttctacctgacgctcgtcctcatcctggtcactagcggactcttcttcgccttcgagtaagtggtggcgaccgctcccccgacgccgcactcccctggtctcccctgtcccccgcccctcctcgggctgctttcgttttctagaagtcttatctactgtaaattgttatataatgccagtctgcgctccctcttttttcttttaaaggtctgattgcttttgggcccccggaaagaacgccgttctgggctgggcttctgggagcagggagggaaggggtccacttgcaaggggggccaggccttgccaatccaggtggcggatgggacccagcaggtggggccgccggtccctgatccttggggcgctctctaccgagtttggggacccagcaaatcagcccagatgtagcctgccgtgggaaggtggggtgcgatagattcctaagtcagggatacatggaactgactttttcccccttgctgacaacatatagggcatcttcttaagctcagttgactgaatctcccatgtaacttcgacgaataattgaggaatcttggctatttcaggtttcaaagtgtcggctgcctagtgtgccctggatagatcattgcattctccagcctcctacatgctcactctggattaacaatttcttatttgccatgaggtttctaaactcttcactttcaaaaaggttgcaataaaaggtgtccaaa

SEQ ID NO: 47831 - DNA, 681 bp, Homo sapiens
agtgaaggcagtatggagatgtcaagccacagctcaagtaaacgttgaatctgacgaggtcaaactcaaacacaatcactgccctattttttggtggtgcgattttgaatcaaaagggggactgacagcacagatagggagagaacaagtgtctttctgaggctttctgagcttgaagccgtcctgttctccaaagctctaagcggaacacctgattagcagagtcagagagcaaacgtggtgcttcgcttggctatgaacaaacaactggttaaaaagcctttctggaggttcttgtgaaatctgtctgggggcccagaaaccctgccccgagcagtgattttagtaacatggggataagtttgcaggagattcgattaatgattaaatgaacaaaccgggagtcctggtttgacttctctttctcacctcccctatccaatcaatcacaacggcctgggaatttctccatagaaatatctctcaaatgtgcccttcactgcgtccccaaccccaccccaggccccagagtcagctgggcccagcttcttcagcaggatccctgccaggtgtcctaggtcacccgccagcccgcccactctcactcttcagtccatagccagccacactgcagccagagggagcttttcatataaactccaaaatcaagagtgttctgat

SEQ ID NO: 47832 - DNA, 1555 bp, Homo sapiens
tccccccgcccgccccaccccgcccctagcccccgagcacaggtggctggggtctcaggccagattgcttatgtgctcactagcaaccttcccagtataaaatggaagtctgatcgagtcaattacagtgcattgttagtcgttacctgttctggttgttgctccttacataaagtttaatctctttggtttgttctgagcagtcagaggtctcagctcccagccagtgcttggtgctttcttcgttactgtgagccctctactatgatttcactcgagtgacatttatagccatgtacctggttgacaggaacagtgagtcacggttttccacattcagcacctttgattccttcccttcaagggatgatgagcttgtgagtgtgtttgcgatgagtgattttatcattgaaatgactggaacctgcaagtctgagtcagctcaccctgcatggatggtgggggcgtgggggaagggaacggcctaggatccactaattctttgaaaacatttctgggggacaggctccatggatctgtgcagtgatcatctcggcatgggcgtcgagacttttaggtcagcatttttcccactgagaggtgtaatccattactaggtcatgaaatcaacttactaggttgctggtcagaatggagaatagaatagaaacagagtagaatggaaaatagagtacgtctcctttgataagcattggtattgttttgtgaaacttttgtttcagtttagtagactgtgatataaaaatgaatttattgctgtggttaatggtccaaaaactttgcacatcactgccctagatggatggtaagtctttaactgatgagttccttgggtgggtattgaggatgattgactcatttttgtatgcctttgcctctagctgtatgtagcatatattagaggctcactagctgtttgtagaaggaaggtaggaaggaaggaagggagggagggagggagggagagaaggaggggaaggaaggaggggaaagaaggaaggagagcaaggaggaaagaaataaagaaggaaggagggagatccgattttacagacttgaagggctggataaagcaggcctggaaatcatatttcatctctcaatatcattccaggatctcagcagccatctgtcttctcctcccttttcaaaacctcctcctaagtgatctggaaagggagttgaggaagtctcccatatgatggcaagagacaatggaggtaaccagctccaaaccagcaagccagagttcaggatgatagagaatcttcaggagggaaggagaatggctaagaaaattgctgtctctgagcagtgccagggttaatggaatctctactcaagagatcttgattggataacacgatgtgtttgctattgctgctgtaacaaatttccacaaatttaatggcttaaaatagcacacatttatcactttgggaggccgaggcaggcagatcacgaggtcaagagattgagaccatcctggccaacatggtgaaaccccgtctctactaaaaaatacacaaattag

SEQ ID NO: 47833 - DNA, 1546 bp, Homo sapiens
gcccatgtgatgccagaggcaatggctcagtacatggtttttgaccctcctgagatatatgctaaaagatttttaaaaatccagttccaagattacataaccgccaacaacaaaaagaaaatagagaagaaaaacggtattagtattagacctaacatattaattgctgatgactttttttagagagaagctagcttataattttatatatatatatatataattcttttatatgttgagttcagggtcactgaactattctgatgttctgaatagactaagcctgggccagtgcaaatttaaggcttgcctgatttcccctgttagggtcctgccagccggccgagaacacccttaggagctgggcctgttcacaccagacaggtggatgtttcctctgagcccgaactggactggagtggccctgcgttctcctttgtcccattccctaagtccccctgaggactttatctgatgaggccatttcagcttggtgatcacttcccactagttcctctgtgcccttaaacattttatttgggtcataaaaacacaattccatgaatcatttaggccacagtaagagctgcaatagggctttcttttaatatcctgtgagtactttcaaaatggatcttttgccccagttttattcgtttatcaaatgtttgtcagtgtggttgggccacctgaagatgagcacccagagagcttggcacgacggggaggagccggacttttaacaaggctgcgccagtgccctcctgtcagttagactgtctgtggagctatttgcttaatgaaactggacccgctccatgacggagagaatcctggcgtgacatgttttgtaatagtcccgtctgggttggctgtggccttgagagaggggatctgctcagggcttcccttcctggactgccagcaaagcttttagagaacacactttctgggtttctcccagggagacttatttgttttgacctttacacaaagacataatgcagattattcagaccatcgctgaacacagatctccatggctatgctcatagaaaattgttttcactccggaaggaatcgccatagcagttcctcgggggttctttgcatatgtttatcccacttaatactcataccaatcttaagagctttacagatggggaaactggggctctgtgaagtcactgggaagaagcaggactaggatttaacactctgtttgctgccctggggcaggttgccgtctaatccaggcagatgaggtaagtatagaaatccgagaagagggcaagagcaagggtgccccgcagaagtgcttgcacacatggagggagggtaggagaagggagggaaggagggactgcagaaagtctttgtgatatcgatgacattgggatgaaccttgaggaaaggctaggacatatgtatgcagatgtgtgcctcttaattaatggcagtttgtggcattagcctataagctcagtaaggtgggcaccctcctttcctccctcatttctctctctctctatcttttttttttaag

SEQ ID NO: 47834 - DNA, 828 bp, Homo sapiens
gtgactaacactgggccccgtgtggaaacatcccccgtttgcttatggctggggatgggttagagacagcaggcgaggagggtttccctgaagatgcaggggtgcaggccgatgtgggccttcttacacggtcctaggcccagttgtgtttctccctgctagcacgggttggcaacaggagacacccagatcatccctttatctattttttcctgtataggacaatgcataaagcatgcatgtgctcgagaaggcttccttttcctgactggcagccacagcaattggcatagcaagcagcaaagtaaggcctggttaaaatgcacatgcaattcatagcggggcctctgatgtcattgctgtggacttttgtttttagaacctgaaaaacacacgtcctccaggggcctgggaaattcccaggtggccaccaccgtaaacagtatctcattgagtttgactaaactgtggcaggagttcacgcttctaaccaccactgatacaaggtgagaaggggtcggcatggggaaagatgcctttgaaaggccatctgtgggcaaagtctcgtgcccctctgtgaatgcatttgatgtaaatttttgttcctcttggttgaataaatattgttactaaaaatagctttaaaaggacatcaggatacagctggagcaagacaaaggaagcagggcagattgctgtgggttttggaactttgctttcctgaacgcattgtacgtgtacagtccgttacggcccagccccatcactcatgtcattcccagaggcaaaggcatttggattagtgaaatgcagcctccctagtcctgc

SEQ ID NO: 47835 - DNA, 725 bp, Homo sapiens
actggccttgaccttggaaggctgacccagcctctcttccccgctgggcggtggggagtgggtgatgtccaagccaccgatggtataggcacaaaaaccaagccaacaaggaacccattccaggagtatgggggtgcttggggcctgggtctcaggggagatctgctttggtggagtctccaaagtataacatctggttctcgacttggcaggtccggagactcagtgttatcgcagctctttcagaagtgtttgcatcggggccttacaggtgcctgagatatcaaaaggatgctatgtatttagtgagaacattttgtaaaggccagaatattcctttccagttttccagcatgtcctgggctggggaagttgaatctgtggctagaaggttgcttggtgagtggggcctgagcactcacggggagagagatgaccctgaatgacacctcatgccagccacggcgagtactaatgagtcatcccacagttgagcatatcgctggtgaccagaaggttcctgccttcctgttacagcatctctgccagacagtgaggaatgaacactgcaaaattttccctctccgaatcttttccatggtctttccagcagagcacagtgtaactgattgcattccagctcacgtgattctagtcgcatcttaggccttcttttctgggctgatgcgaaatcacacacaacgaactgggcgcacccttcattt

SEQ ID NO: 47836 - DNA, 465 bp, Homo sapiens
caaggagctggcagatttggtgtctagtgaggacccactttctggttcaaagatggcaccttctagctgtgccctcacatggtgggagaggccaggcagctctttggggcctcttttacaagggcctgaaccccattcatgacataatcacctcctgaaggttctgcttcctaatgccatcgcattggcggttaggatgaattttgagggaggaccacaaacattaggaccatagcagcttctttggtgtgaggagaggctatgacatggtttcctggcaagggggaattcagcagtgacagggcaggaaggtgctcattgtgaaatctctggttgggccatggcttctagccacatctctctcctactaggaaccaaggagcagctctgacttctagattgactggatcaggcttccccatcaacagtttaggaatgcttgcttagaaactcgaaggccatcaa

SEQ ID NO: 47837 - DNA, 2886 bp, Homo sapiens
ggctcaaagtaatgaacctcttataagtcttatcagtcaaattaatgaaccttagtttcctcatctgtgagatggtctcagtaataccaatgtcatagacaattagctgtgtacatttctgtagacattatatgaaatgttatatgtgaaactgcctgcaatataggtactcaatcaaaaaaatgtgaattttcatttgctccctgcagtcttactatctggctgcctgttactttgaaaaccatgtgtatgaaacagtaacaggctacctaaaaagaaaaaaagaaaaaagaaaatgatgtgggaccacatctgtgtgtctagcaggcatggaccttccctctggatctgtttgttctgaccttgtcttctaattgagctggataattacatggtaggaactctccccaacatcagggccgagaaatgctgtcaccatgttttaatgcaaaggcactttgccaaggataatagtcgataccacgggcattgttttaggtgagataaaggaatcatctgtgaatgaatgctgtgtccctttagagaaggaaaaaatgaatcggcagccccaacagcaacccaatatccaaagactttcagtgaatttcattttgttcatttttctaccaaatatgcacttttgaagctgtctttgcctgatagtctccaacttggtgtcacagggctcgtgggctttaagctgttaaccttgttttatttctcccctttttggaaatagaaccattttctcctgaaatacctttgtagccttttttcttttctactcaaaagcaccttatttccattttgcataattattatgtactatttttcaaattatgatgtctctgctattggaaacaacattgtttagtgagtttgtgggtgaaatagcttagccttctgcactcacatgtgtctctgtctgaacgactggatatttctaacctgtattggtcctatattatctaattccttgaggtttatgatgacggatatgttaaaaaaaaaatcttcaattcctctttattcttagggaaacattgtaaagcaaaatttacttagaaattcttcctactttgcaaaagaaagaaggtggccctttttctcccccaggagagagatcgttagctcagaggagcgctgtcagcagaggctggagcacacggaagtggggtctgctcaggtccctctcggtgttcattgcttcacctgcatgacgacctttgcacccatcgctttgcagttcgccaccaaacgtggacccagatgtcccgggtctgctctgatgattccacaacattcaattcagcaaatatttgtcgagtgcctatcatgtagcagtgtgtgaggcactggggatgccacagtgactaaacagcctacaacgcccctgccccccccggacatgccgttccagagtccagtccagggaggattacactgtgcttccgccagtcactcggtgcaccgtccgaaggaggcctggaaacattagggtcagggagggtctggggctccctgtccttgccaacacccttcctctctgcaggtctcactcctgcctctgacaccccctccagaaaggcttcaccaacaccccccgctccggcccactgagttggttccctccaccgttcctcaacacctgtgtctccacacttgctcttttgtttgtagtgtgctgatttgccccaccccccaacccccacactggaatgtgagctgccaggaagcgagggtcttgtcttgatcttcctgctttcctagcacatggtgcagcttgctggcaggtagtgtgtattcagtggctgtgtgccgagtgcctgaatgaaggcgtgaaggagactcagtcatctcctgcatccacggtactcgtagacttgttctccagctctggaaaaactttccaagactcaaatgtgccttttccccaaaggccttgagttactgcatcttcgtaacgccgaagacacttttccgtagcggtaacatctggactttgtgcagtgtgactgtcccagagggcctggcctcgttctgcgggatgggcgtgggggtgccagctccctggcagaggccccagtcctgggtaaagctgtgctcactgcctgcccaccctgggtgagcaattgaagccctagtgtggggcccctggccatggaagcactggggaaggagccgctgggggaggaggagcaggcacagcaggcgtctcctggtggcaccagcagccacacccctgggccacctcccagcaggcagcctgatggccccagggccttgggatgggaggagagcctcagtggtgttcagtgtgcaatctgaaacaaggcagggcattttccttccaacaaggttttcttgaacatgtaatgattaaactaattcatattttgttgaaaatgtctctgttgagcaattcattgccaaacagtgctcactgatgagctatccagcgtttgggttcaattccatgaacattgccggtgttgaggagatttaatttgtatagcatttgattctttctcattcctgaacgcctcctttcccatcttgccatccctagaccacccgcaacccaaggaaagaaaaagggaatctagcaggcctctgagattccggatctccagggggcttgctggaactgaggggagttgggccctatatgtgtggccttgtcctgtactttaaataaatacccagtttaagacagaaatctgcaaggatgacagaagaactttctctagtcacattcctccaagaagttgggtacagaccagagctgagataggagataacctgggttttgccttctcaaatgtatgatcctccataccccaaaacaattagactaattaaggtattgtaagacaacttgcaaaa

SEQ ID NO: 47838 - DNA, 1838 bp, Homo sapiens
tttacacactatgatttgaagcctgtattataaagctacagattcccaggtcctgtatcttaagtagacctctctgggtggtctgggaggccctgagttaagagtaaggacactaactctgtcttgcatgcttggagggtgtttgggccccacgggcagaagagagcactctccttgtctcccctcctccgctctctgttcacgcaagtgcttgaagcctggagcccctctcctcactcatgaactctgcaggttcaaggcaagactgtgctgtgtttggagacatccctgtttaactctgcatctagccagaagtcctgtagggaaaaaccagatttcctaagtgacattcctcgactcggtagggtgaccttcaccttcctcctcccttagcaagcctgaaagctacagttctcacccgacaaaggtagacagagagacgcgtgtgaaaaagagctgttgagctttgatgaaactgaacatcaagtttgtagtctacaaatgggtatgtggagttctactgtcacctccatgctctctgggtttgagcttttccttccagcttgctttgctcatattttccacgttagtccctgggctcattgatttaaattccctcccttcatacaggcatgcatagactcctggctctgtgcgtctggggtaattaacacgattagtcactaatcgtgctttccaggcacggggtcctgccatcgtgatcttgtaggggaatgtcactcttgggagttttatgaaatcatctatttggtttttcctattctggagttgtgagtggatatgatttctgaatctactttttcctctatttgtctccaagtaatgcgctcatctttgccttgtggtggtagatttatttctaagtatgtgattaaggaacaaatcacaaaatgaatggtgcttatgttcctgcctgtaagtgaaaagtacctttgttttgcagtgactcatttgaaaaggaaaaggggtcatttctattgcaacccttaaaacctccatttctcacaatgctactctgattatttcagatgtgtgagtcattggctcaggttatttcatttatgattgtttgccttagctacttattattgaaatgctttgcaatcgagaatctgaaacttaaaatgctaggttactttgtgatttctgcaaagtagcaactccctggattggagtgtggcaataatgcagcaaggccacttcctcttcctgtgtaataataaatgtatgcctcgtggttatgtctaaaaaacagttattctcatgtttatgctttcatacgtacaggacagaccaaaaatatcaaatgtaggccatttgctgcagtcaggagtcatgagctactattaacaaactttttttatgtgtatccatttatagacaaaacattaaaagaggactcaaattgttttgatacaggaaaagattctctacttcttgttccaaagggcacttggttttaatgtctctgctatatcttgttaatattgttcttttgttttgtttagtttttaagttaatcttctcccaaagaatgtcctctggaaaacagagtgacctaattacccaataatgaaatccatgtttcttatccaaatgtttaagaaattaatttagtcttaggggttttgttcaaggaatcagcattatgtcaaattctaacctgtaagccagtctctaaacatgaatatagaattaatgacagtattgattctgggatgtcagtgtctgtttgatgctaaaatgattttatatctatctatctgtctgcctgtctgtctgtctatctatccctccatctatcttttttttttttt

SEQ ID NO: 47839 - DNA, 1488 bp, Homo sapiens
gctgagctgggagaatctcttgagccccaggagttcaaagctgcagtgagccatgatcataccactgcactccagcctgggcagcagagtgaggccctgtctccagaaagataataaataaataaataaacaaacaaacagatcactgttccagctgtcccccggagagaagacaaagagggcttctgagaggagggactggaaggcaaaacagcgtggaaggaagtccctgagtgggaggaagctggccgtttctatttaagaagagggaaagaggaagacattgcaagtgggccatgcacctaggttcccccggggcgtccaaagcactcaccaatgcgagtctaggtagagccggtttaaccatctcctagacccagagcacatagtcgccttgtaacagaactcttcctgtaggctctttcctgcctccctctctacttcacctgctttattctccaccgtggaggggccagaaactgcagctggcgagctggggtagtggagggggcttaacttcacatcaaggtagaagttaccgttattcactgggattattactctttcatttgcttaaatggcactgtttgctacttaaagcgacaaggacttcctattaccttcatattatcatcagagaagtcactagacctgcctgagatttcctgcggggacaggagcaggagcaggttcccagggaaacacagacagaggcatttcggatccataccctgatttgtccaagtgcaacagcccactacgcagttagagaacccggcaggcagtaggcctccccgcgtcaactggactttgccttttcctcctttctgggatggctctgaacaaatcagtgtgtgctcaagtgcaaataccaatctacagtgtattatccctgcagtgagagtgtggcaggggacatcctggttagggggtggaggtgatgagaggccgcagaggcatcagcctggggaagtggggtggctgtggaagatcccaaccctgcagagagtgcacttgggacagggaacggtggagggcaaagcatgctagaacttgctgtaagagcaagaggcagcctttgcaactttgagcaggtggactttgcggtccaccaagctgcgtctcagacccaaaaaggaaaaaataagcacaccaaagcctaagatctactaagtcaccctcacaggagggttctggccattcacaagtagccatccttggagaagctccatagagttaaatcacagctgtcaacacctgaggtggaacactctctcctaaccgggtctgtctggttcacgttgtccagctgtgccctcgctgaaactggctttgctgtgccaacatcatcttcaaattcattaatcttgagaagggggaaaaacgtgggcttgttttactcactgccattgttcaaactatgtcgaattgtgaatttaagtttttttggaaaattcttttctacacagttgctcttttccctaacca

SEQ ID NO: 47840 - DNA, 1052 bp, Homo sapiens
caggggatggagctcctgtcgccagcaggcggaacgggtctcgaatccaggcagtcaaacaaggtttgaaaggaatacaaatgcctaccctaattgacagcacagtcaggagcacgtacagagtgagactgaacaagaaagccagagatggagtccagggagacagctcagagccgaggccccggggctggaacaggggacacgaggctggtgttgaagcaaaggctggagcagagtgacaggtggggacagaaaggggaagagatggctgccaccagctgaaggacaggcccgggcgggttccaggcgagctgaagagtgctgactctggtggagaagccagtgagaggtggggctgatgaggaggaagagttgcgggcactgaggggctcgggttagagatgaggccaggcctgtatcagggaactggagcgcagagggatccctccaagagacactgagggaggactcagtcctctttctccacgagggaaaggccgagagcctggaccagaccatgccactccgggctgtgtcctggggaggccgctcagccctccagctgcagtcaccttctctgaaccaggggcaaaatagcaccacctgaactgccgggctgctcggagaatgacatgaaatattgcacctgcgggcctagcacagcctctcgcacgctgtagcaggagaggaggatttgctagtggtgactaggtcagggcagagtgggaaattgcagccaaattaaacagaggggcagggccagcaccacgggcgggcagaggacctgtgccaggctggtggctctgggagggttctgccaggcgtcaggattggtaggggtgcctgttctgatagaagggaaaagaaacttgacttttgccatgttaggattttagtctccaatggctcatcctataatatatatggattttatagacatggacagaaagtgcacagttgattttcacattcggcagaggtgagtcgttggttagatgtgtccagcatgcgttagatggaagaatgagatgaaaacaaaacgttattttagg

SEQ ID NO: 47841 - DNA, 1565 bp, Homo sapiens
ggctcactgcaagctctgcctcccgggttcatgccattctcctgcctcagcctccgaagcagctgggactacaggtgcctgccaccacgcccagctaattttttgtatttttagtagacaaggggtttcaccatgttagccaggatggtctcaatctgctgacctcgtgatccgcccacctcagcctcccaaagtgctgggattacaggcatgagccaccatgcccagccaatatttattctttctacccataaacatggaatgtttttccatttgtatgtgtcatcactgatttctggcagtgttttgtaactcttatcgtagaaatctttcacctccctggtttagctgtatgcctaggtttttaattatttttgtggcaactgtgaatgggattgtgttcctgatttggctcttggtttggatgttgttggtgtataggaatgctactgatttccatacattaattttatatcctgaaactttgctgaagttgtttatcagatcaaggagcttttgggcagagactctggggttttccagatatagaattatgtcatccgcaaacagggagagtttgacttcctcctctattcttatctgaatgccttttatttcttcctcctgactgctctggacaggacttccagtactatgttgaataggagtggtaagagagggcatccttgtcttgtgccagctttcaaggcgaatgcttctagcttttgcccattcagtatgatgtcagctgtgggtttgtcatagatggctcttgttattttgaagtatattccttcaatgcctagtttattgagggtttttaacaggaagagatgttgaattttattcacatctcttttatttctgcacctattgagataattatgtggttttgggaaattttttagttctgtttatgtgattaatcacatttactgatctatgtatgttgaaccagccttgcatcccaaggataaagtctacttgatcttggtggattaactttttgatgtgctgctagattcagtttattagtattttcttgaggatttttgcttctatattcatttgggatattggcctggggttttctttttttgttgcatctctgcctggttttgtatcaggatgatgctggcctcagaattagttggggaagagtccctgctcatttttttggaacagtttcagtaggaatggtaccagctctttatatatctggtagaattcggctgtgaatccatctggtcctgggcttttcttggttagtaagctttttattactgcttaaattttggaactcattactaatctgttcagggattcagtttcttcctggttcagtctttggagattgtatgtgtccaggaatttatccatttcttctagattttctagtttgtctgcatagaggtgttcatagtactgtctgggttttttgtgttttgtgtgtgtgtgtgtgtgtgtgtttttttctttgtatttctctgggggtaagtggtaatgccccctttgccatttctaattgtgttaatttggatttccctcctttttttattagtcta

SEQ ID NO: 47842 - DNA, 1006 bp, Homo sapiens
gctgtgctcatcagacagcccagcagagccctcccaggaccccagcggccctcggcaacccctggtgcagcaccggcttatagtaaatccttcataaatattggttgacttttttcatggcatcgctgggccctgaatccaggtcttctgatccttccatttcttttacataaagagctctccaaatatttagtcaaagagttttgggtttcggtttaattcttaagcttcagtttactatgtcttttgaattctagctttcagcatttcacctctttgtaacagaggttcaatcttttaaaaaatgcactttggaactaaagatcaatagagtttatcttcaggagtgtcagcaaatactcactttatcaagtcattgctactcagaactaggctatttaaatagttgtagtgttgatacgtttgtcattcctgcattttaaaatattcaccttcacaattcagtttctaaacttttctactgaaattaacacaaatgtttgactgagttcgtattttataaaaagatatcaggtctagtttttctacccatgtttgcaggagtaaatagaggcaatagatttcacagctgacattaggattattattaatctaggcctcagtggcacccagctggcacccatagagacctgaccttatctttgatggattcaaagccagtgatttctatccagtgctcaggggaagcacacagccgtgccatctctttgttctctccttattgcagaatcagttgcaaggcctccctcttcttaaggcccctgcttttggagctcagcacctctccagatgcctgtgacattagtgccatttgatggggcagccacctggggtgccaggcagatgtggcacctgccaaaagagggtatcctgcttggcagggcaaggccacccagagtccttggactggctccacagctgttcagttattctaagcagaaggtttgggcctcaggaagagagaagtaggagacctgcttcttcc

SEQ ID NO: 47843 - DNA, 2300 bp, Homo sapiens
tctctgccacaccctgctcacctaatccatcaccaggctctgtacagtttgcttactaggtggatcccagcttaaaccacttcatccctttccttctgtgcactgcctcggccagctgcaagccgccatcatctctcactttaactgtgcaaaggtctctcggaggacacccaccatccactctgctcctcatctaatccagcctctatgctgacatcagagtgaccgtttccaaacagaatctcatcactatgggaaggaggccaaaatccttaacctagtatacaagacccacctctctcggcttgcaccgtagtcctgcatgccacctgggctccagccccgaggtctcctctggttcctctctgttaattcctgctcatctttcagggagatgttcaggcgtgggctcctcagggaagcctgccactgcacacacttcccatagctttctgtatgcttccttcatagctctgaccagggttgtcatggtatacactggggatgtgtggactcgagtggccgatgtctctgcccacagttgggtaagcttcaagaggccaggcctgtgtcagtttcccttactgtattcccagcagccaactccttgactggcatgcagctgctcagttagtatttactgaaggagagaagggagggaagaagaaaaagagaatttgatgctcctcttgctgtatctaccttcatgtctccatcgtagtcttctctcttagagaaaaaaaaaaaaagtatattgcttttttggccctatgatgaggttagtgttctcaactggggggaaaaaaaaagcctcgggcacccaatctaaactaaatgaaacccatatccttcaccctcaaacctaccagaagcacaaattttaaaatgtcagactccaagagaaatgatcatttaaaaaaaattaagtctgatcaagagctagtaatccttgcacagttctgggagggtggaaatgccatcactgaaaatgactcatggtgtctttaggtctgtgactgacgcaacctacacgtgtatttatctactcaacagatatcggagggcctcacgtgtgcctcctacaaattcgaataaaacagtagctttcaaactttttgtgttttacagcaactcacagtaggaaatacattttctactgggatccagtgcacagagatgcacataaaaggcatgaaacagtgcttgcctttctcaacagaagatgccttgatactttctattttattgtttgtttttagtgctggtcatgaccagctaaatcaatttcatgactcactatttgatcacaacccttagtttaagaaatcctggaataaagcgtaattagagtagctccttctgagtaggccaaggattccattgacttatgccggggttagcccagggtgtcagcctgcctggggctgggattttaggttgtatacctccgggaccctggggatggcacatttagcatgccacacgataggcacctgttggcctgccttcttagaacagctcagttttaaattctggttgaaataaatcatttcaagcagccttgttggagcagtaggcagcccatccatctcatcatctgaaataagttatttcagtttctgtgaactaacctgataggtcatccattcttaacctggggcctaggaataggcttcgggaaattgtacctaaaatgtgtgagtgcacgagagtgaagggatccatagctgtcatcagagttttaaaccagtaaggaatgaaaaaaaaagtctaagaacggttgccctggaggctataaacagtttctgatactcttggaaaatagtattgaaagggctgacagttttagtgtttgctgactcttcctctcgtggtctccctgatattatatccttcttccttggtaaacttgttcccatcacaccttcacccagtcagcctcgcccaggctagaaaatggcagctcttggcaagcccccccaccgctggctggtgcacctgggtgaagacaccgcagctcttggtaggggggatgggggggcggggagtgcaaaaggccaggacccaagttcaagtcctgtgccatagagtcctacatcccatcaacagtgccccactgtgtggtgtttcataagggagcagccccacctccaggaacttcactcacagctgctcacaaaaattacagtcaactttaccacatttactagctgactgatttacagtcaactttaccacatttactagctgactgatttttttttttttttggttgatgtaagcagtgatccattttagaa

SEQ ID NO: 47844 - DNA, 455 bp, Homo sapiens
aagaaacatggagctcatctgatttctttaaaatctctacaaacaaacaagaaaacaaagaaagccttaaattttctaattccagagatttcaaaatctttcaaatctcccttataatgtatttaaggatctcttaaggaacgaacatttcctttttcttgaaagcctatcggaatttcagctgagatgattttctgccagaaattctagataactctgcagctaaatccaacttgagtaaacatggatgactcagtggggactgacacatttttgttgttaatatcctggatcaaaacatgcagtatgctttgaaatatgcctaggtgacacatgttgaaaaaaattattattattttgtgaagccttttagaaagctttccttgaactcatcaacacaactggaaagctaccagggagatgatgacaagcaaaggttttttttgttttgtttt

SEQ ID NO: 47845 - DNA, 773 bp, Homo sapiens
tctgccctctgtgatgtggagtaggggctggggctccttgggtacaaggcagggaaaaggggagggcggcggggttgaggaagctgctccgggcttccaggccagaccatcccagaatgaaaggagttttccccatggatctccaggccttctccatggaatttagacagctgaaggcagacacaggtccctgcggggaagtacctgctccctcttctaacaagtgcaaagcaagcagggcaaggctccgaagggaacagctggagcaggcccaaccccaggtggccctggggttccgtggttgacccggaagcaagtcaggcagggagccaggaatgtggtgactcacattagctatgtggagagagaccagggagtgtcccttccaggtggaacccctcctcctccatgagtcacccggctccatacacctgcctgattccagcagcccaacacacctgtgccaactagcagcttatgtttctcatgtgcttgcctgtctgtcctattgacgattcctcaaaacaccaaggggaggtagcatgaaatgttatcctggaaaacctttgtgagttagaaaacgtggccaagtgcccccagttgatgactggcaaatctagaatcagcctcatgacgtttccagtgtgttacacaaaccatccagccttgctgcttctccaaatactgtatctatgaagtatgccagactctcagcagagaggatttctacggcagtggaagagagcaaagcaggtgtcaaggttcattaatct

SEQ ID NO: 47846 - DNA, 830 bp, Homo sapiens
ataaaaccgtggacattctgatgcttcccatgaaacatcatgacctatccccaacccgtgtatcaatttgggctacagggtgcccagatatttggtcaagtattattctgggtgtgtctgtgatggtgtttctgggtgataataacatctgaatcagtacactgaggaaagcagattgcccaccctgatgcgattgagcctcattcagttgaaggtcttactagaaaaaaaaggctgaccctcccctgagtaagagaattccttctgcctgactgccttggaaatggaacaacaatttttttcctgccttcagattcaaactgaaaccataggctcttcctgggtctcaagtctaccagtctttgaactgcaactacaccattggctcctggttctctggcctttggactcaaactggagttacgccatcagctctcctgggtctccagcttgccaactcaccctgaggatcttgagatttagcctctgtaatcacacaagccaattccttataataactcaatctctctttctctctctctctctctcccccccacccctctctctgtgtatatgtgtgtgtgtgtgtgtgtatttgtgtgtatatgcatacacatatatagtacgtatatattttttctgtctcctggagaaccctgaccaatacacactcccaagcagcagcagctcagaaaagctcagggcatcattatgtcataatttccaacccaagactgtataggttacatcaacattggtcattaatatcatcattacgaattctgagaatatgggaaatattctataatattataaatatatgatataaa

SEQ ID NO: 47847 - DNA, 2685 bp, Homo sapiens
aaacttgacattaaacaccagagatttacatttgatagttgtctcttcttacaaatatatccctcataataataaaaaagcactccactagtatgccaattaagacacatcttccagtcgtgttttgtccttgagtgaaaaatcttgctgctcaattcaagtcattcgtttattcataacacccatatatatatctccaactctggaaagaaacactgacagaaagatggaaaattttagagacctcgtttccacttcagagagcctgttgtcccccaaacctctcgggccctccggtatttttaagcttatcaagattccagaatgaggttaacggggcgtcacagaacgaaaccccccaccgtcccgtcccaggggcttcaagccaggaccccggcctgagggagcctccgggcaggaggaagaggcccaggaagccatcgctccgctccttcccagctgtttatgtggtactcagggtactcggccaagggcacggcgaccccgcaacaccccaggcgtggggcaaagacagcggggttgcggggctcctgtctgcccggggcgtcgagagttcctgccgccccctcccgcctcatgcacggaaagcgccgagccacggcgtgcggcgccggccgagcgtgaaccggagtcggggttcggctaccccgagcggctctgtgggccgcggatcgcttcccctggggcggccacgcagggttgcgggccatggcctggggcgcccgtccggaccccgccgctgcgcgggacgccgctcccagcctcgaccaagggcgcccgggggcggcggcggcggcggcggcggtgactgcccggggcggcggcgcggcgcgggggcggccaggaggcgaggaggccgggccgcggccgagggcccagggcgcgcttccggcgggcgtcgcgcgcgccgcggtaaatgggaggctcggccgacaggggcgggggccgcgcagccggggactttcaggaactgcaggagcgtgcggcgcgggagtagccgagcgcccagcggctgggcctgagcgtcgagactcggggccgaggcggaggagcggccgccgcgccggggcccagccggagccgccgccctcgcccttgcctttgcctgcgcggctcagaatcaccatccgcggcgcgggagacgagccggccgtcccgggccgggggacccgcccgccatggccaccaaggtgaggggcgcgcggcgcaggccgggccggtcgctcaggcccggggcggcgcggagagggtcggggccggggccgcggggagggtcggggccaggggtggtcgaggggccactccgcttcctcggtggagtccccgggcgggtccgcggcccagccagtcccttctgggcatgggtgcggcgggcagtgcagacagaccaccaggatcgcaccgggggacggcgtcgggtctgggcgcgggttgggaccccgggcgcagcgaggtttgggaagtttgcacctgagcgtgggctgcggcgggctcgccgggaggggccgcgggacggaaacttcccgcagcccggggaggcccccgaggcgactggcgctctgtggcgtccggcgtccccgccgcccccacgtcccctcccgctgccgcctgggggaccctcgcccccgcggggcgggtgggggtcgagacctcggcggagaggacgcggcgcttcccgtcccggcctgcgggggctcgcggccggggagggaccgaggctgggacgccccgcgcccctttgccttcgctgctgttatttttttcttttgttttgctaccttttcattgtgaatggcattgccggcatgaataaaatatcaagagggaaatgactgtgctttcgattacgtgtttgcctgaaaaaaggcccaggcccgaattacgtggtggaactttgactcctgcttcgtcattggctaggagcggtggtttgcttgttttacgttattgtttatgaaattagcagtcactcttggctacctgaattttcaaaagccaccctcccccgctccttttccttgggcgttttcagtagttacttgatgtagaatagccactggggaagtcacggtcacggaagggaggacctgggggaggaggctctatacctgagccattaactgatctgtgatacactgtgaggagtgggtttacttttgcacttagtttttgtaatgtcactttgttagcatcagcacccctttgtctatttgtttttgagatctctgagctacttttgggttgctagaaacgttattttttatttttcgataggtgtttgctttttttgtggagtgttaaggtagaaaatggtaagaaatgtgaaatctctttgaaagatcagcattgcttgacttcggtctgctagatgttgtgctgtggtaaattttgtgctctgaatccatctaggtgcagcgtttgtagagaaatggggattctcctccagggaacctgttgctgctgttactgaaataattaccttcttgttaatatattattgcctgtgctgtgctttggttttattaatgcgatagaacttgccacctttttaacgtattaattttgtgttgacctttttaaaaataaaacttaggccaaggatttctaaggaaatttgattttgaggtttgttgccagacattccagaaattaccagttacacat

SEQ ID NO: 47848 - DNA, 1942 bp, Homo sapiens
gcacgttggccaggctggtcttgaactcctggcctcaagtagtcctcctgcctcgacctcccaaagtgctaggattacaggtgtgagccaccatgcccggctcaaagccaggattaacatggagcaccggcaggtgtcatctctcctgacatcctgggctccttccgttctctgaacccagcctgctgtgtcccacctggtggcctgtctgcttgctgtcccttcagctaactgtggtccttctcaggctaagacatggcatctccttgaggcccagaccaatcagtgcagtcatcactagcccttattagatggagtggattgaatttcacctgacgttgctcccctctctgtctaaggaagggtctggtgagtgggatcacgtcagcagagctcatttcctgcatgtgattctactactaccttctactactaccctccctttaccgctgcactcagtcattatttctatctgatagcttaaaaaaaacaaaatagaaaaccactactcatacctgaccccccaaaatatactggtagctgctcagaggacagaattaattttaaaaataatctaaattaggcaaacagagcgtgagaagccgataatcacgcaactccctccagaaaaggaagtggagcaggcgggcgcccagctgcaagccctcagaaggctcagcctccagcgccaggacctgattttattactaacaaggtgcggtcctcattctttgggtctgccacatgcctcacggtaattttccaggcaaactatatcacatgatactggctttactgtccaagcaataagcgcagagtctctggcagtttggacttctctgagattgcactgctgagcacgtagctgcggcggtcacaggaactcacatgccaaagaactgggaagaatgttttaaaaacctggaaagaaccggtttccttttctgcagcctaacaaatacctccttgagggaagtaggaagctttcagaactccctcactatccagaggcttatcattgtgtgaaggatcagagtttgtcaaggcaaagagaatcaaaactatttactcaggcttggaattgatcaggtgctcgggaggctcggagcaggggagcggcggctcctggactttaacccccgtgtttgtggaagcagtgactatgatgatgataggagagctggcgccctcacgcgcttgtcacctgctgcgggcatcagtgagcgcttgctgccgcctctgagataaggagggctctgtagaaactcacctgggccacctccactcggaagccctcctttctttcctgctagacaagaagcgcctggagcagccgagggaacacacctggtggcaacgcctggttcccactttcgaacctcaggattgagagagggatgaacgcgggaagtctgaggacacactctgtcctgcccttaactgtgactgtccgagccacctagggggacacgtgggaggcagtcccagggaggctgtactagagaggtgctgcccccaacagaagccgggagtccctgcctgggcccaagctcctgccattctctaagtgatgcagagagggccccaccgccgggaggggctttctggcacagctgttctcgcccctgcactctgaagaagagtagatacctagatacagtaagtaaaggaaaagaactgagcatttctctccctttttaggaggaccatcaatttatcttggtcaaagaagggaatttcctcatctaccaattttctgctcatagatgtatagaaacggtagaattttttaaagacggccaggcgtgatggctcacgcctgtattcccagcactctgggaggccaaagcgggcagatcacctgaggtcaggagttcaagaccagcctggccaacatggcaaaaccccacctctactaaaaatacaaaaattagccagatgc

SEQ ID NO: 47849 - DNA, 2466 bp, Homo sapiens
cacctgagaggttgtcccctgaggatggcttgtctggtcattactgaatgtctgcaggggcatggcagtgttctgcttggctctgggggctctgccctttctaggacaagtcccagagacaaacagcttggcccagtacagcagaatggggtgagagaggaactgagttcgtttgcgggcaggatggaaacagctgatggaggcttctcgggccatcctcacgtacccatcacaagcgaagggaattaagccgccaaaccaccccaaagagtgactccaactcagccctaaacacccatacccaccccacctcccctgcagctctgacaggccaagcctgggcgctagaaccccgcgccagaaggccgggccacacactccagcgtacacgcgcggacacgtgccggtgtccagagccggtgggagaggcgctgtcaccatctgacaggagaggaaggtggagcgcagagaagtcagggtcacgtggtaagtgggggtcgtggtctggggatcacggctccaggtctcttcgcgacaacgcaccgttgacccccaacacctctccctggcggggtcggtgaccgcaacagcctccgggatagaacgctagtgaaaggtaacctttctccagcccgctccacgcgctccgcacccgctaagcgcctccgcgaattaactcaggcctccgcgccgaagtaggcgcagttatgaccccgcttccccgcagggagaccgaggcacgcagggtcgaaaggactcgtccagggtcgcaggagccgaccacacagggaggcgcagcgcccccggcgggaacagtcagcgggtccagcctggcggactcccgggccgggctgcccatataaggctgcgggcggccggcatcgcagccaggctcccggggtcgccccgcgcggggcatcctcctccgcagcgaggaatgcgtggcatccgggaggctcttccgctccacgcccgcctgcggggagcctcagccccggggcgcggcctcgcgcagctgcctggccgctggggggagcgcggggccgggcgggaggcggcggcgcgccctcacctgccccaggctggggaggcgcgagtggggaggaggaggaaggggaggaggccggggaggagcctggcgcggcgggagcggcggcgcaaagtgaaactctggcaagttgcgggcgcgcggggagctgtcgcgggcagcgcgccctcgggaggacgtggccccggcccccgcccgcagtgggcccgaccctcatggccctgagcaaagggctgcggctgctggggcgcctgggggccgagggggactgtagcgtgctgctggaggcgcgcggccgcgacgactgcctgctgttcgaggccggcacggtggccacgctgggtgagtccgggccgggggcagcgacgcccggaggagagggcgcccgcattcgcccagcctcgggaagacgggtacccccccttcccgaggggatcgggcggcgctgggactgccggggcgtaggggtcgcgcgcagaggggtggctgtttgaatgaagtggggctggggactcgagagagcactctggctgggccggtggcgcacggaggccggccgcccctccacggggatctccggcccgcgccgccagaggatatggttgctggatagccggctggggcgctttgcgtattcatgaggatcccggggtgttgacttagccggcctgaccctgtgcctggcgccttttcttttgcacctgttgatgaaaccagtgattgccctttggtttgtgttggcggctccactcctggaggggatggggacaaaagccccaaaacataggctctggagaaaccgctgatggcagctttgtcccacgtaaatacttggtcgagaagcatcggtgctgcaatttatagaacttgtaaacaaatataccatgacctttatgctgtcttagatcctgccaagccagcgaatttcacctatggacttcagaagccttgaaactggcattgtgctatgggctttagtacgtgatctcacttaattctcacaattctactaaaaagctattattatccccattttgcagatgagcaaactgaggcctaaagaggctaagttgcttgccaaggtgacaccatccacctgacttttatgtggctgtttctgtaatgtcattcaatgcgtggcttcctggtatcgctaacctgggtcccttgttttgtgctaaccattataaggaaaacctgggtagcaccaaagcacgtgaaaccaggtctgattgttagacttctaaatgtggacacccgagagtaagctcccaccactaggcgtccagctgtaacagcttgccggtattcctagctaaacaaggtgcagcccggggtcactcgtacttgaggtggtcggcaaatgcagcaggctgctttgtagatgcctctagccttcttttcacatttgtatgcat

SEQ ID NO: 47850 - DNA, 437 bp, Homo sapiens
attctggttattagtcccttgtcagatgagtagtttgcaaatatttcctcccattctgtgggctgtctcttcactttgttgattgtttcctttgctgtgcaaaagctttttaacttaatatgatctcttttgttcatttttgctttggttgcctgtgcttgtggggtattgctcaatacatttttgcccaggtcaatgtcctggaggtctttcccaatgttttactgtagtagcttcatagtttgagggccatggcattcttaaaaacataactttcattcttgcatagctttttttttttttttttttttttttaagtaacctggactgtcatttggctagggaggcgggagtttgtgtgtctggaaatgtgtgggtttttttttttttttttttttttttttttttttttgggacggagtctcgctctgtctccc

SEQ ID NO: 47851 - DNA, 414 bp, Homo sapiens
ggagataccatgcctagctagtttcatttgttatctgcctggtgtgtgtagacatctgctttgtcacctccattgtggagagcaacatggggtttcaccatgttggccaggctggtcttgaactcctgacctcaggtgatccattccccttggcctcccaaagtgctgggattacaggcatgagccaccacgtctggccatggttgtgttttttaaaagagctcttatcttttccagagtcttactgaaatatttacagatgaaataatgtgatgcctggaatttactcacaataacctagggcagtgcttctcaagctttggcatgcattcaagtcccctggagggctcattaaaacagctttctaggtcttgagcccagagcttctgattcacaaggcctggggtgggcccc

SEQ ID NO: 47852 - DNA, 1639 bp, Homo sapiens
ttgcggtgagccgagatcacaccattgcactccagcttgggcaacaagagtaaaactctgtctcaaaaaataaataaataaataatacatgcatacatacatacatacgtacatacatacatacatacagggtacagcaaactaatccgattggaaactgccggactttggggctagatggagcatgggcttaaagtgaaacctacattttggctccaacacagactagctgtgtgcttgggcgggtgattcagcttccctgggggacagtcatgcgtgtgtgaaatggcagtggtagccctgagacagcagcatgggtaagcaggctggcgacgtcatctgcaaggaggtgtaattaggagcaccagctctggggccagacttggcttgagaaacttgcccaggcactgtagctagaaagtggatttggatcccagctccccgctctgtcaccttgggcaggctgcttaacctctctgtgcgtctgtttccctccctgtgagatggggctggtaagggcgccccttgcggtgggcgggaggatggagtccgcgcctgtacagctcccctgcctccactgcgctcaccagataccggctctcctcactcccctgtaccactcccgaccccctcctccctggacccaggagccccagtgctctgtggcaatgttaagagcctctcctggctgctacagtgctcctctccccagcctcccccaggccgtggtcctgcccaggaaatgcacctgggactgttgccaggcactcaggccccccacacggaggctgttgaggaagtggtgctagaaatcagctcatgactctcacggagtgatgtcatgcaaaattttccatagctctggcagccacaggggccatcctcctgcctctccgagggcacttctgctgaactgtgcttttccctgcactgtgtcagaagaggcaggtgggtgccgggagcgctctgtggccaaggctctgatcacaagctgccaaccccggaaccccacctatcctacttgagaagctgaactctgacccctgtccctgtccccagtgtgataacttcctttgttcttaggtggttttgaggtggtttcctgaggatgtgtctggggagatgtgatgggatcaaccccctgccctgctggcagccccaccccatggcatagcagcaggcccctgggagccctgagcgctcattaaaggaacgcactttaatgacagccacacgccaccctgccacaagcagcgctcttctccctatgaagtgtggtgaggaaattggggtgagagggtggtggaactggttgttttgggggtctcttcctggagtgtggagagatcagaaccatctccagaccatggctgtagacagcggcccttgatcattcacagaagatctcgctgggcggatccttcagacctcagcggggtgggaagagtgtccttgggactagagccctgccagaccccaaaggccggtttctacccgatgatctcttgggccccgtcccgagagtgaggcacggcgccaccaggcacccccgatacgcagcgtgttgtgaagtgcccttgtgagcagcgggggatagggaacagaaaaccagctgtcagcgacagcgaggtggtgcccc

SEQ ID NO: 47853 - DNA, 1602 bp, Homo sapiens
tgtgttttgcaggaaccagctgttgcacgtgcccttgaggcagcaccaggtgagctgctgtgactggctgctgaagatcatctgcggggtggtcaccatccgcaccgtgtatgcctcccacaagcaggccaaggcctgcctcgtctctcgcgttagctgtgagcgcacaggcactcgcttccacacccgtggcgtgaacgacgacggccatgtgtccaacttcgtggagacagagcaggtgagtgcccaggcccatctgtggcaccaaatggttccgagtggctgcagctcttgcacacgcgctttccacttggggcagaagaggccctggcatatttgtggtggtctctgatcaggcttcctcctataagtggagaacagcacgtgtaattgggctccacatgaaaatgtgacctctggtttgcatggtgtatcctttctgattcacatctcatgcagggaaaatgctgcttagccgaggtatttttaactaaacggaatcaggaatttttgccttggtcgtgaaaggtgggcagtattccaagggcagctgacagatgaacaaatagggtttgaaaatccttttaggacaaaaataagtagatcaatacaatggggggatgaaagaagaaaccattattttttattctaaatcaactgaagcttctcctggaagccagtattagcaccctagagttgtgaaatctgcgtgttaagcagccgctcccatccgttcccctagaatatagccatctgcttaatttctcctggagttttttctaaattctgttctcatttccagagatgctgtcttacaacttttaaatttttgctctaacttgcaatctgtaagataaggccaccatgtggaatacagtggtgtaagccataagaaaggaaaaccccggaaggcacatgtatggtactcctgccagggcaagctgggtgccctgtgtttactgagtgaaggcgtggctgtgcgtcccccctcgctgccgctgctgggagaggaatgccttatgcggactttggccactttaatccagcagaggtttgagcacctacctttactgtgtgggactttctgcctgctccagtgttcagagggtagatacagagatgaggaggctgctctcagagtccccactcagaggaacatcagagcagggggccctaagatgggcaacagctgcaattacttgcctgtaattctgctcagaatgtctgcactgtggatatcaacgaggctattatgtaaatatctggttaaaaatgagattgcttttggcatcttcgtcatgaagtctttgactgttcctatgtctagaatggtattgcctaggttgtcttccagggtttttatagttttgcgttttacattcaagtctttaacccatcttgagttgatttttgtatatggtgtaaggaaggggtccagtttcagtcttctgcatatggctagccagttatcccagcaccgtttattgaatagagaatccttttcccattgcttgtttttgtcaggttggtcaaagatcacatggttgtaggtgtacggccttatttctgggttgtctattctgtttcattggtctacgtatc

SEQ ID NO: 47854 - DNA, 3645 bp, Homo sapiens
ggtccttgctgagctcagggaagcagccccgtgaggatcgggctgcgtggtctgcaggggaacctgcctgggaccctgtgagatttacctgtttcaggtgccagtgatctgctgggattctggagaggtccctcaggggagcctggcacttcctacccccttgagtttgcaaagtcacaactgagggcctgggttgggacggtgtcatgagctctccataagctttgcttatggtacaggagcagactgtctggcgcttctggagacctttaacgtgctcctgtagacagtcgggtaaactcattctggtagcacagcgtggcctccccctccacctgacatctgaggaagtggcaggctctgcatctcggtggcctcgccccagggtgcagggagcaactttgaggaaattagtgctgagcctccagtaggaaggaggactgtgctggggaggcaggtgagccccttgtggtgccgcccgcaggtcacactggcctggggcccctgcagaggaaacaggatccaccagccaggcccgctgaccatttggaagtggagcgtgcacacaggcggctgtgcggtcatcgtctggcaaacaaatgatgggaccggaccaggagcagactggctccctgtggtggggactcttggcaggcggatcggcttcttaggaattaattctcaggaagccagaaaagggggaccctgtggcaccctctgcttttgctttggtttaacatgtttcctaggaggaataattaatcttctttctctgaggcaggctgtgtgtgtgtgtgcatgggttgtatgtgtacagtgtgtgcgtggtatgtgcatttatgtgttgtacatgtgtgtatgtgtcatgtgcattgtgcatttgtgtatacatgtgtgtggtgtgtgccttgtgtttgtttttcatgtgtatgtgtgcagtgtgtgcatttatgtgttgtatacacacatgtgtgggttgtgtatgtgttgtgtgtctgcacgcacagatgttgtgtacatgtgtagatagcatctcagcctccttgggaggaagccttgagtctttttggctctgctgagtcatagctggtgggcttgctctgcagtgctgactcaccacacagaaaaacaagaccaaaaagtcccctcagtctattaaaaaaaaaaaaggatgtaagataaatatttggctattcaagataaggccactgactcattcagggaggttaggatgactgcgtgtcctcccaggaatgcagacttggagataattggtttgcagacactgtatctggaagcagaaggtcagcagaaagcctttcagatagaaggtatatgtacccctgtgagttttcctgcctcgtcgctctctttttatggccattaggtttctgttcccactgctctggaagcgtcactcagggtcaccctctggctgctcagtctggggtctaggcactggcctggcctcatcacagcactggcacgggcctccgacttttcttcccgtggccccactgctcttcccggtctccctcccacctcttgtctgttccttcttgaatccctccttcttcccacgacccaagctctctccgacgccagcaggtgcccgcatgcatagtcatagcgtcagggcctctggggaagagaaaacagcttcgttttttgagtggctactctgtgctgggactatgcccccctcatttacccctcacagctcatcccttctccgtgcacaaggtgacatgaacttcatgtagagagagggaaactgaggctgaagatggctaagtaatgtgcccagggccaccctgctgggcaaatgggggtttgcaaagtggcagtcggacccagcttgtgctaataccagagcccactttctctcctgcttccactctctgtcctgcctccccaccccaagagccctctgtcaaaatgacatctgtgaggtgagacatcacttcttccactggtattaaaagttgttcgcccagaatggaaatgtatcacttgcatttgatggtcaagttatgcctactgccttgggaacaaagaagacagtcttgatgataggacggggtgcagatgtcacctacttcccctgtggaggacggggtggagaactttggagctcctttcttcttgctccagtgtgggcagggaggggcatacagagcactgacagccctcagtgttttcagaagctggttctgggcaagtctcagcttgggaggagcctgatgtgatgctggaagtggcattgttagcacttggggcagtcagagtgaagggagacattcctcagcctaaatagatcgtgggcattggtttttgttgttgtttggtgttttttggatttcactctgttgccccagctggagtgtcgtggtgcaatcatagctcactgcagcctcatcctcctgggctcaggtgatcttcttgcctcagcctcccgaatagctgggactacaggcatacgccaccatacccggctaactttttaaaaattgttttggtagagatgggggtctcactttattacccaggctggtctcgaacttttgggctcaagcccgcctcccaccttggcctcccaaagtggtgggaccgtaggcgtgagtcactgcgcccagcctggatattgttaaacattgtctttatatacaaatgttggtttcttttccaggaacctgggcctatgcagggcacacacgccggtcagttgtatgtacctaatttcacggtagccaactatgtctgtagccgttcaagcaacctgctattttattctgttttgtcagtagaagaatggagttcaacagctttgctggtactcaatacctggaaacagacagcatgttcttaacacatgcttttttcctttggagattaagggatagtattccagtttgacaatgtagataccaggctcctgtaattcctgtggcccagggaaacagtggctctaattttcaggtcctccactgcagaatgactcattcctgtgtgatctgagcgtgatctcgcctgcatgggaagctgccctgtaagggagcaggccggtgaggaacggaaaggaccacagcagcgcccaggccgccctgccaggccaggctagagttgcgcagataaaggccccgcatctgataagtgtcgccgcctgcccctgctggcgctcaggatcgtacttcttgtccttttaaaactcccttgcactccagcgtcattggaggcctgcaggcacactctgaaatagctgtacgtgtgggtggggaggagatagatgtcttaaagtgtacggatcatttgtttctctgcaggtgctgtcacactggaagcttgtggaaaccgtgttgtgtgtgttaactgagtggtgtgtttaagaacacagtggggcagggccaggaccaagtacaagatcaggttgagtcttgcattgtcaagtacgagactggctagcacagtcagtgaggtcttttggctatcactggtgcattttatttcattcagtccttttctcatagctctcttctgcttagctatttgccaaggcaaaaatagagggctctaaggaaggttacattccagagcacactgacttctattcatacagggggtggcggaaggctgttcctgggattt

SEQ ID NO: 47855 - DNA, 949 bp, Homo sapiens
tgttgtttctggtcgtcaaggatgctgtgtgaaaccgctgactcgggaacggtgctgcggtgcctgctgagtgggtgccgcgaagtgagcttgggtagcactgcctgaggttagaccctgagttcggtgtactgaggacgtttctgagagccgtgactctcatggagggcttcaggaaggctctgtggctgcgtaggtctggcacccggtgctgcctgttgtggggccacgtgagacttccacagctttcccgtgatttctaaaaataccccttgccgtccaaagcagggctctggtcagtgccagagagatttggcattctttctcctgggaagagcacagggtggggacacattccaagaacacatttgtcatcaatggaatgacacgctgcctccttcaccagggtctctaacaaggtgggttatgggccgagtggactggaggggcctccccactaatccccagtcttcctccctgtcccgaggggacgtgggtgccttcagaaagcctctcggccagggcctttgtcgcctctcggctcttcttaccgacagctctcgtgtgactgcatttgggttgccagccagtggctactggggcccagagtgccatctgccaggttccagggggtgtttgacaacgctggactcagggtccccagtcctgggttcagcttcttagcctgctctttgacttgaccctgtgccaggagcaggtgagtcacttgtccccatggctgtcagcacgctgcagtgacagcattggtgaagtactgggtcagcctgggcagtgagatggatgaatggaggtctcgtttaggctccacgctctggtagggagaaaagtcttgattaacattcagtctttccactagaaagagcgcaccacactgcacgagataactgacggcctccggagaaacgctcctgaggacagctgtgacaca

SEQ ID NO: 47856 - DNA, 2471 bp, Homo sapiens
aggtacaagcgattctcctccctcagcctcccaagtagctgggattacaggcacttgccaccacgcctggctaatttttgtatttttagtagagacggggtttcaccatgttgttcaggttggtcaagaactcctgacctcaggtgatccacccgcctcggcctcccaaagtgctgggattgcaggcgtgagccaccgcgcccggcctagtgagtgtaatttctgtgagctgatggttgggagaatttgctcaaagtcaaaacagagcatctcctgtccccagccatgtgtcccttaccctccctccccatggggctttgagggcttctgacctctcaaggtacccctctcagtccagcccaggagcaggcaggcctccctttctgccctggctggtcctgggtgagttcccccagccccacagggcacccggcctcagggctcaggagcaggaacttcggtggctttcccctgcttgccggctggccttcaaatttccccctcttcctcgggctttcatggcagctcctggacctgctgctgctgggctcctgtgggctccttcagacttccttggggggcttttcctggcgatcctggacagatcctgggcagggtcacagagccatgggagcaagagactccgcccacctggccaggttccatccctgtgcatggatcccaggcctccagcccccgccccctgctccccaggcgcaagacgttccagaatgagccaagggggctcctggttcctttaccagcctccatgtcccctgcctaatagagaaaaactctctcgttgtttaaagctcaaagatatcccttacagagagagctcgaagtcgcctcactgggggttagggcgatctctgagcctttccctctgcttagaaatgccacatgctcatgctcagagcaggcacttcctggttgccaattttatttggccagacctgcttttcctgtttggtttgttgctattagcaacgagctccagaagtgtctcccttcccacccatcttggcagtgatgctggctgctaatttgaaggaagaagggaaaaagctaaaaaataagaataataataagaaccccaagtccttttcccctatgccttgagttgtggcccctcccatcagtgggtgaagtgcccggcactggtgagggcgggagatggcagccacctcatgcggagaagggtgggctcctggccaggtagggaggggcactctagctgaagacctgggtcatggccctgcctggggtggccctcagccacctcagcttggcccagaccaaggttggtggcccagcagcctgcccagggcccaatggccatcagtcctgctggatgaagcactggctgtggaatgcatggcactgagccaccaggcactgttgggctcctccagcttcttgctcacagcaagacttgcttgatgatggcagcactgcattgatttacactcagacctatcacaggcagtcacgttgagtcagatcagatgacccccaagtccttctagtccttccaagtcactaggacctctggctgggcagaggctggactggcctgacctgaagccacaagggcatgagtgcagggtgagaggcctggaagccgggtggcctgggtaggcggacagtttgtccttcatcacggggctctctggggagaaagccagggagctgccaggccagggaagcctcatatggaagggagggctcttaagggcatcctggtgccatcagcagccccttgacctgcttcccatctctccccaccttcactctggctccctgaccatcctgaagtagcatcgggatgtgggacccacctgggccacttcagctggagacttggtctcttcagagcataaccaccagaggctggtgcgcggcaggatggggccggttactagggcaacggggagctggattatgagctctgcagcctgccacagcactgctatctctgagggcctggggcacctgggccacctgaagaacagagcagtccttcctcacctgtgccctccagagagccctgcaggagtatgatctctccaggaagccacacctgctctggcttcttttgctcaagggggaccttctgccctttcgcaggcaagacgctctttgtgggttttgtccccccagggcctttgtcctgtgcttcccttttggggtcaactgcctggtccactgtgagcttccagctaaagcacgtcctgcggcgagtcaccttggttagccgcacgggtcaagctctgcaaggagcttgccctcctcgtcctcccttccctctgctcccctcaccgccctcccctcctcttttcagaagctgctctgggcttcttgccacgcgggcgacacgcctatgatcaattttgacttccatcagtttgccaaaggtgggaagctagagaaattggagaccctcttgaggccacagttaaagctgcact

SEQ ID NO: 47857 - DNA, 1449 bp, Homo sapiens
ttttccctgcaggaaggtgtgcatgtttttagcaagctggctggtattttgcaggggatttttttggggtagacactagcaggctccccagcagtcccactagagatacaccaggttccagagaaggaaaggagtgctgtggttactattgccaagcagatcagacagagggacggggattgttttatttaaaaaaaaaaaaaaaaaaagctttaagtcagggaaactagaggttccaggttgcccattgtggtcaacagagaaggaagtggacagcctgcctggcctctcgctgacagaggccatgtcctcctagctggaccctggggaggtgggcctctcactttctgcagcagctggagccatgactgggcttggtggctcaggagcctgggtgtcagaggtcgtgactggacagattcagtcaatggctacaaggttatattaaattctgacctcccctgttcaaagggaacagaatggacggagggcccctctgggctcactgctgcatttaagccaggcatttctgaagcagattccactggggcagttcccagcagcaatggtagccacctggagttggactcaggcagtggacagcatgactcgggagagggcactggggagccccatgaactcgtaatgcgggacttggcggttctgacttctgtcatctcttgccttgctccccagatgacagcagcccagctgacatatttgctgtggggtttgaagagatggtggaattgagcgcagggaatattgtcaatgccaggtaaggggccaggtgtgcggggccaggcagggacttcctgagtcaggtgcctggctgggagcagagcctctgaggctctccgggagccagcctgcttctgagccagctaagctgtggccctggctgtgtggggatctctcacctggctccttctctatgctcacacatgcaccaccccgttctttccctgccacttaggaagtaaaaggaagggctgatgattgctgtgttttctttgcagtgctctggcctcggccacttgttgaggctaatttatgctgccagagggagctggcatgtgtggacctggggtgcaggggaagggcggggctgggactgggagagtagttgactcatgtttcctggggagaggtgagaaagtgtgagtgccgggaagaggtactttcttcctgcacaccagggcaaaggaaaaaatcaaaaccactggatttttatttgatatgaagtcaactgggcgctccccccaccccctgctgaactggcctggctttattttaaggaactttctgaacaaataaataagactgactctgtggggctgctatgagaaggtcctgggttgggtttcaggggtcaagggagggctgctgtgatgtgtgaggcatagccaaaaacacgcagatcctccagtagaagaaggaaagcatgac

SEQ ID NO: 47858 - DNA, 1647 bp, Homo sapiens
caggataattgcttgaacccaggagacggaggttgcagtgagcccagatcgcgccactgcactccagcctggcagacagaccgagactccatctcaaaaaaaaaaaaaaaaaaggcagcatgagcttaatgcgggaagtacaatttaacctaaggaacagaaaacaagaatctcatatctcaactagtaaaaataatgacagtgttcctttagacttacagaacagacttggggaaagggagtaactttagaaccttctggggtctttcactttaaaatgaccgttgccgagtttagagctctctcagcattcaatctattccatctctggggttagagagggagcaggaagcggtggtctgcaaggctcagaagtgactggtgaggccctttcctcctcctcctcatctctccgtgactaccgagcccgggaagacggaccggcaggtgcactccccaaggcctcgacagcagccagagaaaggcagcgacagggaaagacgagtcaggctcgcgaccaccagagagagaggccctcacgcccagccgagcgtcagctggtcggtccggtccgcgcgccagacggcggtgctcggccgtgcccggtccctgccctccccattctccgctccccaccgcgcccagctgcgccgacgcccccgtccgcccccacaccacccctgccttcacgtcctacctgccggcaggcggactcagcccgtgcccaactgctcgtcggaccccgttgtctggggagccctactctttccgcggctcccggccgggaccctccacccggcggctggcggctcgtgaccccgccccctcggcccgctctgggcccgcctcccgccggctggctccacccacaatagcgtccctagcgcgatggcgtatcggcgcaggcgcactctgccggcaacgccgaggcgcttctgcatctgtgggccgaggtgtgtggcgagcgtccgagcggctggggaaagtggggtgtgggaacactgaggggtcccaaagaaaggggagaggaagagaaaagccccagaagcctgtccaccgggtgctgggggcacagggcggtgtcccccactctctccgggcccttcctggcggggccgcacggcagtccccccctcgtttaatcgtgggtttcctgtggggctagggctcgccctgcgcccaggtgtaagtggaagttaattaaatgggcgtacgctgagtggtttgtttccagcctaggtccgcacgggacgtgatttatttagtgaaggggcacaagatctggagatctggcttgtacttttttcctttggccaggaactacggcttaatctcttcctttggtctcctcatatgtaaaatgaggtggctgaggccgggcgcggtggctcacgcctgcaatcccagcacattgggaggccgaggcgggcaaatcacttgaggccaggagttcgagaccagcctggccaacatggtgaaaccccgtctccactaaaaatacaataaattggcctggcgcggtggctcacacctgttgtcccagcactttgggaggccgaggtaggtggatcatttgagatcaggagttcgagaccagcctggccaacatggtgaaaccctgcctctactaaaaatacaaaatttggc

SEQ ID NO: 47859 - DNA, 746 bp, Homo sapiens
gctctcttcagagctgtcaggcagggacgtttaagtctggagaagctgtgtgctgccttttgttcagatatgtcctgccttcagaggtggaatctagagaggcagtaggccttgctgagctgcagtggactctgcccaatttgagcttccctgctgctttgtttacactgtgagcatggaaccgcctactcaagcctcagcaatggcggtcacccctccccccaccaagctccggtgtcccaagtcaatctcagacgctgcgctagcagcaagcaaggctccgtgggcgtgggacccaccgagccaggcacaggaggggatctcctggtccgcttgttgcgaagacagtgggaaaagtgcagcatttgggctggagtgtattgctcctccaggtatagtcactcatagcttcccttggctaggaaagggaaatcccctgaccccttgcacttcctgggtgaggcgacaccctgccctgcttcggctcgccctccatgggctgcacccactgtccaaccagtcccaatgagatgaaccaggtacctcagttggaaatgcagaaatcacctgtcttctgtgtcgatcttgctgggagctgtacaccagagctgttcctatttggccatcttggaagtgactcagttgttcagctttattttccaaggtgggacactccacaaccttggtttgatacttagatttcctaagtaaaaggcatggttacacatgagagcacagaagaatgg

SEQ ID NO: 47860 - DNA, 771 bp, Homo sapiens
acaagaaatagggccaaagttacattagtaaaagcaatataaattccatgatgccccaccttaccgaggggaagcacccacctgccacatacagtgtctttgtgtgacttagaaaaaggtggcagaagccggctttgctactggacagcacgtttaggtgaaggaagaggtgcccctcttccacatggttccagcccccatgcaccctgtcagcaggataccttgggtacagccctaagctgtgacctggaaacccacagaacagaaaagacatgtgaccagagagcagggcggccaacacctgtgcgccaggtcactcagggtccctccagctatgtcagtcaagaaaacagcgtcatctgctggtcttatccagcatggtaacagaatttattcgaatctattgacaatgcccacttcttatttttaaatgttaattttctccttacaaaaagaatatcatcatattacagaaaaataagaaaaacgtcagccacaacctcactaccctaatctaatgcaaattagcattttggtgtatttcctccaaatctcctcaggtgagcgctgctgctctgtggacatctcctggcccagtgacacattccaggccctgcgtgtagggaagatgagcacattctagaaactcatgtcagaaccggccttcagtccccctgcacagtgatatgagctctccctcctggttcccatcccttccccgtgcagctgtcttcccattgtctctgatcttgagtttggtgatctgttggt

SEQ ID NO: 47861 - DNA, 2319 bp, Homo sapiens
gggaggctgaggcgagtattcatggaatttcagaatttaacaaactcggtccaactttttttttgacaaaattcacagaatcagtaattcttaagtctgaaacggattcgaaaacttttgcagacaggcaaaacagaaaacaacgctgagcccttgcggaagagtcgctgctattcctaactatatggggcctctaatgcttcaaatcaaggaaaaaagaatgcttttttttttaaactacacgtgtgaagagtcacacaatcagctatgctatttctttgcacaagctggaaaaagaagagattatcaagtttcgttgttagcaggacatccatcaaatttaacaggagggggaaggctgtgaattgttcttccctgagttaaaatgacgctatccggtcctttctccatggacaactgaagaagagatcctctgggatgttaccatcgcggccactcgggtgaccgttttcccggggagctgcgcgggtcggtggtgacagcgcttctgtgctcccggcggctttccctgtaagacataatgggactgggacgtccacttccggctcaaacgaagttcagacggcgcgcaagccgcgcggtgcccgggtgctgaggccgtcccgagccaggagactggaggcctaggcccggcactgtgggcatcttgggcaccgtggcgcggtgcgggccgggggcgggggtctcccggggtggcgacgccgggggtgcgagcaggtggcccgggcaggcggcggctccggtggcgggcggcgcggcggcccgcggggtggcgttggggacgcgagccctgggccggggagggagggcggccggggggcgccaacggccggcggtgggggccggggcggtagcgccggccggggaggcgccgctcgccgcgccgggtcacgtggcgcggtcacgtggcgcgcagccgggccggcggcggcggcggtgaagggaggcggagactcggccgagacgcggggggaggcggcggcggcggcgatgcggggctgctggaggcggagaggcacggaggagccgctggggctgccgccacggccgcccggaggtgagcgggcgcggggccactgtcgccgccgcgcagtcccgcgggagggggcgccggcccgagcgtcgtccctgccccgccgggcgtgtgtgcccctgcggtgggccccggggtctgcgcggcgggcttggtgggcgcggcgggcgggggtcggggcggtggctgcgggagtcttgggagggggcggcgcaagggggcgtctgacccgggcccggcggccgtggccgctgcttggctgtgggagccttttgtctccgcgtgtgagaaaatggggcgaaagctgagcgcggggcgggcgtgcgtgtggggtggtgcgtgtggtgtgtgtgtgagatcgggaggcgtttggcttggagccatttttttttcttaattgtggagacagaaaatccctgaaaacggtttccccagggagactgggctgcgctcctcctcttcctccccggcgtcgggcccgagcggcttccccggccgcgccgccacctcccctgccggaccagtctccccagcccgcctgccccaccttccgcgaagcccccgggcgagccgggtgactgcagagcgggccgggtcacctgtcgtggcagctgcatggaaatcccggcgcttctgctgtctggagtctgtgctgtttcctctggcaaatcacggagattctgttccgagcaccaacccttcctctttgccatgcgctccacaacgcagagcaggacgccgattccgaagtttgacccgcttggggcaattagctgggaggtgtctacttcttcctgtggcgacaccgcttcagggatgggaaggtgagggtggtctggctttgtggaaggaaacgagggtgacacagccctctccgaggttgaggtccgttagggtcctaattccttctacctgctgaactgcccttgtcatcagaaagtctcttaagactttcctgtcggggataatcagctcccctcgccaggaactgtctcctggatctctttggggtctcccccacgcccttttgttttacagtagttcagcaccttaaggatatcctttaagtcattgcaataggcaggtttatgaaaaagcacagaggaagttatttctaaggttttgaaggacgtaaaaacccgttgcaggtgtgggtgtgggtcccttcctttgtgcctcttcctccgtgtctgggttctccatttcttagttgaagttcttgcagacaaacccgctgggaatggtgcggtggtcctggaaagttc

SEQ ID NO: 47862 - DNA, 1606 bp, Homo sapiens
cagtccttacaataccacttagtacctggaaattcagttactgttctgactcatgaggttagaaacagtgtttgttgatttttgttcctcagtttagatttgaaaacacatgcattaatttttagcaggtatttactgcatctctgttgtgtgccaggtgctgcgtgtatttgccactgtcggggggcaagagaagtcccagcttatacctcatggaatctacagtctagcatgagggtgaaacgtggacttcgccttcctctatttgcatttccattaggaagagaaagcaagctttcaattgttcaaagaatgaagaatgaggcttcctagagattgtgtggtgaagatgatctttgagcagggccttgagaaatacttaggatttagcacgtttagcgcgtgcttttctcagtggtgcaagaagattaagccacattctggctttagagaggcatttctgagagagatgaaggacacttcgttccccagccccaacctaagcatgtgactgtactcaccttgtcagatgctgttggaacctggctgacaaggacaaggacctatgcattttttcctgccctggaacaaaattgcccttgttggacaggcagtgatgttctgtgcgccttttgactatactgtgaaatgtttgtggtttgtaatggggattttatccatctgagcatgctacactttttattagtttccatggcagatggttaaactagggtgctgccttaataatttgacttatgcaggtgctcagatatgactgtttctgtgcttaatgtattcagcatgtggttgtagtcgtttgaaaagttacataatcatgtgttcatgacctgagttagagataatttattagtgactcagcattaatgactcattttatgcaactcttctggtaaagcaacgtttctgttcatgtgagcatattgtagcatgctaggtgaccacatctaccttgtttccttcctaggtagtacctttaggtattccattacaggagggctgccccactcccggaggtgcattgaatacagagagggcatagttggtggagaaaagccctccttgggatcatctgtagctggtaatagggactgagaagctcagggctacatcatggttgaatgtttgtggattcagtgatctgcatggcaggtttcaaaaccatataatgttaagagatatgaattgcaaaaccacaacccctcagacttttctatacagtaagtcctcaatattgttaagttcttggaaactgcagctttaggtgaaacaacacttagtatgtagtatatacgtaggatcttttttcttgtttatatcagttagcttaaggtaaaattgttttcatatgcaggtcatttttgcttaaagttcagcttctaagaacctatccttgaagttaagtgaggacttaactgtactttttgcaggtaaatttactgtattgagcgaaatgaatagtggaaacttacctagttttttaccctggaaaggaatttaaaccgataaaatgcacttactagaatttgatggatgttccgcttttatctgccagctttatcacgaaggatttcctcagtgggaacac

SEQ ID NO: 47863 - DNA, 1913 bp, Homo sapiens
attgcaaaggaagcttggaagtcctttatttaactcatgcagaccgactttaaacccacagcacacgggaacacgggacattttgagtaatgctccaaagagaatctcagaaatagccaaaccttggttctcatccattcttgattacagaaatggggaacactgagccaagatgcgaaatcaggaaagtgcttttggtccactggtctagctgcagtctagaagcggcttgcgggagaagctaccagaaagagcccggaaggttcctgtcatcattcggggtggcagaagtttgtcctggcttttaaccttttttggggtcacaagacccttagggaatgaatatacagctatagctcctctccctagaaaaatgcagacacccatagtgttttccagacaactgcagggcattcgtggactcccgaggcccatccttacgccccgacactcgggaagtaggagtgaatgaatgcgctgtttacctgccctagggacaagaggtaaactaagtcattcattcactcattccttctgtcttgagccccagctcagggctagcctgggtgctcccggccgtggggctccgccccggcacggggccacgaaggagggccacccccctcgccgcgcgcccgcggccccgcttccaccgcgccgcgccctcttccgccgtgagagtcgcttccgcgcacgtgatctcggcgtcgcgctctgatgagttttccgcggccggccgctgctcagccgctgtcgctccggctccggctgcggctgccgctgccgaggctgctgcgcggcgcctggcgggctcgggacgcgcgggccggggccgagggctctgggcgccgagatggagccgtgagtccccggccgagcgggcgggctggctggctctccggacactccggccgaaagttggggatccctggctcccggcgccgtgccgcagggtccctggcgcccacgtggaactgggggcagggaaaagggcgctgaagggggcttcgcgggcgggtcaggcggaggtgtttgcgcggggcgagagtagaccggggccggggctccctcctgcctgcccgcccggccgcggttagagaccgggatgcggtcggggttccgggacggggctgcgagccacagcgctcaccggggggccgagagaaccgggggcgctgcggcccttccccggcgtagggtggccgcccgcacggagtcccgccgcctcccgggcagcctctcctgccggaaaggccccgccccgtcgtcccctcggtatcgagagcgccccgcgctgccctgcggtctcgcccagcgccgggtgcgaggctctcagaggcgattggtgacgtgggcaccggggagcctgccgcaacagcccctttggactcggggtgtcgagttatatgagttttatgcgttttacgatctgctgactttgggcttttttttttttctttacctctttgaagtccagggtttttaatgaggaaaaacctgtttggggtctcgtggacgccatccctaaagcttgcttttgacccagcagtcgcctaggtgtccccctgggcgcatctggaaaagaaggagacggagttaaccagagggttagcgccgcgtggagttgcagaaagtccgggagaaggagtggcccatatgtgcagccgcgcctggcgcaggaggcttccagggccggctccctgcactgaaggcagcctccgaggggcctgggcgcgcttcttggcttatatgcggtttttgaggcagaagggttttgctttggatctttgctgatttctctggctgtggacgtggtcagagaagtgacacccaggcctgttgcctcagcgcaagtgcctgtgacagagagatctgtttttccttctgcttccttagaagtttctgactttggt

SEQ ID NO: 47864 - DNA, 420 bp, Homo sapiens
gttcttgagaggtagagtaactgccccaggttaccctgcagtggataggtccaggcagctggcccccagcccaggttcctaaccaccaggctgcactgcctggagcctcctgctagggccagcactgcttgtgctgaaatggggctcactggccagcgtttgacctacttccttgttccctgtggcctgggtaggatatttgctgaactgaccaacatgctcctgcgtgtgagtcactgggcttgcaatctggaaaggatacacatgaactcaccagtccttgggtagcttagaccattgtttattaaattgtgttttgaggtggttaggccttgaatgttcacataatagctttgcgaactctgttgctcaggctggagtgcaatggtgcgatctcagctcactgcaacctttgcctcc

SEQ ID NO: 47865 - DNA, 2086 bp, Homo sapiens
cgttagaaggccggcacaccttgggcatcccggcacggccttgcatgtttctgaatgggttactcttctaaaattattttcaaggtatgaaggcatttaccttggagtgtcaagtggctcgtggttttctgttttcacagtattcaggcttagatgtggtagtagtcctttctgctggctacctgtagggcgtgctggccacgggaagaactgtgctttctggactgatgggccctgggaactgggggtcagggagaggaggacggggtgagcagtagcagttggtgatagaaaattgaaagagcgaagctatgatttaattcctgctggaatggtgtgtcagtgtggaagaggaaaataaagagctgtcagaagttagacggtctcaaaggtctctttgctcacaggagtgactatgaggaaatgccgctgcagaacggccaggccatccgggccaagtacaaggaggagtcagatagtgactgagccccggccagcccagcgaggcgacaagatgcctggatgctttccccggtgaccgtctgctgaccttcccctgttatattcagatttttcttacaagcagagatttcctgttcatttgtttacatatttttttaaaggaaaaccaaaactgagggtaaatttaaatgtttagccaaatttattgtcatggtggctacgagaagaggcattgataacaagtttcaacagccaaatccttttttacagagatttcagatgagcgtgttttcagtgatgaggaaatttcacgtttttagtacagtgaattatgtacttttttttcctgtaatcattcactgattccaagttcacgggcagcctgtgactaggtcctcagcgtgacagcatcaccctctttcttcccttttccatggtactgttttgtgaccctttaaactcaaagggaagccttatctgtggctgcttcagggcagtccttcctcgttgagtggccagtgccctgggtaaccaggtggctgaagtgattggtcagttatgtggactgcgttttgtgcagtgtgtgagttatgactcatcgggaatgggagatgctggggttccaacccttcacgtcaccaaaggggaagtaatagtgtggagttctgaggagggtttgataagttgaataaggaaaggctaagataatttacaggttaccaactcatgtggggaaggtcttactgccatggtgcttttcaggggcctgtgtgtacacacatgattaaatggatttgcctgtgggaggtatgggcaggagaggaacccttaccattccagtaaatagcagtttctgcaattctgttgaatatgaaatgccatagagctttatttatttatgtaagtaaaagctaaatgaggggccaggtgcagtggctcacatctgtaatctcaacactttgggaggccaaggtgggaggatcacttgagcccaggagtttgagaccagcctgggcaacacagggagaccccgtctctataaaacatttagaaagttggctgggcatgctggggcatgcccatagtcccagctactcaggaggctgaggtgggaggattgcttgagccctggaggtcaaggctgcagtgagccatgattgcaccactgcactccagcctgggtgtcagagcgagaacccgtgtcataaataaataaagctacatgaaagattgatagaatattttagattatttattggccaaaagtttttaaaactcatatttggaagcaaaatgaaaagcaagtaaaatgttttaaatggttcatggaaaacgtatttgggtagaaggcaactcgtgcttccggaaggggttccctgtcctccatgtgtccacatggcggtcaggtagggacgacctgttctgtaaagtccttggcactgctgaatctgtggcatcatagaaggccctggagcttccccgttcctttcagtcagggactccatatagagtctcatgtggacgtctcccgtgctttcctcttgacctctacagtcacacttctgttaacatctggtaactgtgggcaacctgactgatgccgtcttggcaattgaggtccaga

SEQ ID NO: 47866 - DNA, 1683 bp, Homo sapiens
tacaggcatgcgccaccacgcccggctaattttgtatttttaaaagagacggggtttctccatgttggtcaggctgctctcgaactcctgacctcaggtgatccgcccgcctaggcctcccaaagtgctgggattacaggcgtgagccactgcgcccagccactaaatttcataaatggtaagatatccaaccttaccaaatgtatctatagtttatatttttgacaggctgcataataaatccatagggctctatctgaatttcaacaaggattattcagtaagaagaaaatgagtgttgtatctcagctgcgcccatcagctctattccccgaatgaccgtgagcttgaaggaaagccatttaacgcacacggtgccgatgggtgtcttctgcttggcgacatcgtgggctttatcctacttcctcaaggaggcataaaagatgattttttccccacaacaatgagctttcttacagacatattaaacggaaatgaaatgtgctactcattcccagcgttgcagaaccaggtgaggcccgagacaaaggcgcgggatggccgggacgccagcccggggcggaggggctggcggcgggagcgtcacccgcacctccgcggggagacgtccaagcctcggcgctcccagcccggccgccgcgccccgctccaggctggggctggggctggggtcagccccgcagagcaaggggcggtgatgtcatcctctcggcgagcttggctgcgggccggaggcgaggccctgcgggaaggtttctcggcaccgctcaccggggcgctctctccgagtcacgcccggtgcctccccgcgcgggaagaagctcaatccccttcccgccccccgcgccggggaaacggcggcaatgtccgggcagaatggggccgggcggagcgccggcgaccgggaagctcaggccgtgggctgccgagactggcctagctgaaggaggtgggcagccaggcctttccgggcaggaccgcgtgtccttccgcggccagggctctaggcctccacccttccgtcgccgacccggcggttacctcctccgcagcctggtagtcttccatctttcctccggcgcgtcccctccggctccctgagtggcgcggactgcgcaggcgcactcaggccccgccccggacctgccacgcccctctcctctcgcgcctgcctcgcccatgcccagctcccgggccccgcccttcgctgcccggaccctcagtgaccccatccctgggcggggcccgtgggtggaccctgaattcgcctctcctcctgtcctctgggaggtggtagtttccatgggaatccgtgagggtagccgggcagctccctaaaccttagcaacagaaacaaaacacacgtacaaaaggcagtcctggaggggaagcgtggtcccggcccctcctccggtttgtactgtgtggattgacgcggacgttcaaacccgctcggacacctggcaacaaactcgaaagtgactgctgaaggcagtgcgcccggtgagacgttgttgcagttcccttggggactgggattggcatgctttagctatctgaacgaaacttccctttggggagttaagttttccaggtaaatgagaatttttcctttaagcaccattaaaaaaaaacattttgggtggaaaattttgtaaaatg

SEQ ID NO: 47867 - DNA, 736 bp, Homo sapiens
aaaggaagccattcatttgggttgatattcagcttttataaagggtggatttgcccaggtgtagatttggttggtactaaattatcccatggtttatattcctggctcttcttaaaaaaaaaaaaaaaaacgctgcttctgccaagtttattggaaacctggaggaaaaaactaatactaagggtcatgtcaggcaatggaatgaagcagggttgctgtttcctctaagccagtgtttctcaacagcttcttaccgccaccctctcccctaccccacatagcctttttagagactttttcaaagttgctaccataaccttttgatatcacagatatcatatatctatgtactgaggccttttggagagccacagacggttgaaataggtaagatttgctaccaatctttgtccccttaggggtgccgtcatcccatgtggaatgtgtgaccttggcaaagcaactgcagcacaggacttttctctgtttttattgcttttatgtctctctctctctctcttttttttttttttttagatggagtctcgttctgtcatccaggctggagtgcagtagcatgatctcagctcactgtaaactcctcctcctgggttcaagggattctcctgcctcagcctcctgaatagctgggattacaggcacacgccccatgtctgactaatttttgtatttttagtagagatggagtttcaccttgttgactggtcttgaactc

SEQ ID NO: 47868 - DNA, 1293 bp, Homo sapiens
cctgctgagagcaacagcccacaactggggcagtgaggcagggggcagagtgggacctgcgggtccccctgcatgctttcatatgtcctgtgaactaagagtgggttttatattattatcattattattattattattattattattattattttgagatggagtctcattctatctcccaggctggagtgcagtggtgtaatctgggctcactgcaacctttgcctcttgagttcagcctcccgagtagctgcgattacaagcgtgtgacctcatgcccggctaggctaatctttgtatttttagtagagacgaggtttcatcatgttggccaggctagtctcgaacttctggcctcaagtgatccgcctgcctcagcctcccaaagtgctgggattacagatgtgagccaccacacctggccgggttttacatttttaaatggttaaaaaaaaaaacaaaagaataatctttgtgacacattcaaatttcagtgcccatgaagtttcgtgggaacgggcacgcctgccctttattactgtctgtggctgctgtcatagggcggaattgagcagctgtgacgggcccctccctggggccagcacagtgcaacgttccctctccagccttgacccaggccccgcctgtgccccgcgtcgctgcagccggcagggggcagcagaaagccacgcgcacgcccggtccgtgcaggagccgcagcggggacgcgggggatttgcgacccgggccgaagcggaggtttcctagctggggtctgagatgtggacctgaggcagaactgcccgtgggggatagcaggaggagacgaggtgggggtgacagtaatcgtgcaggcagggccggcctcaccgggtaggcagggcaataagggacaattggtttgctggagtgaaagggcaaggcctgcaggcggaggggtgaccccgcagggtggggcaccccggaagccacgtgggcctggacttcagaccacgccatagggagtcactgaagggttccaggtggtagtgtgatagcctcagattctctaagagggatgtggctttttggtgactgtgcctcaggatactgttgccacaaccagggacagagtgacagtgagggctgtaaggccacatagggcaggagggacccagggcagggtgacagtgagggctgtaaggccacatagggcaggagggacccagggcagggtgacagtgagggctgtaaggccacatagggcaggagggacccagggcagggtgacagtgagggctgtaaggccacata

SEQ ID NO: 47869 - DNA, 1349 bp, Homo sapiens
gctgtgtggcctcatcactcaccatcttaaccactttgcaaaaatgttctcagtgtgttcttatcaggatttattatttttaatttagctgtggcttcagttgactctgagttttctgcccttgtgaaataaaagggcatgaaacttagcttgcagttacaggagatacatttgtgaccttcagagaaagtcactggcagaaggctccctgcctgccttgagtttttcctttgccgttacccagattgactttctttcaaacccagactgtgccaatggctttaataaaagtcaggctgagttttgggttgcgcttctgggccagaatcttttggttgactccatttgctgcattcaacttgtaacctgctcaaaggctctgttctggctccagagagagcagaaccaggagccctgccagggcgatggtggtggagccatgagtcgcctgggaaggaacgcatttgatggatggacgtgctctgctctcctttcattatgagggtgtatcctccccgtccctgctcagcagacacagcggttgaactactcagagacatgagcatacattatggcccagagatttaggagccctggtccactttcaggtctgcttctgatgtgtgatgcaatttggggcatgactcaacctgccttgaccttcgtttatctacttataaaatgatgagtaatgacaatgcttcctggatgctttataattctgggtgccaacctggacaagcgcagctgtgccctttctttctacctgcacaccaacagctgcacacccaaggagcaaagtgcatggcagggcagccctaaccccaggacactcacgcctgcatgctggagattaggtctgccctgttgtgttcccaggtccactgtgcccagcactgcccagcaatcctgatgtctttgcctgattaacacagtttttttgctctccacaacaaacatttcacacctcctccagtcttttcaaacctgctcttcctcctcactctcaaatctccctttttactctaccaagaaagaaaagaatcagtttgaaatttcccaatcctcctgatagcaaaattaaccaaccgcatttgcacccaagtgactcttctttccccacccgcaatagaagaagctgatgcctgcagcaatacttgggatcctgccctcccctgccttctctgttccttattctattacttgtccttcctctctcttacgcattcagcctctacttacctggaccctgaaacacattcaagtctcctgtaataaaacaccttcactaaaccttccattcccctccagctaccacttttctctccccacctcagctaatcttttta

SEQ ID NO: 47870 - DNA, 733 bp, Homo sapiens
catctctctcccccagccctattcacggctgctcacaaaaacatgacaataccaggcatggttcatgaagtctggtgtgggaagaggcctggctcacacccctttgaagtcatttaagacatatggccagctgtaccttatatgcagccattcacaggccctcgaggcgctcaaacttgaacatgtgaaaaaaaatcacccaggggcttgttaaaacagtttcctggaccccaggctaagggtctgactcaggttgggaggggcctacatttccatgtttaccggctcacagctgatgccaaggtcacgctatgaccaacagtgcccgggcggcagggggcagaacctgccatcaggaaaacgcaaaaggacatgacctgtttggccaagattaatgtatttacctctgctgatttataatcctttatataaaaacatccttactaagtctccatttgttgtactagcagacaggttttctctaatgaaacctcagatcacaacagatggactcacatattttaatagtctctctggatcctaatccccttatctcactgtctccataaacaatatgccaactgaataaattatagcactagctatgacagacattggtcgttttccacaaatgctggctaacagccaagctctgtaaaacattaccattgacttagcaaacctcaaccagcttagtgcagaaatgcagatactctaattcggtcaaggcagg

SEQ ID NO: 47871 - DNA, 2198 bp, Homo sapiens
gtcttctgcgtgtgagaagaaccctgttccccaggaactgccccaacacctcgagcaggtgcctcccctctccaatgaagcctctcccgtccgcccggcccagaaactgggcaacttactggtttcggcattttcggtttctggtgagtatcctcgatccccgaaaacacgactatccagcagcagcgaagacgctgtcccaacctggagtcagagcagaacccttagagcgcccgcccgccctgcctcgtcctcctgccgcgcccgacactcggcgcccgcagcgcgctgccgcttaagaaccggccagcccgggcccgggtgagtcagcgccccgcccagcactgcgggcatggggagggggcacgggcggggcggggccgggccgggcccccggcgaggaggcgcccgagagcgggggcgcgcgcccaaggggcagccggcgggcactggaggtgccccccagttgggggtgggtccgaggagagggggtgcgcacccaggggacccccagcatgaaggggctggtggggggcgcaggcccgggagagagagggcagggggaacactcagtggggaggatcggggggagggggcgcgggccccggggaacactcggccaggagggtcaggggagagagcgccggccgggcggggaggggtctgggggacactcgaggtgcacccagcggagagaggcggagaagagggggcgcgggcccagggatacccggcggggaaaggcccggggagagggagcgcgcgcctgggagagagagggcgaggggcaggaggaacacctaggaggaaggagtcccgggacagccagcgcgagcccgcggggcacccgacagggaggggtcaggggagagggggcacagggcgggcgggggggcactcgctggggagggatccgtggagagggggcgcgggctcggggtccgccgaggaacttcccggggctgccaggaagcccgtgagaagccgagcactcggcaagtttcactttgtgtagcaaccgttgccccgcggctgcagtcacaaccgtcaagcctttgagaaactctttcaaaaactgcaaccgctcgggagccgccgagggacggcgcccaggcacccaggctccgcgtttccttcgggagagacctgaggggacccggcgccgaggggaaggtcgcggggccgcgggccggctcagctccacctgccccgggggtgccgggcgagaaccccgcgccgcgccccctaggctgcccgccgcacctgccgccgaaccccgccgcccgcccgggccctccaccaggaaccccccgcccagaacccccgtcccgaccccggccgccgcacgcctcacccggcgcctgcagtgctccgtgtgctccccgccgcccttgcgtccgccgagtgcgctcgctgcccgcgctcccaaaagccccggcggggcgggtcccgggaccacgccccttcccgcccagctcccgacctgtgaggtgcgccccccgcaagatggcggcagccgggcctcgggctgggtgggggcggaacttggcggaagtgcgcgctactcccctcgcagatgcaagtggggaggctgtttgtcccacagcgggcagggggaagtcaggaaaacgtaaataaatctggaggggcggacggcttgggggaatcgctggaccgcttggggccgggaccgggggccagttccgaggcctcggccctggggcggctgcacctggccccgagtctcggtgcacgtggccggcccagccgccgcctttccgaagctctggttaagtggcacgtttgtggcctcttttgacgtgactggcaaaaagctccatgggatttctctgaaattctaggaattaagtttttttgtttgtttttttgctaatggttctcaacaaatttttaagacacacaaaacacatactttgggggccagtagaatttgctgcgggagagctcactctagaaggggttctcaacgtctggcttccagacgagcagcaacagcattcactgggaacttgcataagtggaaattaggtgttgctcagccttaggattcagaaactctagggctgagcccagcaatcagtgtgttacaagcccttcgggtgattgtgatgttggctaaaggttgagaccagagcttctcctgaattcctctcctgggtttactcctccctttctgc

SEQ ID NO: 47872 - DNA, 415 bp, Homo sapiens
ttaaattacctgcactgataatgtttccaactggacatcaatacctccactgccttatcactgcctggagcctggttagccagtttgggttcccaactctcataataggatatgcctctaatctaatttttatctcgctccatttgaagtatactgtcttctaaattgaatgtttgaaatagcggtgccccaagaccttgaagagcatttctgaactttaccctttaggggaatgccaaaaaatgaagtggcctgtggcagtgtggtaaaaatgaaacggccaggtgcgatgattcaagcctgtaatcccagcactttgggaggctgaggcgagcagatcacctgaggtcaggagttcgagaccagcctggccaacgtggggaaaccccatctctactaaaaatacaaaaaatta

SEQ ID NO: 47873 - DNA, 866 bp, Homo sapiens
tcttactgaatatcaaaaggactcgttccagaaggaagtcatcttgtaatgtcctgggcagtgcttcaccctaggctgaaacatgggccacatacttcattcaccaatcagtgagctataagggagagcaagacagataaatcttgaagtttacgcttaactaaaacttggcctttggctgtttgggttttcccagacttcccatgaatttccatgaaatcagcattgtcactttgtcaatctgccgttcccagccacctactcagactgggtcctcaggtcaccctgagaatgtgactggggaatacagagactgggacgtggagtccaagggcaactgactgtaaggtctgggtctggtcctagttctgccattgaccctgagtgttggcacagcggccatctgagggacgtgctagctgggaggtaggctggccagctctcagcttctgcgcatggctgttgctatgctagaacatgagccctgtcctgctacctgtctcattttcaagaaaaccctgaaatcctgatttttatgtgacatttcccaattcttttttctctttgagatagtgtgtcactctgttactcaggctggaatgcagtggtgcattcttggctcactgcaaccttgaacgtccaagctgaagtgatcctcccacctgaacctcctaagtagctggaactagaggtgtatgccaccatgcccagctaatttttaaattttttgtggagatgaggcctcacaatattgcccaagttagtcttgaactcctgaactcaagcaatcctcctgccttggcctccaaagtgctggaattacaggcatgagccgccaccgtgcccaattcccagttcttaaatat

SEQ ID NO: 47874 - DNA, 884 bp, Homo sapiens
agatgacctgaaactggatgatttattcaaaagtggaatttatttctgacagctctgaaggctgagaagctcaaagttgaggggctgcatctggtgagggccttcttcctggtgggaactgtgcagaatcctgaggtgacagggcatcacatgatgtgctggctcagttctctttcccctgcttagaaagccaccagtcccacttttgtgacatcccattaatcaatcaacccatgaatccttgcgcgggttaatctattaatgagggcagagccctcatgacccaatcaccccttagagagcccccaccttttaatactgccacattgaggattgagttttagaggggaatgctaccattccacccctgatcccccaaaactcatttccttctcacattcattctactcccatagttccaaagtctgaactaattccagcacaaaattccagttcaaagtccagagcctcacttgtgagcctgtgaaaccaaaacaagctctcttcttccaagatacagtggtggtacaggcattagacagacattcctatttcaaaagagagaaataggcaaaaagagaggagtaataggccccaagcaagcccaagacccagtaaagaagacgtcaaatcttaaagctggagaatagtctcttttgactccatgtgccacctgctgtacacactggggcagaggttggggccctaaggcttcaggcagctgcccccaccccctggctttgctgggtgcagtccctgtggcaaagcgcctgaagctttgccatgcaggtgctgcatgctgctggggactccactgccctggggtcctggtggtggtcccgctcccatggctccactagcagccctggtggggactccctgta

SEQ ID NO: 47875 - DNA, 890 bp, Homo sapiens
tctaacaagtttcatttcttgtattaattgatctctgggcagtgttaagcccagctggccactccttcactgaagcattctctttcctaggcctctgtgttaccactataatcttctgattgtttttctactacttctctaacacctttttcttagcctttgtttgcagttcctcccatactggaggatttcctccgggctcagccttctcttatccttagttgacctcatccatcttcaagacctcaattataatccatatacccaaaactctcaatttttatttttagctgagaactcttctctcaactctaggcatatccagttacccaatgacatctcactatgttacctggaaggcaacctcagaattgaactaattatcactctcccattccaactcattacttcttcagtgtttcctatttcattaaatggtactactaactacatagttggcttaaaataacgcatttattctcagaattctgcaatttagatgtccaaaatgggtgtcaacaggactgcactcctcctggaggtcctggggagaatgtttctttgccttttccagcctctagagactgccctcattccgtggcttgtggtcgccttccagtcagcatttgtgtgattctgacctttgcttctaatgacacatctccttctatgactcagactcctgtgccttcttctttcactttattttatttttattttttttgagacagagtctcactctgtcacccaggctggactgcagaggtgcaatcttggctcactgcaagctccgcctcctgggttcatgccattctcctgcctcagcctcccgagtagctgggactacaggcgcccgccaccacgcccggctcatttttttttgtattttt

SEQ ID NO: 47876 - DNA, 2045 bp, Homo sapiens
cctgctcaaagcctgccgaagagatttactcggctcccattttggatatgctactgttggatatctttgcaccgcggtctcctcatctgcataatggagttataaaatcaacttcacagcactgtggattaactaagaaaacgtatttgaatgccccccgtaaggtgctcagcacgtagttggccctcaatacacactggtacaattcaaactttgtgaaatgagccaattcgtgtacatgttaaggaccacggcagcaactcatatcactaaaagttaactgatgcccaacccatgccccttcctgcttcactcctccacaccacgggagattccttagggcagaacttttatttcggcagagtgcagccaagggaagacagcataagcagcttttttgccagggcgaaggggccagaccccggcctggggatggggtgcaagtatggaccacacaggggctggcttggtcactcacggctgcgtcaggctgtcccggtaacggctgcgctggcagggcagtgctcggggccggctggtgtaggtgtaggtgctcggggcccgagaggtgcgatcagtcagcgctgaggccatgtccgggggctgactgcctcgctttcggtggagcttggctttgaagcaggtgggcgctaaggtgttgtgggacccggagagatgtaagtagtgccaagggcaaggattccgcgacgcgaggagaggcgacaacaagggaggcgggcgggacgggaggttaccagcgcaggaggtgggagctatactgggctcgctcccagcaccacagagaccagctgcgggggccgcatcggttgcccagcaacccagggttctgtctgggggcgggaactccgggcagttccggtccccaggtttcccgggaaggactgcggcacaagggacttccggctcttgactccgcccagccgcgccacccaggtaggtgcgcctgcgctttgcgaggttcctggctagggaggcggccttggctggcttgaccgtcatccttgaggcctgcggggcaacggtggctgtccttggcccggctttggaatgtggctttgcagggctggtgttggcgccattctcgcaggcccacgtgctcctgctcttccagggtgtcctcggctgtttctcctgccgcggcgcagcagcgctcccaggctgcccccgcgataacacgcccctggcagccaggctcccagctctgttacgtgcccgggcggggaagagcttcctggtgtctcccggctcctgcccttctcccgccccaggggcgggctgccgccgccctctgcagctgagtcagtgcagttcctcacctaccttctctgctcaccgctgtgtgctagcaatcggaggacccttggcacacggagcgacaggggcctcccccacagacacctcattttgggaaagaagtgagcaatttattgagtcttaaaaaatacaaaggcatagttccccttaatctatcaggcttccagctctaaagaatgtctctagtattgcggggtggggctgcgcttaaaaacgcagacgctttggttttagtaccagcaacgttaaaaatcttctatcttgtatgagtgaatgtgtatcccttgtgatcagttatttgcatttgcagttacaccttcattcagctaattgctgtcttgatttgaatccaggttctagaatgtactagctccgaaacctcaggcaagttaaatgtttttgtgcttcattttcctaatccacaaagtggcaatagaagaatttatctctttaggttttgtcttgaggattaaaaccgttaatacttagagctgtgcctggtaaatggcaagcctttatattaagatctggaccgttctgtgctttgaagtgtatgacctaaagcagatgtaggcattctataagtaacactagcataaaggtgtatggtaaattctagaggtgaaaacactcccaacatattttaggtctgatcatttaattttgaggtaatttctgaaagggctagaggagaaagtgacatttaagtt

SEQ ID NO: 47877 - DNA, 1192 bp, Homo sapiens
gcccaggattcccactacctggaatccatcccacctcctaccacacagcttatctgcttcttatccttcagatgtcaactccttttctgtgaccccagagaagctctttgtgtcctccatggtgggccagctcccgctacacaccctctcacagcatcgtggactggtcctgcagagcactcaactcagctgtgtcattctgtttcccagtgcaccctgcggcttcatgagcttctggtcactactttatctccagcacttagtataatgtctggcaaatagtagttgcacaacaaatatttgtttaatgaatcaatacttgtgaacttagacaagatatttaacctattgctaatactcagtttcctcatgtgtcaaaatgaggaaggcaatacctacatactaggatcatgaggattaatcaaagtcaaattcaattgagagtacctagctggcataatgtttggctcaaaggaagtgcttgacaaatgttttctccttctgtgtacacataaaagacctaggatatgggatgcgctgagctgtgggatgaactttactttgcctcctgggacagttgtaaaggctgggcaggtgtcagggccaagggttcacccgctgaggtctgttattagcaaataagagagagcaggttggacaatagaaagaagagctgcctcactgctgtgattagacagtgagggcaagggcagcacagatactcagcaatgagaaatcgcaggacagccttcaccaagtgggcatgggacccctgggcgtgtggggtctctcagccccgcacacatgcacagcatccaccaacaacattcttcgtttcctgtgcagggcaatggtgtactatcttacccggaagttcttaaatacatgtgtggagggcactgcttttttcttctacttttgtttttctctgtgtgatcaagatgagacgtgattagttctgaggcgatggggaaggctggggaatgagcaagagaagtagggggccagcaggcatcaggaagtgtcttagttttgtcatccccatctggattcagcagaaggtaccagtgttacatcccatcctgtcccacagtgccgcgtgccctccttcctgtagttcccacatggagctgcatctgcagctttgcctcacacctgtcctcagtgggttacatcttgtgtgtgacttggt

SEQ ID NO: 47878 - DNA, 589 bp, Homo sapiens
cttagcaagtctctagtgtgtagtaagtgctcaataaatccttattattatcatcataaacctccacataatacccacatttcaacttgccctttcatctcagtaaattgctccatttccatgaatgcttcctcaatgcaaagatgtttcctttccctgagatctaagtcagagatatgactggatgagaatgtgaccagcagcttctctttggctaccaacagggtaacttctgtttggaaacttttattcattacaacaagccacctggttcaaaatcaatagtgtgagaaaacactctgtagggaagaaggatttcatgggaaagagttcatgccacgtcataggctttgactgtttctcctccaaatatccaaaggccaatgtcctaccctagggaaaacaaatgggaggctcttggcacccagtctggctttgcagtattgaaaaaaggcatataacttttcaaatttccccgtaagagggaataagaagtgtggagcagataccttcatagaaaaggtctgaaagagcttcagaatccctagctgactggtaaaaatgtctctcccaaagctattcagtaaat

SEQ ID NO: 47879 - DNA, 1621 bp, Homo sapiens
cattaattaacagagacttactgtggtcatgtggaaatggactccattttcttttccaaagaatttacccaccacagtttcatctggaaactggccagctggatgagtctcatgtggttagtgcttaatcagcaggaattaaccagggaccttcactagagtggacctaccccagtttggagaccactggaacacaatacaatcttcagcaagtttcttcatctttctgactctgtgtttctccttctgtataattcaaacaaccatctctgcctcacagggccatttacatgatgaaataagatgacacaggaataagacacctcctagctcggtgcctggccaacagcaggcacttgctaactatgcttttcatctattttctttcctaacagatgtggcctctgcccggaagtgaaccttgaggtggctgacccttcttcatcaagcagggagctgtggttcagggcaggagcccagggagcaggggcgatgcagggtgtcactgagctcagacctcctgagtttgtgaagtccaggaagccccaagttggcagcggccacatgggcaattgtctgagcaaggggaagaggtttctgggccactgtcagtacaaacaggggcttcctcaaaggcatcagctgcaggccgaggaacgggagagcgggatgaggcagtgagggtctttggaggagttctgaaagcttgtctggggtcccgcttcatctttattattgttacaaattagttccatgaatcagtcaggtcattgaggttactctgaaaggaagcatttgagaagtgggaggatttcttctttcattgttgggtgactaatacaacaatctttatttatatattagtcatgggattctgtgagtattttaggaaagaatagggacctttcattcaacacccaaagtctctgtttttaaactcttcagaaggccctgggaggaaaacacctacccagctatcttttccacccaagtaagaaaacaaatgatgctgagaacagcttccacataaaatagagatgctgaattcatccttggtttttaaagcatccactgagaaattctcagaaaatggagcaaatggtgtagtgttcatccacagacactggaagaaatagaaaaggaacattctttagtgaaatgaaaccctttgagttctgggtgcttcacagtatttggggactccccttgtggcgcaagctgcagtaggagctacaggaattcaagagacagcaggaaatcgccagtcaggggaaaactgggcagagaggagggcaaagtaccaaatacaccctcaccaggctgggcagactttcaaaagctgagtaatgatgtggcattgttgcctgagtgcccagattttactcaccctcatgtttgggtatacaaaacattatttgcggatctggaaggagagataccctcatgtcatggtgagagttaagtttaatcattcagagatacaataacccagtgattcctaaaaacagagctcacatcaaatgagccccctgctgtagaaatcacgatcttctgactgaaagatttctttcttttcttttttttttttttttttttttttttgaggcagagtctctctctc

SEQ ID NO: 47880 - DNA, 1650 bp, Homo sapiens
gggggagggatagcattaggagatatacctaatgtaaatgacgagttaataggtgcagcacaccaacatggcacatgtatacatgtaacaaacctgcatgttgtacacatgtaccctagaacttaaagtataatttaaaaataaataagtaaaaaataaaatgccagagttggcaccttaagatcctctttcacagcaaaggagcaggactaaaaccaggcatcttgaccaatatcccacaggtgctctggtaaaatctccaagaccaggacccaggtcttccagtacctaattcaatgttctttccatgcccacacaaaggcaagcagcagaaggaggagcaagcataaggccttcccagtcaccacagccatgctgtcaaacctctctgtggatatgctgtgttaacttctgagccttggggatacccatatttacaatatgataaatacattaagtcacattgtttaatatttggatatgggcccagacgcacaaatgaacaagaacctcatgtcctgggacttcatggagcacaaattatagtgggcagagaggcaaacttggaatcaccgtgacgctgggcatcgagactactgggtgcaacaatgggacacactgaaagatgactagcatgtcataggaacttgaaagcattcgtgctccttccttttcacaaactgagaaatcttaaattttttttaacgtgtcccagaagcatcttgacaacagaagcactctcattactgtaaagcccacaatgaatagcagacagcatgacttcaccctagacaggtcatgccaacttcacatccctttccaaatagtatgccagtactataccaaatagtataccactttaggaagagtggtaccaggtggtaagctcctatattccaatgaccagagtaaaatatcaccagaactttatgtaaaatacatcttgtaaaagtatgattactttatttttcagagttaaggcaataatctgtggttggttaatgttctaagatgttacaagaactttaagagacagggtctcacactgtcacccaggctggagtgcagtagcacaatcatagctcactacagctgcaaactcctgggcctgtgatcctcctgccttagcttcttagtagctgggatgataggtgtgagtaaccacaaccagctattatgagaaatatataaaatactatttgtgatcatgttatttataagaaatatatatattgtctcaatccttgcttggtctcttggctcctaaaccccttgaagtatctttggtttgccaatgaaatgattggtggctgggagcctctaggtagcttcaggacggggggctgcttaccagaaagaccaaggcaagattggagggtttggactcccagcctcaacccccaacctccagaaaggggagagaggctgaaggttgagttaatcgccaattgccaatggtaatgctgacataatgaagcctccgtaaaaccccaaagggtcggggtccagatgagcttctgggtagctgatgacgtggagagagcatgaaagctccataccccttcccacatgccttgccctgtgcatctcttccatctggctgttcatctgtattctttgaaatatcctttacaagccagaggcaatggc

SEQ ID NO: 47881 - DNA, 776 bp, Homo sapiens
gactccatctctaaataaaaaaataaataaatgaaatatcctttacaataaattagtattgtaaccaatatgtagttttaataaagtaataaaattaaaaatgggtaaacataagtagagtgtttctctgtgttctgggagctgctctagcaaataaatcaaaaccaaggaaagggtcacgggaaccccactttatagccagtcagaagtatagggacttgcgattggtatctggagtgggggcagtcttgtgggctgagccctccacctgtgggatctgactccaattccaggtagacagtgtcagaattgaattataggacatccagctggtgtccactggacaacctggtgtaaaagtattgagtggtatgtgacaacagcaaaaacactttggttttgtcgtatatccctaatactatgcttttaggttatcagatgatgttattacagatatgactggagatacaggtcttggtcttaagagtaatatttcaactacccattatttactattcctttcccatggaaactcagtgaaaatgacagaagattataggatttttaaagtttttgacatgcaagcataatgcagacctctttgatggttgacagattcttttattaacagtcaaaaacttcacacaattggaaaataaatgtttcttcaatgaataatcaaacaaaaattatccaggaccttatagggttttcagtatgtaccaggcttgatgcacatcttagaagacaggacattatcttgctgggatcattag

SEQ ID NO: 47882 - DNA, 938 bp, Homo sapiens
cccaaacagtacttcccctggaattaaaacaggaaatacaatttatgtttatacgtggttttagatatgactcaatatacatagattttaactttatggtttggtattacttttttaaaggcgctcaatagaaattcaaatctcactttaagaccatgaatttcaagttgcaatgaagtgtacaataaagttgtgatttctcaacatcaaagtttaattattacaaaatagttcaagcaacagatagaatttcaaaaacagtatttgctttgcttccttgttttgctccaacactaatcatgctgaggtttttgaagcacagctatgactagggcaggcactgctgattcagtcacaaaaacccttcttggatgaacaatacttgttcttttcagaagaaaagcaattttaccttttctatttctattatgaaaaacagagctaaacaatttttgtatttttagtagagacagggtttcaccacgttggccacgctggtcttgaactccttcaagtgttctgcctgccttggcctcccaaagtgctgggattacagatgtgagtcaccccgcccagccctaaacaatcttaaagtctccttttccaccagatgactaaaatctttagtttgtaaattcccttagtctcttaaaatcaatctatccagaagacaagaaagacaaacttagtgaaggaaagaatgcttcctcactctctcaccagaaagccaaagcaaaaatagagccccacagaaatttcaacattgaacattttttaaatcttaaagcttagtaggaatcaaaaagctttatataagtcagcagatctgcaaaccttgttagttcaatacaaaccatgatctagcagacaacttatattcaaaagctcatctttcaaaaggttccaccttgcccgtctatttaaacagtcacgacctt

SEQ ID NO: 47883 - DNA, 2392 bp, Homo sapiens
agctccggtcgcgccactgcactccagcctgggcaacagagcaagactctgtctccaaaaaaaaagaaaaaaaaaaaacgcctatataaagaaaatattccaataggagataaacctatgtacacagagttgctcaccccagcattatctgtagtaacaattagaaacaaatgaaatattcaaaaacagtaaattaggcagatgatgaaacaacatggcaaatgtatgatgctaagccaaatatacaaaaagatccctgtgagacggagcagggacccctctttggggtgtgccagggggattcccacaagcacagaaataaaggagaatcttgagtttccttcaccgaaaactccaggcacccagctcgccccgagaaggaaaccagcaagctgataagcaagaaggtcataacagtttcaaacaatagccagggaagttagagtcacctagagacatccttaacacgtgcccctgagctacttttcagaaacccagacccccaccaaatggattcacacagacgtcagataagggggaacaccagggactaaactctgacctccattctttgctctcagtttcttcctgaggggcctggccagaccttaatgttcctttctgcggaccccaagtttttagacaaagctttgcttccttaaccaatcacaaatcagggagtctttgaatccaccataacctgtaagcccgccccctgcctaccccacttcacctttcaggccaaaccaatatataagcttcatgtagtgatttacaattttggtatacagccataccaccctgaaggcacccgatctcgactgatttacaattttgcctttaacttctgctttcctgaaatttaccactgcctttaaatactctagcttgtaggtcatcatggagattgggtctcaagcatgagctgcccaattctccttgcttggcgccctgcaaataaacatcctcctttctcctactgcaaaaaccacctttttgcagttttgctgttgaagtttgcctttactgtgcaggtgagcaaaccccagttcagttcacctgctacatttaaacagtatacagctctatttgcaaaaactatacaggaacatttgacctaacaaaaaccactgggtgacatctaccagaagtatcactgcagaggattactcgacaaaaagtgcaattttctatagaaagccgagtgtttcccttgggaaagtgttaatattttatttttaagtaactggggcaaaagactagattttctataactgcaatagaataggactagaaaggcatccctacaagtccccaaagtatatggatggaatatttttgatggttttataaatgacaattgtaatttagctctctgaagaaaatgtccaatcagattcaatcacacaaagcatttactattttcaatcacttgcccaataacaaaatgtttagtaagaaattattcagaacattaagttgtttatgaaataagtgactaagcaacatcaagaaatgctacaatagagcagcttactgtattctgcagtactctataccactacaaaaacagtcataaagagcttaacatactcagcataacgatcgtggtttactttttgcaagccatgtatctttcagttacattctcccagttgattacattccaaatagcttttagataatcaggcctgacatttttatactgaaggtagtaagcgtgctcccacacatcaatccccagcagtggaataaggcctgttagaaagaaggggaaaacaaaccaaccatcagtttcagtctaaaacattgcatcttctcaatttcaacttttattattctactcacacaaaattaccctttgtaacaatctcattcacttgtttttttatataagtaggaaatctagataagaatgaatattcctataaaatatttttaattcactgtttacaaagaaaatgtgacaaatactaacaataaaatagacttgggaaaattaacaacagtactttaatagctattcttaaaaataccaacaaattaattcaagagccaattcccagccttcctcatggtggtcttaggagcagcaggaagggtgggttacatctgtgggagcaggcaaaagcccactgagaacctcctccaaagggtctgggcactcacaggggtttacgaggaaccagctctgctccccaaggctaattttaatctttgggaatacagagcagttggaggacacagtgttttcagaaattaagtgaggtaaatgaagaatttagttctatctgtaaaacatccatttaaaaaaacttttggtctgggcgcagtggctcaggcctgtaatcccagcactttgggaggccgaggcaggcagatctcttgaggt

SEQ ID NO: 47884 - DNA, 768 bp, Homo sapiens
gtgagactccatcacgcacacacaaaaacactcaaaataaattatagctctctctacaaaaacaattcttaaccagtatgtcttgatcagttgtgagggaggtcactagtaatttattattaataatttcaagtagcaaaatttattaatgatttttataaacaaaaggccatgacattccctcattttccttctaatgtgctttccacagggagaggaaggagtgtagctgggactcacttacaaatatcagcctttctggtcatgcagctctacaaataacctgactctacagatcggtgcttacaaattttttgtggcttttacaaattgttatgccatgtcactgtcccaaaagagctgttcagattctgccaaaatctgggtctatcctgtgaagtgagccacagatcaagagtattccaatgtcaggggtagaagaaggggcagagaatgactgttgttgatgtgaaggtatcactttaagttcaaagtcccaaccctctgccagacaactcatggctctatttcccatactcttcagtgacattttttaaatccaattaggctcaacagcaaagtatttggtgagcccagcctggcacttccaagccgaatattttcatatactctaccaaagagccccagaaaggcagaaggtctggaaacctgagatctagtcccagtttaacctcaaatgctcagcagaggaggtaacagtacaagctctgaaatcagtctctgcttgtatttcttttcctcactctt

SEQ ID NO: 47885 - DNA, 666 bp, Homo sapiens
aaaaaaaataaataaaaataaaacatgtttgttaatgtacctataaaattacgtgtacttaattttatgaaatatcaggacttctaaaacatttttacttacacaagactctgggtgttatctgttaagatttgcaaattattacatgttcttaaaacactgttagttttccttatttctagttgaatgctttacagtagagcatctctcccaaatgaaatcacaatttttaaatctaacctgttgttccttgcagtggatcctgatttggacaagcagcaatttgtaagtgtccccgttccttattgaaaccaagccaaccccaacctgagccttggacaccaacagatgcagccgtcagcttctccttaaacttgtcaaaggaaccaaagtcacgtttgatggcttccagcaactcccctattaaaaaaaaaatccaaaaccacccacaaatgaacagatttcaataattacagtaaaatgttatattacatgtattaaaatatttttgtcatagggcccaagaaattagacaacatcagaatgcgacacctggatctaagtttcacaattttaattcacgtttttgttttttataacttcaactttttttttttttttttttttttttcattttttaccttttgagacggagtttcactcttg

SEQ ID NO: 47886 - DNA, 844 bp, Homo sapiens
cgtgcccggttcaaattttattttaaattcagagggtacacgcacaggtttgttacacgggtatcatatgatgctgaggtctggggtgcaattgatgccatcacccaggtagcgagcttagtatacaacagttttcaccccccgtccccttctttctccctccctgctctgtcctcagtgtctgttgctgccatttttatatccataagtactccatgtttagcttccacttgcaagtgagacatgtggtatttggttttctgttcctgggttaattcgcttaggataatggcctccagctgcgtagttcacattttttaatgaatcgtgttagagggatttccccactcactgtactatctttgttaggaaagaaatactactttctgttagctttttcttttccctgaatagaaaattttcctttgacttctaccctccttcttctacgcctccatttgggaataaagtcattgttcttctccaaggcagcccagctcttcctgtcttgatgggcagttttctctacgactgaactaagggtatactttaagagctgtaatccttttattctgtagtaatacagaatataattctagattagtcacatcaactaaatcaactgggtcaaaatctcacttctcttattctacgggtttaaaagtaatcatctttataagcacaaatgatggaatgtggtacagattaaacaaaaatggcagcataccaaaaccactggttgcatatgaatatatctgatattctggtaactgacaaaacttcaaaagtattaaccgatagtctagaagactgaactcagaaaaaaaataagttggccaggcac

SEQ ID NO: 47887 - DNA, 1913 bp, Homo sapiens
aactcttgtctcaaaaaaacaacaacaaaaaaaacaaaaaacaagtataaggtaacttcagtaaatcaacaatcgattcctactgtgcacaaaatgtagataagggtgcaccaatatataccaacctttgggttctccaccaccgttagggctgaggtttgtccagaaaatgctatgattgatatgaccaccaccattgaacttcagtgcaggctgaagagctatctgggctgtaacatctcctgaaaagttaaaatgcaaacacatttttttgtaactcctactttttcaaccactgtatacattatatttttttctttgtaagctattagataatgggaccagcttatctataacatccgtttgtcctaaaattcagcacccccccgccccaaaattatttgtcccagacatgctgaacaactgatgaaggacctagcagaggtggaaaagctagaaaattcactcctggctgctaggctcagggatctcttagatagaagagattttaggaaatgaaacaccaaagaggacaatcaaaataatagaatgctaaaatgtatggctcaacatacagactgtacagaaaaccttcaactctcactttcaagacagacgacgattcattgggaaatatctccaagtcacattaacaagaaactcaacatactcaaaattgaactcctgatgttctaccccaaacttactcctcctattgtcctccacgtctcagtaaatgccagctctgtccctcaggacatccttgggaacctgatgtcatttttgactcctctcccttcaccccacatccaatccaccagcatatccattagcaaagccagctctacctttaaaatacatccaatctatataaaagcacacagagaaaaataaaagaaaaaaataaaacacaagcagaacctaatcccttctccctaactctactgccacctcattgggacagaggaccagtatttctcactgcactggtgccactatcccctcagttttggggggtgggggtgggccttgccccctccaaaggctccccttctcactggagcgaaccctaggtgtttacactcagctactcttactaccaagaggcgctgcacttgaccccgtcattgagcacgtgctcacgcagctgcagcctcactggcctttttgcactcacatgaccaacttggatgttcccctcaaggctagctgagcactgctgcctctgctgaacactcttccccaagacagtctcatgctgcgttcctgttcctccttcaagtctccactgaaacatcaaccccatcagtgaagccttctctagccaccatacatgaattagcaactccctgccacccctcccagaccctttactccttctcaataggccctgtaactcctggcatactgcatgggtaccttgccaaataagtaggcaaaataaaatagtcttttctatgccttcaagaagctacagactaaatgaactattaatattagaaaaaaatggaaatcctcttgtttaataaatattttgtgcatattatccacaagataccaagagaagcaaagtaaaggacacagagacccactgagagctttgctctcaaggagcttacattttggaaaaagttctcaactgctgttctgaaagtgtacgttaagaacatatgtctgggccgggtgcggtggctcacgcctgtaatctcagcactttgggaagccgaggcgggcagctctcttcaggtcaggatttcaagaccggcctggccaacatggtgaaaccctgtcttcactaaaaatacagaaattagccaggtatggtggcgcgtgcctataatcccagctactcaggagcatgaggcaggagaatggcttgaacccaggaggcagaggttgcagtgaaccaagaa

SEQ ID NO: 47888 - DNA, 5357 bp, Homo sapiens
gacgacatggaaaaaccctgtctctactaaaaaacccacaaaaagtagccaggcgtggtggcgtacgcctgtaatcccagctactcaggaggctgaggcaggagaattgcttgaacccaggagacggaggttgtagtgagccgagatcacatcactgcactccaacctgcgggacagactgagattccgtcaaaaaaaaaaaaaaaaaaaaaagtatgtctgactaggcacggtggctcacacctgtaatcccagcactctggaaggccgaggtgcgtggataggggagcccaggaattcaagagcagcctgggcaacatagtgtgaccccgtctgttttttttagacagaattaaaaaaaaaatttttaaaaggaacatacgtagacaatgctgctttctgaaacaagctccagttgtttagcgattcagaaaggagagaaccaactgatatctgaatacacagctaatctcaaagggttttttaaagacaccaactttttttttcctttgttaggtttacaaacagttttttatagatctgtgtttcccttattaaattttcttgagagtcactctaaaaatagatgtaacttttctattgttttttaataaatcaatagtaactgaatttttaaaatgggaaagatacatgcttaatgagagataatttaataatcttaacatcttacagtttgcttactcattttaaaattaataaaaattgagggcttaatatctgcttttaagaacacttttctgaaattcaacattttatttggtttcagtttagtttttgcctcaaataataataaaagtcaaatgctttttgttgaaaaatattcatattagtcagttaaatgtgatgagattatgacattgttttatcttttttccccaagttttcaaacatgaaaatctttttaataatttttaaaatatgtttaagtaaaagaaagctctgcaggtactcaatcacttataaacaatatagtacaatacaataaaaagcttttttccagtgggttgtattacataagtaaggctctgattccacaagtaaaggactgaaattaagttgtttttaaaatactgaagagaaaggttcctggtgtcagatgttgccttacaggaagtactttcacaactggggtattccccagtctctccccattacatgtttcccaaatttgttatttcctaaatcacggggccttttcccgtaattcaaggttcgtctgtctcaagtaaatcttccagaatgtggtaacttcctcctcttttaatcatttacttcaaacacaatcaggctgaaatactgcatttttccactagatgcctccagtcaacaagatgtgactgtctaaaaattactcaacaaatttcataaccccgaaattcaaaacatttaaggaaaagtaaacattttttactacgtagcttaccaagcaatacagagagtctaaaaaacatgactatcgattatcttccttgtgcaaaccactaacgaataaattaaaaagacaatactattttgtaaaaaacgttaaaacataacattcccatacacacccccaaaaggcacagactcaaaaagtccacatacccctggttttatcaaccgagctcttgagaaaaaaaaaaaaagttaacaacatatattttaattgcattacaaatatgagtaaatagtaaataaaaacaagcctgtttcagtttcccactaaagggctattttccttgtgaactttgacccctaagggaaatcaagaaaagtatcaagtctaaagatcctgaactgttccacagttaggttactgcttttttggtaacgcacaccacaacggtgtgcctcctcctctcccacctgaagtcaagtgggctcagtgaagtttcacctgcagggtagctggggatgcagggagtctccaagtcctaggctggagtcccgaccccgtttgctctcaggaagatgacaaggaccatggttcctagcacggagtagtgtcctcctgtctcccaccttcagtgtgacctggcagtaagacaccactcccacttctatcaggaggtgaccctgacactcagagacacctgcggacccgatgatgtctggccaccagtggacaggcgctctcagccctcctgcaaacggctggcacacctacctgagagaccaaacatttccccaaagcacattatacaacaagaacaatttcaatttgcaaaaaaaacgagtgacacagtagagctttcttttcaggccctacaattcaccagtgctggcaatatgtgtaacggaatgtggctcacaacagtaaggcaagctccttcgcaggaccccaagttccctgagatgacagaagtgtgttcaaacccatcgaggcactccttctacaatgaggtagaccatgtgtttaaaagagagactatcgtgcctggaaaactcggaaccggtacaaatacgaagcgagttctcctccacggagaggcccgtccgtatggggcctggctccctggggtcgcctctgccggggactgcctcccgccgctcagcctggaacctacccttggccaacgcctcctggtacttctcctcggtgacgttcaggttgttcacgtaggccgcgtggtgcttgctgtggtgcagctgcatgatctgcgcgttgatgtgaggttccagggcgccgtagtcgtagggcaggtcggggaggctgtgcttctgcctggagcccagataccccaaaaccggagccagctgcctgctggtgctgaagacgagaaagcacagcccggtcagtcagcgccgcgggaccgtctacgcaggctgggctgccgaggaacggcagcgcgcggcgtcccccgagtccccgcgtcccctccctgcggatccccgctccagccgccgcgccgggcactcccgggagaaccgcctgcaggtgccccggtcccgccaggcccggtgcggccactgtcgccattgccgcggaggccctgcccgccgcgagccccttcgcccttggggccgtgaccgggtcccctttcttctcacccgcacactgcccggctcaacatgctgctagtgctggtgctaccgctgatgccgccgatctgctgaagccgctgccgaagccaccacagccacgagtgccgctcctgcgccgcccgcgggccttaagaaagcgcggggagcagggccgcgaccccagctgcgccgcaagggcaccgccgccccgccccccccccccgcgggccccgccccgcgcccgccgcgcccaaccccgggggtgccctgcgtgcctgtcccgcccgcccgcgcttgccgtacaccccgcgcccagggcacgggagaaaggaggctgcaggctagcctcggcctcggcaacctcgctgcctgtctgccgtacttgagtggcgcgcggccgaagggaggcggcccctgcccccgtggagttggtacggcccgaaggccctgcctccggctccgcccctgagggtgccggcggggatctggctgcactaggcggctgcggcgcctgcccctgagttttggttgcgctgccggggggccgcggggtccagaggcctcactgcaaaaagacattcataccctcccagggcccccgtggccgttcctagggaagacggggcctagctgctggtcagcgccgcccagccggcctatgagctgagggtagagccagcgcccttccaacccgtattcagtactcttgcgccgtacccttgctttgcaagtaagccgaccttgggacctattccaggacaggaggcacacagactttgtccccaccggctgcctaagaacagttcttggacacccacgacgtgcccgagactgcaggcaggatttgcacacatttatctttatttttacccctagggttggtattattgattctagtaatagtgaaatcctttgaggttaagcagcttctcctgggcacagttaactgagtcaggactagttcccaccttcctcactactaagccctggcagtcatgttttgtgtgtttacagtaactctgtgaaccaactgttcaggataacataaaaggacaacagaggattctttcctgcgctgtcttgtagcctagtaagctgttaagtatcaagtgctctctcaacagttaaacaacaatcctgaatggtgtgaatcttccatgtgtagaggttaggaaatctacactgccattggcgggagttgcccctttattgaaaagaatatgatggaaggtagcaggtgctgaaccgtttccgttgcttcttgcaacccccgtacagccctccgaaggatgactaggcttccggtaagtggaatgggaaaacagtcaggcgaagaggaaccacctgaacttggcttcacaacaggaagggctgggcttgtttacagacgtcagaagaatgtaactagggctacgtgttggggtgaaaaaggaaattcaggctgggaccaggttatagatactcttatttttttaatttattatttatttatttttgagacacagcctcgctctgtcgctcaggctggagtactgtgtcgcgatgtcggctcactggaacctctgcctcccgggttcaagcgattctcctgcctcagcctcccgagtagctggaattacaggcgtgcacctccacgccccactattttttttttttttgtatttttggtagagacggggtttcactatgttggtcaggatggtctcgaacgcctgacctcaagtgatctgcccgcctcggccttccaaagtgctgggattacaggtaggagccacggcgcccggcctatagatacccttaaaacgcagacaagagcaggggtttgatgtgattgttaattggaagctgagaaacatttctgctgaggtgagacacactgaaagtggtttttcaggcaaggtggtctggcactgacttggggggatgaagggagtgcaggctagttaggaagctggtacattcgtctcagcaggaggtactgcaggtcacttttagggcactagctatgagaactggaagaaaagggcattttgaaggatgaatccacaggattcagagacagatcagtcattgtaatggaaagacttgatctagtgataatgaaatattcctattgggaggctgagctcaggctacttacttgcacttcttgtttgtatagagagtgatactttgagagtttaaagcgactcctaggacatgccctttagaacaagcaccaaacgttgggggctggtaggactgatagcagcagtcaggtagaagaatctccaacatcacacctgtcatcagctacatcattacaaaacactaccatgactgtgagcacatcc

SEQ ID NO: 47889 - DNA, 4126 bp, Homo sapiens
ctgaggaagagaggttgatcttgctgtctggggggtggggggcgggggtggaggcagaagaaaatctacatagaagtggacccatgcagttcaaacccatgttgttcaagggtcaagtgtattgctgttaaacctgtgtagctccgtgcctttaaacagctgccactccctctcccacatttttcacacccaaaagaattgggcccagccttatctaattggagcccaagatttgaaactttcttcctccttctgtccctacacaacttcccaacttatccctatctcctcaaatcctgattggcctgctgtcccatctcttacacgactctggtcatcactcttggacctaaagcttgacattgcttctatgccctgaccttggtccatctgccccttagatggcatttgctttgtagcctcagtgaagacccagcttcctggagtttcccttcacaatggcccagctcattcttcccaacctagtctagtgaaagactcagacttgctggggacccaggaggccaaaagagaagggttgtcccatattgagagtccggcagagccctccataagatcctttcatgaggacttcctgcaacatcctgcctcctttatggaaatggacaccacctcttccccattactactccacgagaaaaaaaaaaacaaacatggtcactgcattctatgtaagggtgggatctgtcattattaaactgccaacttctagttcatatcccaggatttgtcatggagtaagattgatttcaggtgcacagttccaagaatgactctcaagggctactcaagctactaaagagtagcccagaccactgagggctgtgagcaagcataaggatcttggctggctgaatctctgggccagcacaacccaggggctgcactccacactgtacatctactcggagcagccaaaataggtacacaggaggagtggcctcgcataccacccaggtccatgccagattgtggtccactgagaacagtattgatatcacagtatttctgggaacctatgtcccatctcaggcaactcccaggactcaatccatcttggcctgcatcaccctcctctcgtgccagcttacatctgcatttaccctctggtgagaaattagataaaatcgcataaaataaaacttcattttcatgctaaagatatttagtttgaggaactagtcagctatatgttggtacactagaggtgagccactaaaaatgatcactgttcagttagatgtggacaaaacatatttaagagtgggacaattattaaacatttaagggatcagattggtttccaggtgtctttaaatgccactccactttagagaattaatggaaattagagacaacacattactagtgtggtgatgcagtagctccagtaattttctggttcttcatctgaattcatttacatggtttaagttaaaatgcattgttggccaggcgcggtggctcacgcctgtaatccgagcactttgggaggccgaggtgggtggatcacaaggtcaggcgatcgagaccatcctggctgacacagcaaaaccccatctccactaaaaatacaaaaaattagctgggtgtggtggcaggcgcctgtagtcccagctactcgggaggctgaggcaggagaatggcatgaacccaggaggcagagcttgcagtaagccaagattgcgtcactgcactccagtcttggtgacgtgcgagactctgtctcaaaaaaaaaaaaaaaaaatcaatgcattgttaacatgtgtggcatgttttccaactcccatttttttgatggcatggataagacttagtctctaagtactaaatgaagaacaaatatctctctgagtgcactttgaaagtaatgcttaaatgtctggtctctgggacataacatctatctttgttaaactctgactttttactgacctgattttcatttaggttcagtctaagctttccaaatcaagcagagacctaattttcttaagcttccctggaacacaatgtaggatctcggcttttagactgaactctaggagacacaaattctcagtgatggggtggtctccaaaaccatgagaaggagtccacttaaagcaactgtcaggcaagacaatatgtaagatttccctgtattccacccacatgccaccactgtgagcaatataaatataaccccacacctgcttcctctccaggccaatccctggagatttgagaaaccatggttagcatgctcaaagatgagcagcagcagcagaaggcaagacgctagagaaggcacctgccagctgccaacatctttctccctctgtaggctgctggcctgctagaggcctgtgatgaagttttgactttaaatcactttcagagttttgcttctcacatgggagcattttggatagtgaattgagcctgtgttctaacttaaagtgattataagactttttattactaaagaacatatattttttaaaaggtcacgggaccaagctgggcgtgatagcacatgcctatagtcccagctacttgggaggctgaggcccgaggatcacctgagcccaggagttcgaggttgcagtgagccacgatcatgccactgcactccagcctggtgacagagtgagaccctgtttcaaaaaaaaaaaaaaaaaaaagtcatgggaccagcatttgatccagggacgaaggaaaaacaagcccatgaagcaaatttaatgacctattgggcaataaaggaatatcacttcatgatctcatccatgagtcattgttactgttaatagtcacacatcagtgctatggtagaatctcaaaatctcccacatttttggtatttgaatggtacccaacatttccagcttgaatgtggacttttccccagcaatttgtatattctatgagtcatttcagtggggattttaggagagaacctgtgctcattccccttcttgccagaggatcacccaccccgtcagcccaagtgtgacctttacagttagaaagtgctatacacagctgcttttctctcactttttcctagagaacaagaacaaaatctccctgccttgtatctaaggtttttcctactgagaaagagacttgttattcagttcaatggtttatgggcataaaatatggatgccccaaataagggaccttactttatcatataaatctgatgagcttaaacatactttagattacattctctgtagttagttgtgcctttatgctgctacgcatttgtagtggctaacacctgtaatcccggtgctttgggaggctgaggcgggaggatcccttgaagccaggagttcaagaccagcctgggcagcaaagcaagaccctgtctgtataaaattttttttttttttttcttgagactgagtctcactctatcacccaggctggagtgcagtggtgcaatctcagctcactgtaacctccgcctcccaggttgaagtgattcttgtgcctcagcctccctaggagctgggactacagacgtgcactgccacacccagctaatttttgtattttaagtagatggggtttcaccatgatgaccaggctggtctcaacctcccaacctcagacaatctgcccacctccgcggcctcctgaagtgctgggaatacaggtgtgagccaccctgcccagcctataaacaattttttaaaacctcagccagcagcaatacagggaagctctatctctccaaaaaaaaaaaaaaaaaaaaaaaaagaaagaaagaaagaaagaaaaaaaagccaggcatggtggtgtgcgcctgtagtcccagttactgagaggctgaggtgggaggatcacttgagcccagaaggcagaggatgcagtatgttgtgatggcaccactgcactccagcctgggcgacagagcaagaccctatctcgaaaaaaaaaaaaaaaaaaaaaaaagccaggtgttgtggtatttgcctatagtcccagctactcaggaggctaaggtaggactgcttaatcccaggggttcgaggctgcagtgagctctgattgcaccactgcactccagtctggccaacagtgaaacctcatctttaaaaaaaatggc

SEQ ID NO: 47890 - DNA, 5009 bp, Homo sapiens
gattcttccctccaagggaagataagcctagcttccatcgggaacagacccgcacattccatcagtcccttctcctgactgtacactccctacttcactccccaggcagggcctgggtagtgaacttttaagaaccaacactgatttgacttccaccagcaggctcagcagcacagcctctagatgttttgctcgtttcatcgccaggcggtactctttcccacggtactataaagcaattcctgtttttcactttgttgaaaaggtgtgccaaatgactgcaattctgtgtgcccagattatgataagcctaccctggtgtcctgcctaactaatcacatcacagcccactggcattttcatcagaagcctttgcttgagtggatgggggtaggctgcagattcttctctgttgtctggctggagtagagcagttactgtctaaaggttttctgtcttggtagactgcctcctttcttggacctttagttatacataagaggcttttgctggtggctgtttttgtctgtgcttgttgatgtgtacagattgctggcttctgggatatatgaggcaaaaatgaaacacagggagtcattcctgtgtcagtccttgggtcctgaagtccatagccagtttgcctttcagtcttcttctgcttgttttacatataatattcaggatttttagccatacttggtgagaggaacatggaaaagtatgtctagtccattttcccaggagtggaaatttcccagacttgtgtttagaaagggcttgttgtgtaggagagagtttggatgggaagcaaagatgggtggcagaggaccaattggggggccactgttagtcgacaagaaaagctgaagacctggattggccagtggcactgggacccaaatgagtgggatagagaaaactatttacaggttaagaaaaacagggaagagcaacaaaaacatgtctaacaggaagtcagtgtggtcaacagtagaaccattgcttaaggcccagtgctctcctctggcagaagaatggatttacagtttgtcaacagtcacatagtttttgaatggactgtctcctgtcctagtgggtctttaatttgtggggaacaaaaaaccgtccttttaaaaactgaagagatttgactgaaggtttgaccaaacaggatcttaccgttgcatccataaggttaaacactattagcaagcaacagaggcaaacagaatagtattttgaaaagttctgaatataggccaggcatggtggctcacgcctgtaatcttaacactttgggaggtcaaggtgggagaatcacttgagcccaggagtttgagaccagcctggccaacatggtgagactccgtctccataaaaaatgcaaaaattagctgggtatggtagttcacacctgtagtcccagctacctggggggctgaggtgggagtatcgcttgagcccaggaggtgcaggctgcagtgaactgagatgacaccactggtctccagcctgggcaacagagctagaccctgtctcaaggaaaaaaaaaaaaaaaaagttctgaaaataaaatccttcaagacccttatatttttattgtagttagctttttgtcttataaaagtttggttttctggaaatgaataatgacttttaaatttttgctttattgtgaaacaagggctatggacatcataatgtaaaaacaacaacaataaagcaaagtgtcacagaaaaacctagttttgctggcacctctccattttatttcacttgctgatcatgtaaatgcccttcctctctaagttagaatgtgtttggctatgggtaacaggaatcctgatgaacagtggttttaaatataaggacatatctgttttacctaataaaaagtacaagaactggcagtcccttggtgagtctggaagattaacaaggtcatcccggacccagggactttccattcttgactctgaattcccagcagcctgctttcattttccaacttgttgcctcatcgtcacaagatgtttcctataggtgcaagcagcacagcctctcacagcctagtaagagacaacaaggaagggagggggaaaacatttcacctcatgtgcctctccccggaaggaaaatttttctcagaagccccgagagatttcctctgatcccagccagaactgctcaactggccaactctgcctgcaagaagactgagcaccatcactatgtggtaaagaccatgacagccatgcttgccttagaccagcagttctcatcaagggcatgacgggagggggcagtattgaaaatatagaaagggacactttcagctgtcacatatacagagaggtgctattggcatctagtgggttggtgtggggatgctaaatgtcctaaaatgcacaagatacttttcacacacacacaaattgtcttgtccaaaattccagtagcacacttgttgagaaacactggcttacaccagccataattcatctcctggcctgaagatactatgactcaaacacaatttagaagttcctagattgtgcaagaggaggaacatggctcccagtagtgtgtgccacaataccccagcagatgttggaaggagtacagcaatgcctagtcattctggcatgctaaatccttttcagaaagctgctattatttgtactgaatgggcaactaggaaagaattacagggatcaggacagggaaattacatgcaaaaggtgcctttatttttcctaatgaagggatttttttccagtagctggacaagcctgtttccgagaataattgactctgagctacccatacctctgttacctctgttgaccaacagatgctccttactcccaccaaggagttcagaatgtttaaaacctaactctatctttatttttttactataattattttagaattagagacagggtctcgctgtgttgcccaggagggtcttgaactcctgggttcaaggacttctcccacctcagtatcccaaagttctaggcttataggcatgagccactgtgcctaaccataaaattattatttttatttgacacataataactgtacatattctggagtacactgtgatatttccatacatgtatacaatgtgtagtgatcaaatcagggtaattggcacatctatcaattcaaatatctattatttctttgtgctgaaaatattcaaaatctgctcttctatttgaaaatatacaataaattgtttgttattatagttacccaatggtgctgtagaacactagcacttattcctcccatctagctgtactgttgtatctgttaataacctctggctgtcccctccctacccctaccctttccagtctctagtaaccgctattctactctctacttccatgagatcaacttttttagctttcacctatcagtgagaacatgcagtacttctctttctgtgcttggcttatttcacttaatataatgtcctcctgtggctaaatagtattcatacatatatatgtatggatatgtgtgtgtgtgtgtgtgtgtgtgtgtgtgtatatgtgtatatatatatacactcacacatacacaatttttttttctttttctttctctctccttttctctttctttctgggatagggtctctcccctctgtcacccaggctggaatgcagaggtgcattcatagctcactatagccttgaactcctgggctcatgaaatcttctcacctcagcctcccaagtagctgggactataggcgcacaccaccatgcctggctaatttttatttttttgtagaggtggggtctcactttgttgcccaggctggtctcaaaccctccttgagcaattctcccacttctaaattcccagcctcctaaagtgctgggattacaggtataagccaccatgcctggtcatatataccacattttccttatccattcatctgttgatggacacttaggctgagtctttatcttggttattgtgaatggtgcttcaacatacatgggaacgcagatatctcatcaacatatgaatttctgaaataatattttaataatagtctagtaaaaattatgataacaatctactgaattattttttaaaaaaaacttagaatgtcagaagtctttgtggtctgcagagaaaatgaagactaaatgttatagctttaattataattttaaaaatctaaatgttcactaaatctgaaagattagatatattgggttatgttgcattgctgctcacagtaaaatcttgtaagtcagtataaaatccactagattagaaaaagaaaagtaggctaggaagtttggtttggcttccctatctgtaaaaccacaactgtctatgcttgacacaaactaaggtaaataaataatgtgtcttaggctaattgctaactgtgaataggagataacctggcatagaagagtagaaagagcattccaggcagaaagaatggactcagcagaggtactaactggtgaaacagcatgacatggtcatagtcacaccagacgtgagctcttgagagcgtcgtggattaacattaacatttttaaccaacaactctgataatctctccaggatccctggatttctgggtgccaataacaaaagctagacttactgttttttttttcctctgtacttctgcaatagattgaatgtttgcgtccacccaaaattcatgttgaaatcttaacccctaatgtggaggtaggtggtgaggcccttggaaggggattaggtcatgaaggtagggccttcatgaatgagatcagtgcccttataaaagggaccccatagagctctcttttcctgttttcaccacataagagataagagaagtcggctggcatggtaacccatgcctataatcccagcactttgggaggcagaggcaggtggatcacgaggtcaggagttcaagaccagcctggccaacatggtgaaactctgtctttactatgtctcta

SEQ ID NO: 47891 - DNA, 3109 bp, Homo sapiens
acacataaatattcatattaaatataaatatatatttttatgtatttaagtaaatacataaaagcatatatgcttatttttgcttttgaatacagtgaatacttactacacttaaatatttaagtgaatacttaatacaacctgagactcattccaaagcaacacacgattatttcctgaatctttttaatggttgcattgtgttctactgtatggatgcaccattcccaatcagttccctattaacggatatttgggttatccctaacttttgctatgacaaatagcactgcaataaccttgtatacctattgtttccatgtgtggagctgcaccttcagaataaggttagggttagaagtataactgcaaggtataagaataaacacaagtaattttgtactccgtggaacttgaaccatttttccactcccaccaggaaaggtaatttcaacgtgtatttccattgtaagtgaggtggagcgactttctatgtttaaagaccattacggtattttttctgagaatcatctgttcatgtccttccccattttctcctttggcttttgcactttttgttttcaatttttgagagctcttgtgatacgagttgcaaagattttctccagaccgatctgattcactggaaatatactacgaccatctggaatgtactttaatcttatcctaataaatcaccttactacaagacactcctttggggatgaacaggtttgataaagccggctaaggacagaccaatcaaaagaattacgtgctcttctagtaagtgtttagagactgtttcacgttctccaggtaacaccgccattactcggcggtccagatggcagtcttacttcagggagtctactccacttgcaggacctctttgattgagttcactaaacctcacagggccgccttccccgtgttccagttagcaaggggccctcaacgccgcggacacagcgcaacctccgacgccagagaacaatagctcctcgatgcgtctccagagatgtcaaggaggaacgaacccagcggccaggagactgcgcctcacgactgatgagagggaaggcatcggtttctaagttctcaaaacttacaggtgagcttctgctaagagtaaacgcccgcggctcgccgcccacggcctctctcttgaggtggcacctggtcctccgacacgcggaagcatcacggatgagcgtcacgaacacagagcggccaatcacgcgccgccttcgcccagatccctccgcacgaggcagccccgcagccgcaggtggccccggcgagtacttccaccttcccttcccgtgatgccctggggctgacctccgacctcgctggcccgcccctcccctcggccgcttcccttactgagcttgctgagctccggggcccgcggagctcgcgccaggctcctgggaaaggacggggagtgttaccggggagcagctgctccattgtgcctcgaggccccgatcgggctaggccgacggcctccctcccttcacctttcctctcctggcggggttcggcggcgggcgagtgactgcggccacgcctgaaaggcgactctcctgtgagtgggccagaaggcgaacatggcggagcggggaggctggcgggaggcgggaggcgggaggcgggaggcagtggcgctggcctgcggcgcgttcggaccggctgtggggcggggcagggcggagcggagccgtgcggcggggcggggccgggcggcggggcctggtttcctccctcagcgccattttgtggcagcgagacccacaaataaaggggagcgcaggggttgcggcgggactaggagcgcggcggggccggcggcagagctgtccggctgcgcggtggcccggggggcccgggcggcagggcaagcagcgcggcctcggcctatgcgaccggtggcgccggcgcggcttctgcctggagaggtaggcgcgggccggctggcgggagcggacgcgggggacctccggggcctgagggctgatgcgcagccgcccccggcgggtaaggggcgggcagggcccgaaaggccacacgggcctggtgcggcaccggtctctcgtgagccgctctaccttcccgcctgcggggaacacttccgccgcttcgaggccattttatctctgtcctccgtccccaaggcccgggttgagaggggtgctctggcggccggagagaccggccactcacggaggccggaggatgccctccccgggctgagcggcggcgctcgttttttcctcgcctcggggtcgcccccttcacctcccttgggcctctcctgaggacctggcggcactaacgagttcagcaaggaaaaaaagaaacattcgttccctacatttcatgtcacgcagtaggatgttactacgttctcttgtagacttccatttttaaatgagtataagcattctgaggaaagaaactgaattattgcagatttttgtgaaatccaagtcttaccttggatccctgtgagacagttactagatttttttttcaccgtttttcataagtctgtgtacacgtaatggaaaagcccgagttcttgttttgataagaaagtcacttggttgtttgatcccaaaggattagcttaacattatcaaggactagcataactgtgattatgtaaaaaaaacaaaacaaaacaaaaaaactattatttagtctggtagggaaatacttctatgagtatgttacaattggaagttgtatttgtgcctattttatctagttttagttaattccattgcttcggaagataagtggacgtcatagatccatcgcaagttctcgttttttggattttaaaattttgaccattaagttttctacgatagataaacatgttgtggacatttaaaaccgtaatttaaaactatgagcgaaaaatcttttcaagatggatacattttaattcattcaagtagcatctgattagccaagtcggggaaagattgcagtccgcaaagctggcttgtgataaggttgaggttacattttaagggtttgggtaggtgtgtttcttacagtgcttttatatgttaaggtatcttaagcagacaca

SEQ ID NO: 47892 - DNA, 2676 bp, Homo sapiens
ctggtattacccagggagctggtgcaaagtaggagccttggggaacatgttaaggggatgtgagagtaagcccacaaagactcagaagtggccagggagtaaggggaaaatgggatagaatagagcaaaagccacgggaggcattccttgaattccttggactcagatatgttaggggacaggaaacacattgaagacaactgaagagacttcagtgtgctgctgagttcttagcagagtagacagctgatttcaccactattccagaccctaaagatttctcctgaaattgcactgttatgcaatttttttccttctctattgccccacctctggggcctacactctttaccttctctgatttatctgacccatccgcatatctctgcaaagtcttaatgtaggtttccaggatttaatgattctttcaatcaactttaaagttcttcaggaagattctccaggtccgtcaacagttttccccttcatgactttgtgacaaagctttcttgttccactatccaggtgttcccaacaagttgctgtaacggtggcccctcataagcttgcctggaaaccctagaaagctcagaaaaattatgaactttgcccagtaagaggctgggaagtcagaaagggttttaaacaaaactgaccccacttgttacatgctcctttcactgtccaaacgtcaaccaaaggaacttttgtgacgctaagacgctcccggcgtcctcacccgttcacagccagagttgatcttagaaggcagggggctcgcaccgagacgctcctagcaagcccctcacgcgagcgaatgactggcgccaggagaaacgcataggacctcccgaagccgccgagagcaaaaggacccatcagagctgtgctgagacccgccgcgggccgggctcgcactcgagattctcgcccgtgggattccagtcctgagctgaacgagagataagtctttgtcaccccccagtctttactgtttcgagaaaccctaagattttttaaaaaaaagcccaagacgtcaagtcggggaactccaacattggggtgtccagaaacactggggtttcaggcgctctgtaaatgcgtccgaggtccgcggttctgcccgcaagcccagaccccggcctcacttccgccccgcgccccgcgccccggcctcacttccgccccgcgccccgcgccccgcgccccgcgcgcctccgcccgcccctgctccggccttgcgcctgcgcacagtgggatgcgcggggaggtggtgcgcggggaggtggagggcgaggggcggggctacctcaggtcccgcccgcggcaggcctgtgggctgcgaggaggagctttgcctagcttgcaggcagcgcagggcagacggcggcaggagaagcaagatgaatgcaggctcagatcctgtggtcatcgtctcggcggcgcggaccatcataggtgagtggccggcgggagccgcgcagagtccgaggcgcctgctgcttcggcaggagcgccgagggccggacttgtgtaggagaggggcgtatgtggaggaagccggtcaggccaagccgcgaggagccgcgggatccctggaaccctgcggctcccgcgttccctgacctggtgctacagccccaccctctcctctcccgatgtgcgcactccgtccctcgtgcttggattggctcccggggtagagccatcgcgtggcctgcctctcccattggttggcgtagggaggtgttctcctccggggcccctgattggccggctccgggaggcgccatcggtaatgcctgcggcaggggcggaactgctaggtggtctgagcccggctttgggctggggtcgggctgtcacacaatggctagaagtcgtgacttcgtctccttcgtgccgcatggttttcaacgcccttgacccgccggttccttttgtttgggaagcatggggtcgcatccagtccttcggatttggggaaatagaagggctacagcggcgtccctaggccgttctggaggtcgcctgtccagccctcggctgctgcgagttgtggcacccaccttgacctttgctcagaccagcaggtgtaggaacgtgtgggaggagagggcactgcctcctcgcgtggccttgccaaacagggtcatgaggctcccctgctcgtaggtggttcccgtattacccgcaggcttgtgatgtccacgctctccgcctttctattgtaggttccttcaatggtgccttagctgctgttcctgtccaggacctgggctccactgtcatcaaagaagtcttgaagagggccactgtggctccggaagatgtgtctgaggtcatctttggacatgtcttggcagcaggtaagtctcagtgattccaggagaagtcaggcttattagaaacagcccataaacacacacacacacacacactctcacacactcacacactctctcactcactcaagttcttgcctccttgcttttgctcagagttccctctgttatgattcctcctgttggcccccttcttccagccctgtcagtagcttctatccagcttgagactcagcttcttggccaggcagggtggctcccgcctgtaatcccagcactttgggaggcggaggaggaaggatcacttgagtccagaagtttgagactagcc

SEQ ID NO: 47893 - DNA, 3348 bp, Homo sapiens
atttcccaaatctacaaatctgtgttaattatttaaaaaccacctactaagagtgtaaatggggccagacactgtggctcacaggtgtaatcccaacactgcgaggccgaggcaggaggatcgcttgatgccaggagtttgagacccctttgggcaacatagcgaaacccatttctacaaaaaataaaaacaaagccggatgcggcggcgcggacctgtgcttggagaatgcagtgagctatgatggcactctcgtctgggcgacaggtgggaccctgtccctaaacaaagcgagcctatttggcacagctttgatgcggggtggaatctgatggcggggaaaaaaaaaaaaagtaataaccaccaatttcatgctctgccacttcgtacagctataccagccttttccttcagattctgcaagttttttgctcattaaaactctctttatctgtgaggagagaaatcggtagtcaacggggaaggtggtgactttcagatttgtttacgaaaaaaattaggaatctatcaagaaacagtaagctctgtaggtatccaaaggcctgacagcaaacgctctgctaagttagcgctgccgtctcctggggtcaatgcactcgagtggcgtttcctgggctaactctactgtaagaagctgtcaacccggatacggctggacgccggacgcccgacctcgactgcagctgcgggcggacagggcaccgggctcatccgagggcgcgcggatggacctactctttttctggtaaatggtcctaaaataaaacctggcgtttaacatggacactcagggggtcgccctgaaacaaaagggggtgcgaggcgtggcccgcacgtgcgagcccgggaggcccgctttcccgcggagggcgcgtttccaacgccgccccggacaccacatccacgcgttgccggtctcaaaaccctgccgcgcgcggcggggctcctcctcgctgtgggaaaagtggggccacagcgccctgccccagagaacggcgggtgggctgggtccggctgcggggccccgaggccctttctgcggaggtaaaggagagaaacgagggcagccggggtccggtcgcggtgggactcggccctccccggccgcaaacccgacccaggcccggcccgcccttaccgttttgggagcggatcgtttccccagtgctgcggtcaccgaacacggacaaaggcccctccatcttgacggcagcgatacacgtcgaattctgcttacaccgcgggcaaccagtatcgcggcccctcggccgaccggcgaccacagcagtggctgcgacggcgtggagcgtacccgagcgatgtcccaggagctactgggtaacacaccaccccacccgcttcccggctgccccggcccggccgcggggcacggcgggaaggaaaaagaggcagggacaacagggagagaaacaggactgtgacggaagtgaggctccggggaaggggcggggtcggcatttttgtccaattagatagccgatgggaagggcgcgaaagcggagaacggaagtcggatgttggaccgctgggaagaggttgaaccttcgcctcaaacgatgttgcgcagacgcagtgggccattctagtgccttctagaaaaggttgtaagaagggtggagcttggagctggggtgtaactggaggggcgggcccttctccaagttagagttggggttctgagcgagtcgtgcgttttaggtttagtgtcttttccttgtccctgctcggggagcgtgaggcagatcggccggctttgctccaggcctcaggagtgtaagtttaagggcgcgaacctgggtgggacggggcagtttttccagcgggccatacgggaaaatttttggttcgaggaagacaaccaccctttttaaggagaaaactgcatcttgccctgccttattcctacgcggtgcccaggtggggtgtgtgtggaccagtcgatgaccgcccaagctctccgagtagaaaacccaaacatggttttgtggggtgtgtgcctttgaccccggacttaagcaacaagcgtggtcttgggcgtagctacgaggtggttggtgggctccagggcctgcgtgcccctcgacgtgagcgatgattggcgatgaaggataacagatcgccttctcggccactcagtggcaggggacttgctacttccgggtcggtggcgtctggcgtggagagtttggggatctacagcagccaaaggcttgtccctgactttatatggctgctcctggcgagcgactgagtcgtccgtgaggaaaaagaggcgaggcttttccgagatcgtctcagcgatggcgcttcggtcgcggttttgggggttgttctcggtttgcaggaaccctggtaattagtcttgccccccttctcccagctcactcgcctgggcttgcacagtacattggaacgtgcgggttctattttgtattcgacgtgccggatcgaaatagagctcgcggcactgcgaagaccacagtaggaagttaaggacggggtcagtgctgactccaccctgtgggcatacgtatttttcgtcccctcgggcctaaagattgggggtgtaaaagcggatagacgttagagcgggttcgtgcgctgtccatatccgtcatttttaagccctgtgcggtttttcccgttgcccagggtgcaggttcgcagccctgtcaaccagctccgagccggcagcgaaacctgaagtggaccctgtggaaaatgaagctgtcgccccagaattcaccaaccggaacccccggaacctggagcttttatctgtagccaggaaagagcggggctggcggacggtgtttccctcccgtgagttctggcacaggtaattaaatctgcttgtgattgacaagggcagtgcaccctacagactattttcattcattcaactccaggcactctcccaggtagctgccatgcggcgggtagaggcagggttcgcggaggggctggaacaaacaacaaataggtgtgatgggggctatttaaagaggatgttacagtagcggacaggatacctgcctgtctgaggtgacatttaagaaggtgagatctgaaagaggaagaagcctagtcatctgccagaaagagcagtcctagcaaaggaaactgctggggtgaggaactgaagggcttgtggatctgaagctcaatgggcagaggatgaatggcccaagatgaacatggaggggtaaggaggcgacagatgattagctttgtaagtcaagatgagcactttagactttcttttcattatagtgggaaactacgagaggatttaaagcttgagcc

SEQ ID NO: 47894 - DNA, 647 bp, Homo sapiens
accgcacccggccccatgaaatatcatttttactggaaagaactgattggttgcttagacttgaaggtttcacaatcattttctcaatgaaaagagcttgttggccaggtacagtgactcatgcttgtaatcccagcattttgggaggccaaggcaatgagctaagatgatgccactgcactccagcctgagcaacacaatgagactctgtttcaaaggaaaaaaaaaagcctgtcacttcaaggaagataactcgcagtatttcctagtgataaaattacagctttcaatcaactggaattttgaagaatttacatgtgccaccgtaagcttgacagcttcccagtaccacaacctttctgatgagatcagtgatcatattttccaatgtcttctgttggtattgtgtaataaaatgtgcaaacatttgggagacctacataaccctgccaaccagcattttccagattactagcacataatgttactattgtgcgctatcttatctcatagataagagatctattctaggtgtgagataggccagtggattgtaatgtagcagtacaataaaactcattaatgatggtttcagattccacagtgcaattaatctttaagaaactaccacttgttgagtttggtac

SEQ ID NO: 47895 - DNA, 780 bp, Homo sapiens
tccccgtcagtcatccaccgacagagttgaagaatccacaaaatgaccaaggagctgggggaggaaagggctagggtgacgagcacgtagggccggctgttgtcaaggcatttctcgccatctgctatttcacttcagagaccgaaactcagttggttgggtaagactgggaatgtgatttttagcaatgtgtttgtttaaatagaaccccgctataaaaacaatttggaggattatgattcgtttttgaatgagaactagttttaatggaattttttatgtgcattccaatcatgactaaaatccgcatcatgatcaaagtctgcctgagtactgtatgtgcttcatgagttgtgctctaaccattagaaacccatgtttattcagtgtgatgccctgcactgaaagtggtggttttctctcgtggggaagcagagtgtattcttagaactgttataatgggctttatttcttgaaacagtttgataagtatttattaaatgcctactgtgtgcaagtgttggagattcagatgcaaaaaggataaggtcctggtttcaaggagtttgctgtttagtgggtgtattaggctgctctgactgccataacaaaatactatggactgggtgacttacacaacagaaatttattttctgacagttctggaggccagaagtccaagatcgaggcaccgtcagggctggtctggtgagggctttcctcctggtttgcagaaggctgccttctccctctgtccgtacatggcttttcctctgtgcc

SEQ ID NO: 47896 - DNA, 489 bp, Homo sapiens
tattgctgctctgtcaacatttcccagttcagggaagatgtaagtgggtatcagaacttaatcttgagctttttgttgtttccaggccaggggagggctctcgagtatacctaggctcgtggaaaatgcagccagggatttggacctccctgtggattgtgccagccagtcccttcaccatggtgtccccactgatcagagctcagagtgcaccagtacaccagttgctgcaatcagtgcttggctttttgtccccagttcaccccaggtcattcagctatcctggcattcccagtggttcctgtgggacggggccagagtgggtgtcccatgaagatgaccagatcagtggggagataaaatgctcacctgtaattctctcctgtcaccttggaaaccatggatctagagacattctctgagtgacactatgccagctgggagtggtggcacagtccgaattgattgtttctcttaccagttctggct

SEQ ID NO: 47897 - DNA, 1293 bp, Homo sapiens
aatacttgggtgatgaaggatgaagacaaacctcctcttcatcttcactccagtgagtggagcactggcactgttgccagtgagaggcaaagacacgaggccaattcaacaacccacctcaaacctgtatttgcaagtgagtgcagactcccctgattccaatgaagctgctgttgagggccggatagcagccactcttggctttgcgggccgtacagtctgtgctgcaatgacaactctgtgggtgtgtgaaagcagacactgcttagatgaacgaggatggcggcacgccaacaaattcattatggacactaaaaattgaatttcatgtaattttcatgtcatagaaattctttcttttccccttcaaccatttaaaaatgtaaaaaaactattctcagcttgtgggttttacaaaaacaggtggcagccagatttggtagtggccggactttgccacctccagcctggagtgttttgggaattccccattctgaaatggtctccagtgtggctgcagcacgtccatttgacaatcctgacctcggtggtggcaaatcttccttgtttcctggtggatttaactttgcagaaggaccagcagacatcctgacccaaacctgatggatgagattggtgtaaagtggagaaattctgttttggattaatcacaaggagatttaaaaaacgagagattttctgtagtaagtacattgcctgtaaatagaattccaattctacatgctcagggaccattttgttcacttgtatcaaactatattctctggattcagagggaattattggaacttttcagagatcaggaataaaatgttcatgcatgagaattttgtgttgggcttttagaaggataaggatctcacatatggcttctgggtacagcatgaataaaatgcagttgctgacaaattaaaaaccagaacgttcctcatattgggttgattagcacttgcaggttctgtaccatcactatccttaacgaggaacataagccttgtcccaagttgcaggataaatatttcaggaactcagttgcaaaggtcagtattacattgatttattgatgtatgcttttaatcaaatgaaccctttagaattagttgcccttaggcaaatgtcagaagctcaaaacattccttaaaatacttaaaacaaaataatgacacaataaaacatcattaaaaatccttcaggctcattagctctagttaaagatggttgaatgcttatgataattgaattgagccactgagcacttcctgtctttcttct

SEQ ID NO: 47898 - DNA, 1795 bp, Homo sapiens
gaagttaacagcactggacactgggaagggtgatgaagaaagtggtgtttgagtccagggagtcactgaatatctttgagtaaaggagggacataagaaaatctgtgtggcaggaaggtcactgggctactagctactagagcagtgatccgcaaactttttgatcaagcacctctaacaaaccaaccaaccaaaccaactaagtgagcatgcaaccaaaccaaagcattttacttaagaatataaacatttatggatctagcatgtacaaattaagatgtatattaaaataaagagattaaagtgatttaaaaaaatagtagcccaagtattttcttcttgcatcctattggatgtccgggtcccctgactttgaagattgctgttgtagaccagtttgggcaggaaaatagggaaaagagaatcagaaagaccctcgcaggccatgatgatagtgatagcgcagacgagagatcacctggacccaggtaaggtggagatgcaggcaatgtaaggtaatggacagacactcagagacagaagtagagaattgccaggagcttagggagagggaactgttcaaggtcattctgggtttgaggttttgttttgttttaaagtcttacgctattggaaagatgaggattcattttagagagagtacaggggtaaaaggcaggtttgtgaagaagatggtgagtttgttttgtataaggtgaggtttttgcaccagtgaaatctgtttgtctgtccccagaaatctggagatttaggactggactcagaaaaggagtcccgaatggagcagtgtcatctgattcagatgtgatgtcaaacttcaggaatgtgtgaggacacccagggcaagagtacagagtgagaagaaaacagagccaaggacgaacccacaaggacactggcatctaagcgtgttgtagctcagggttccttgagaagtagactatgagatagaaacttatgagcaggaagtgtattggggagtgttccagaatcaacaaccgtaaggagggaggattgctggattgggtggagaaagaagtggaagtctgatgtggtttcaacagaggcctcagctgatctcgtgaggagctctgaaatgaggagggcccttcgagggatggctgtggtgcgctgaactgggtcccctggttcccaccagctggattcctgagtcagctgtgtggatctcctcccaactcctcattcagtgatgtcaggttgatcttgacattggcacagtgggaatatttacaccatgaaaattgcccaatattacaaaccagggcttcccccatccaccaggaacaacttgttaaatatgtaccagtatacacatttatgtccctaatgaagaggggaactaagtctctgcatcttttcataaactgatcattggatgcaggctgcccctgaggagaagatgttactttggatggggtagccgctttcagctgaggactgtacctagagaagaacatagctgtgaagcataaaacatttcctaaatctggagaaattagtgtctttgaatgtgaagggtgaatatgaacaacataccacagcatccactacagcctaccttttgcccaactgcttcatatagtgatttaatctcatctagaaacagctacttcaggatcttagttactctcttttcctgggtaaatttatgacagtaatattggttgctatggtttgaatgtccttctccaaactcatgttaaaatttaattgccgttatgacagtattaagaggtgggacctttaaggagct

SEQ ID NO: 47899 - DNA, 2997 bp, Homo sapiens
tacacctgagctctccctttgacccactacaacactttcttttcttgggcaatatattaatagcacggtggttatgtcacaggcctgtgactggcttgggctcaaacccgggctttttcacttactagctgcaagactaactagttatttaatttctccattcctcactttccttatctgcaaaacggatgcaataaaggcaccccctcttacaggactgttaggattaaatgagctaaatcacagtgtccgaacacttcagtacttcgtacataattacttgctcaagaaatgttagctattattgggtcatgattatttatatgtgtttgaattccagctttgccacatcccagagtgtctttgagtaagtcactgagtatccttgtgcctcaattcctcatctataagtaggttcccatctcataggtttttaaagattcatgcttacatgcttagcagtgtctggtatggaataagcactaaaaaagatgagcttttatgatgatgatgattactattttcagtcatgattattttgtatatttactctaaaagaaagtgaatttttttagttcaagacttttagattcatcgttctactttcattgtggctagctcatggccatccacgtagtgaattaataaagctttgttgagtggcacttgcttgacagcgacacttttgtccactctttcaccttgctggatttgtgctgccttccttgctgtaggaagcccacgcttgggaaataacattcccacagaaggtctgagaggctctgacgggccaaggttgtaaacccccatgatttgactccacgggcagttaaagtgtgttcccaccccccacggatccgctgccactaggctgtgcgaaggcatttacctccctggcactttgatccaagttccctattttcccctactggtcgatcgaggttgggaacagttgctctaacctgggaagcacccgccacgatccagcagggcgcggtgggaggggaaactgaggcccggctaggcacccccgccgcgcccagcccgccgagaggctcaggccccgggaggcacctggagcctgcgccccgcccgcgccgcttcctgtcccgcgcgctgcgctcacgtgacccgggcctgggaggagccggggcgggcgggggtcacctgaacaagggagtcacgtgagcggggggcgggggtgggggggcggtgccgggcggctgtcacgtgacgcggttccggggccgccgctgccgctgtcgctgtcgccgagcccagtcgagccgcgctcacctcgggctcccgctccgtctccacctccgcctttgccctggcggcgcgaccccgtcccgggcgcggcccccagcagtcgcgcgccgttagcctcgcgcccgccgcgcagtccgggcccggcgcgatgggggccgccgccggccggagcccccacctggggcccgcgcccgcccgccgcccgcagcgctctctgctcctgctgcagctgctgctgctcgtcgctgccccggggtccacgcaggcccaggccgccccgttccccgagctgtgcaggtgggtggcccgcccggacgcaggctccgctcgcggtgcccggggtgagcggccggcgtggggggcggggagcgctcgaggagctcctggggtctccaagtcgcctccgttccgcgccggggtccgccccgttcccgagggaaagttgcctgcgtggtgtccgcgagtcccgccgggtcccgtgcgcaggcggggggcgcgggggcacacgcggtcgtggcggtcctggagccccgcgtccggccacttgtggctgtcgctgagtcgggggtggctttgtgcggagcggtcgccccggcccttggggtcggcgcctgccctcgcgcggccgggcgtccgggaaagttggaggcaggaactccagtttgctttgttcccgctgcgcgtttgcatcagagtttcgccagcggggcaccggtgaggcccctcggtgtggagaggctcaccggggcgttggagcccgcaggaatggtcctggagttgagtgtttgtggtttcatttgctgattgatttccccccgtgggctcattttctctttaaagaatatatatatatatatatttttagcaggcggtgacttttgtcttctttagattgggggcagggggtgtcgtccagtgtgagctttcaagacttgacccttcacttctctgagcccaacttcctgcctggttgctcacatgatgtcattgtctccggggcggattattctagtggatcttgctctgggaaccatgattgtataacccatcagtcccatcgagggctgttcacctcgcgcaactgctagcagtccagggcctggggaacttcgaatttcaggaattttctgaccatccttttctggactgtttaggatgatggaaaattcagcttttgtttatttttttaaactttggtaaaaaggaagcaggatgaaaagttttgaacagacaacagtttctccctgttactgttacttttacaagttacttttacaagttacttttcagagtgaaacaaagttgagcctactttgggctgaacttggagtttgtggtagggtttatggggggggttcttatttttcccatgcatcagagatagttttattagcacccctgtgttcagaacatgcagaaattagtctaaggagggtgaggctgatctcacgatagaaactctttggaaaggcccatattttttatgctcccttttttggaaggggaagggtggatggagggagagtttgtgacactagtttaaagaccagttagctaccctaagatacatagttactccagtaactagtatgatacagagaaatggtggcagcttaaacgaggtcaggctgagaacaacatttagaggaaggcattttggaataatggcttctgtgaccaaaaataagaaattaactcgcctgggcgcggtggctcatgcccgga

SEQ ID NO: 47900 - DNA, 782 bp, Homo sapiens
tggtgtatgaggaggtgggcgtagcagctgtttgacttcatgggacccaccagactgtaatgccgaattacaattttgcatttccaccagtgatgtatgagagttccagttctatatccttgtcaacacctgtcagtgttaggtttagccattcaagtggagttgtaatggtatctcagtgtggtttcagctttcatctctctgctgactcatgatgttgagcaagaaaggaacatcttttcttgtatttattggaatcctggatgatgttcaccattatcatgtgcttactgactgggtattttttgtagtgtcctttaaaaatcatattttgtcccttttaccccttaaaaattgtttttgggttcttctccttattgagctttaggagctcctcatgtcttctgggtacaagttctttcttagatatgtgtgaggtatgagtgttttctttcagtctttgccttgcctttaaattttctcagtgatatcctttgaagaacagatttaaaaaaatttgatggactataactttttatggtttgtgcttttggtagcttgagaaatcaaccttaaaactagtgacatttgacctgggtaattttttgtttggagggctatcctgggcattgtaggatgtcagccagcattcctggcctctactcactagatgctaagactatactctaccactccccctcccccagtggtaacaaataaaaatgtctccaggcatatcaaaggccctggaggggagggggcaaaatcacatccaattgaga

SEQ ID NO: 47901 - DNA, 1782 bp, Homo sapiens
attggaagaaaatcatcacggagcagggtttagggttgaaatactggcctgcatcctgtactgttgagttgatctgagccaaggatagcagagaggaccagccatttttgtggtagctttctgttgtggagggcacttgcccacctcctgggaacgccacaccctggtgtgtttgcccttgttctgtttcccctgctgctcttctgctggaagctctggactcacctgtctctgttgtggatggtgcagggcgggcaggccagagtggcatccttgtcctgagaggtcccaggaggcagttgagtgtgtatgtgtgcgtgagtgcgtgtgtgagtgcacgagtgtgtgagtgcaagtgtgtgtgtctgagtgtctgtgagtgcaagtgtgtgtgtctgagtgtgtgtgtgtgagtgtgtttgtctgagtgcgtgtgtctctgtcttcatcagctcctaggagatgcctccggacaggggcctgcccgtctctccctccagttccttgccagtgtcatgtgacactcctttcagagggcaccccccgcccccagccaactcacctttttttgtaaacttagtttttaagcagtccaactctctctctggattcaaatgaaagctttagatcatagtctgtttcgatagctctgtgttcctggtggtggttttctcctcacaatgaccttgtaggctagctgagttttgtcgaggaagttgagctgggagagactggctcacacagcttgttagtcagcgctggggcaggaatctggcccaggcccttcatggcacctttcttagggtagcgtgccccctctctattccaggtgacctctgttacgcagtccccattgcctgccctggttccctgggctctgacatcaacttagatgtcgtgtttgacttagggcttccagccggatccctctccatacaccgggcttccttccagaccctgcatacctctcagggaaaaccaaaggctgacgtttggcatttccctgcttctatttatttgtatttgtcggccctgtatctttgtccacagctttgtgggtttgttagaataggaagtgaagtacttcctatataagctctggccatgctgtgtcaaactcacgtgcttccccagccttcagctcggggtaggagtcttcatgcaaatcagattgtttctcttttagtgtaggcaacagcaagttgttgacgacagtggttaccttaggctcttgacattctgctcccaaggtccagtgtgggaaccctgcctccttgctcctcttccttgctgttttttccctttctccttagttaaggagactggtctggatttctgaaggtgactgtgctggatatgtatgagctgaaacactgtctgatactgttgagggacagtagtgagccaggtgatttcttgaatactctgttagaggacttgcgtgcatgtcgaaagtaggagaatcttttttggatgttcaggttggaaacacttcacattctctttgtctccaacatgttagatttgttgcttgctgtagactcagagaaacatttctctagctagtgaccatgtatcttgttatgtgaatttcacttatgtgtcaccaactgggtttctgtcttttaaggaaaccaaattacagattcacacgtgcctacttttattattactgatcccatcctgcctttatcttgctttattaattgcaggccagtagtaaaatgtttaatagttacatgaccattagcataaccccaagattcacagggactgaggaaa

SEQ ID NO: 47902 - DNA, 424 bp, Homo sapiens
attgctgtgccctctgctgttgatgaaatctccagcgcagctgtaaactcttcgagtgtggctgctgagacttacttgtccttgagtgcccagcgcctgcaagtgttttaaccaggggcaggtgctgatggaaaggaggcgtcccccagggagggaggggtagggcagggctttcctttagtttctttctgccttcttagtaatagggtgaagtagggaggggctgaattcttttgccagagaaccacactccccttcccccaagcaaatgtggaatttgctctgacgtcaggctggcagctggcctggtgtgtgtgggatatggagacagtgcagggctcagctttccactttctgtccccagacttccacatcaagtgctgtcagctgaatgaaggccggagtgtctgatgtttgttctgaa

SEQ ID NO: 47903 - DNA, 3126 bp, Homo sapiens
ccacccagaacagtcacagaactgctggcggtatgttctcgctcgtaagtgggagttgaacattgagaacacatgggcacagaggggaacagcacacaccatggcctgtttagggttgggggtgaggggagggaacttagaggatggatcagtaggtgcagcaaaccaccatggcacatgtatacctatgtaacaaacctgcacgttctccacatgtatcttgtttttttttaaagaaaaataaaactgccagggtgacagcactgctgctcctgtcttctgagtcccacctggtttgctaaataccaggttagaaagaggaatccctcttgtggagtgtttgagaacctgcctcactgtgaaccgcctgggcagggagtgctggcagtgctgttgtggttaaacaccctgtgtgctgctgggaacggtgccatagttaattctggcacatgtgtgctagtgaagacattggttttctgtgaagtggaaagagttctagctgcagagttggagacctggctgaggactggtgttgccgcatccaaccacatttgcttgagcgagctgctctccaggcccgggtttcttacggtgaactgggtggtgctgttagattccttaagttaacttttttttttttaaacattactgtgtataagagacaacctaggatctatgagataaggagagatacatttttcaatctacagacttcctgacatagctctggtttcttggaatctgcagtatttcgtggtatttgtgcgtagatagccctaagtaaattatgaagggagagctaaaaccattccttactgcttgaagaagtcccttaagactttacagcccacctggctccaccccagacttccagtgtttagggcaggtccttgttcacatgcacagtcttgtatggtttcttttaggctgttgacattggaaagtacttctccaaatgtactgtatcaccactgatgagtcatggggttttgccttccaaaccccagtacccaacctgcaaagggagcattttcaaatgagaacgtgtatttttatatctttacctcctccttgacacactttgtaagttactccttcagcgactgttcgccgtgtggtttgctttttgtggatgccctcgcccttgcttgctgtgctggtgacactcagctggtgccccctcacgtcctgcaggtgcctaatcagtgtctgatcacactgaccagctcaccagtcttgtgagttcagcggccacctgtggtaccttgcttgtcttctgtggtagcatgcattgcatcctgcactcagtctgcagatgtgtaagaggttgctggtttcttttagcttcacaggccttcacaggggccgagcggggtgtattagcaatggtgttaagcggggtgtactagcaatgatgtaccactctactgcgtcccaagacacaggctggcttcttgatttgggttttcagtttctaatttcatactgtggggcttgggagaattttgccgttcagttctctgtcccccagttgggcctactcttctgaagaagtattgggatgtagtttgtttctgtcacattaaatgagaaacctgagaatctcggtgaatttttgtgctttcagtctgcccgggttccagaaacagcgctggggattgagtgacgaagtggtttgggaactttgagcccttgacttttggcttaatcactatttattctgtgactcagagaaatcagcattgcttttggctaaaatacacttttgttttgttacagaaccagagcagaattgggaagctgtggatggcagtcagacggaaacagagaagaagcattttttcattaatatttgtcacagagtgctgcaggaaggcaaggcacgagggtgtcccgaggacgcggcagtgtgtgcagtgggtgagttgtgcctggatggaagatctaggtgatgcttttctagggcatccagtttggaatgagttagaagatctttctgtggttcatctaagcctcctctttctataatcacatgaaggatggtaaaaatttttcattcataactcaaatgtcagtaattgcttgatgcactctggaatcctgaagttggctagagctccctgacatgggctaaagccataactgggaacagaaggaaccacgtggaaaatactacatcatctttttagtttgtaacctgaagaataacattgccagtgtttgtgtacaagtgattttattttattttttaacaactttattgcctagaatcgttcaaaagttatggcttgagtgaagtgtaatctcagctgtagccctagtgtaagaggggcttgcatgcttcgcttccttttgctgtcattgttttggtcccgtagctgtcatgcagagacttctcaattatttgatacaggtatttagcacttcatttttgtcatttatgactcactttgaaaatgccaggctatgagaatagtgagaatctgttaaaagcattcaataaggaattgtgagcctcgttggattttaggaattatctcggtattcagaattgctggtgtgtctttaaaagcaggttcaggcatgtccatgtctttactaagaaggactttggaacagagttttaatcctttataacaaaaagcaagtgaactaagaagtaagcggcctcctgcttgggttgctaaacaggtttcgttaatttctgctttggatatgagacacattctcaccctttggctgtgtggctgtgctttcaaaagactttgtgtcttggggtagctgaagccctgacagtaggggacaatgtcagtttacagttggtgctgatgcatgttgcaagccatttggtctttcttgccctggaagggcattgtgcatccttcatggcgctttctggctgaacctatggatgaccctggaggaccccaatgtggctgttaatgtctagccaaacgtggcactctagggaaacccatccgctgccttggtgggttcagggggctggagaagggctgcacgtgctgggtttgggctgatttctttctttctttctctttctttcttttttttttaagtcacttctttgtctgcgtgatgatcatttttaaccacatcttctgtttt

SEQ ID NO: 47904 - DNA, 721 bp, Homo sapiens
caactataatataataatttttaatggaataacaaatttaagaaatgtagggtaccactttatatttacttgtaattaacatgatttcaatgatacatactttctcataattgaaaatattataacattatgacttctgtgtcttccctctcttatatatggtacattattacatgcagtagatcttacacatttatagatacggggatgtatgaatttaaatgatgtatagatactaaaccttaaaggcagtttatagatactgccctttggacttatgtactaactgtactaacatgccagaaagtggaaagttggcaagttaactaacaaataagaaatgtttaacctagtgggatttggagttgctagggttcttgtctgtggtgagatacgaggcataaatttgtttgtatggctcttaccgtctgacctgcagtttaatgtctgcggcacaatgcctgtctgtgggaccatcctgggaaaacctgcttctggctgtgaggcagaaacccaaactgaagagctcaagaattggaagccagcaaggccagtcggaattgagaaaagcctccagctgtccacagagggcttcatcactctgacctacaaagggcctctctctgccaaaggtgagctcagagccatgttgttttgtagctaaaaagggccctggtggctctgtggctggccatgcaccttcctgagtgtaggatgtgca

SEQ ID NO: 47905 - DNA, 720 bp, Homo sapiens
ccacctggagctgctgtggtgactgcatggggaagggattggagctgaagcagagagtggacccctggcactcttgcgtgatccacatgtcagtgagcagagtgggccaggagcggtgtggtgacccctgcgatgaagggaggtcttcgttgcatgtgatcgtccacagagctgctctcaacagctttgccagatcgccctctggacacctggggtcccatccttagagattttggttttgtgggtctgcggttctgttttttggagggatgccctgtgttctgccgtgtgaaacacccagtatgagccacttgatcactgttgactttcctgggggaaagtgcaggtgattctgtttccttccggcctttgtcctgttgtgtcatcggttatttatgtaggtgaaatcatcatttaagttttaggaacgtatgtaaatgcaagcatttagtaatttatgttcagtgactttaaatcataattttagtaaccttaccttttccagttaacattttgtaaatattttcatgtgaaacaaatttgtttctcatttctactggatgggaaatgtcctcagtagatatccccagttcacttagcagttctctttctgccatgtgaggctgccttcagttttctgatatttatatacaaggaataaaattttgattttctttgcacataaagcatttttcctagagatatgtgtatgtgtgtgtg

SEQ ID NO: 47906 - DNA, 878 bp, Homo sapiens
aaatgaagtttctatctcttcctgaggcttgccattccttcgggagggcagagctgtctctcatcaggacgtggagctgctgggcggtttgcttccccacatcagccctgtggaacagtccattcagcagcccctgcttcagctactcccaagcgagaatgtggggccctcccggagcggagccgcaccgcctgtctctgggccccatctgtgtgtggacatgtccgtctcctaccctgcactctcgcctctgcattcctggcacccagcagcaccagccacaaagattttcagccagtgacaaaggttgggagcagcagagttcatgcaaggagtccacacaagggttcctcacttctgacagcaacagcacactgaaggggttcccaagccaacttcagatttaccctttcaccataactcacagagctccctggaagcagttacacttatagttatgatttactgcagcaaaaagatacaggttaaaatcaaccaagatgcacacagggcagagtccaggagggaattgaatgcagagttcccaccagctctcccgtggaatcagatgtgttgtgttcccagcacccacgtgtggcagtgcacatggagtatcatcagccggaggtgcttccccaagccttggtgtccagagtttttcccggggctctgacatgggcaggattggtccattgatcactcaggtactgcatggccagcccctgctccgtatcctgtcattagccaaggagcaaggccagccctctttttgggcaaggttaaattcttgccttccctcttgttgccgttgcttctgttcctggaggagctcctggcacagtgatggggtctcaggcctccaccttactgcacgatga

SEQ ID NO: 47907 - DNA, 4167 bp, Homo sapiens
cctcaaaacctatgggaaaaaaaaactaaaaaaaatacttaaatggtatcacagaactaattagccgaatacagtatctagtacctggctgtcacccaatacttgcctcataccatcacatctagaaaacaagtagatattctttttggaagagccctgagggagctactaggaggtttgcacggcctgctctcctgccctcttcttgctctgtggctgaacttcaattctcttcgggcttagaccccactgactcgctcccgggcaaagcaaacgatttgatcagatggccacgtgcattcttccttttcctgaaaccagcaccatagggtaaaagattatttctacttggttgccttccagatgtttcacacttggacagcaaactgatttcaaaccactccttttcaaagatctctgagggagacattgcacctggccactgcagcccagagcaggtctggccacggccatgagcatgctgagccatcatgcccaccgtggatgacattctggagcaggttggggagtctggctggttccagaagcaagccttcctcatcttatgcctgctgtcggctgcctttgcgcccatctgtgtgggcatcgtcttcctgggtttcacacctgaccaccactgccagagtcctggggtggctgagctgagccagcgctgtggctggagccctgcggaggagctgaactatacagtgccaggcctggggcccgcgggcgaggccttccttggccagtgcaggcgctatgaagtggactggaaccagagcgccctcagctgtgtagaccccctggctagcctggccaccaacaggagccacctgccgctgggtccctgccaggatggctgggtgtatgacacgcccggctcttccatcgtcactgaggtaaaaaagcctctgtaacatgggagttcctgggacagggagaaatataaagcaaatcctatgaagttcagttccatatcaggaaagaggtagggggctatgtttattgtgcagttcgtgggtgtctggctgtgtcccaggcacggggcattctcttctctagtttaatccaccacaaactctgggtctttgaggaggaagctgaggcaggagagaacagctagcacaagtcgggggccaggttgccaggttgcttgaatgggagttgactgggagaccaggagcctctctgcctgccccactggcttctcccagaactatcaacttgctctgggtcccgcttccccaccaatagtactgtgggccccctccttctgctcaagagtgatgacgattgacctcaatgatggtgttgaggtggcctggaattgccctggcttggaagtgagaatatttggtggaatcccagctgtgccccttattagctgagcatcactgggtaagtcactgcctctctaagcctcatttcctcatcagtcaaccagggatgatgacggctgcctcataggggtgtgagcttcagctgggatctgtgaaagcactgagcaaatccaaactgagtcacaccgtgcagtccgatggggcccatgggatagggcgatggcctcaaaagggccttgcttgagtagtttacttggttatttgagcattttgctttgagaatcctttagtaaaaagtgtcaccacatttttttcccatcatgagcccttttgaaactattgcacggtaacaagtgtggatgcttggtgggttggagaagctgtgggccaaagcccgtcaggggccttctgttagtaacgagcagtggcgtggttttggtgcaggcactgcttccctgaaataagaggtaactgggccctccctgcctctggtcctgcccacttgtctgcccccactaccctcgcccaagctctccggacttcttgggtctctgttcttcctcttttccctttcctgagtggtatcagcggtgacacatttagggctattactggaggaaagcttagggtccctcccctctgggcctgagcattgctctacctgcttgcctggagcagagcaggtgccggtgcaactggctttacgatgctgaagagacatcttgtctccaaggcatcctccaacaatggatgacaagttaggcagcccaccttccagggatctccaaccatctgacattcccactgggaatctagaagcagaccaggatgaggatgtgtttgctctctgggactgagacatactctgctttgaggagatcagatgtgatcattcctccagtcagacatccacccagtatgttcggcatactccctctattctggcactgggtgtgatgccgcaggggagatgcagaagaagattgtgaggtccctcaaggagtctgcagtcttgtggggactgagaggggaagaggatggcaagaatgagaccagtgttcgtttaatgacagcccaaggccgcctgtggtgaatgccatgagcagggcggaaagggactggtgggctctaagaaggtagagatctcagctgctgagctctgagctgatcatagacgtcttctgggaggaggtggctttgagctgagcctcagctggtatttggaccagcaaggagaggggacaggtggagtagaggggaggggaagtagatccccagaccaaggggagagcttgagcctaggctcagggcccagggagtgtttgctgcattcagggtgcaaggagcactgatatgagggtcatgatatgaggagttgtggggagaacactggtgtctaaccttggggccagaacacggagtgcttagtgtggggttgccaggtacaatacaggatgcccagttaaactcgaacatttgaacttcagataatccaactggataggatacttacttcccagatactgcatgatatttggtactgataactgagactggaaatgcaaatattgcatgaacatacttatcctaaaaaaaaaaaagttgtttatctgaaattcaaatttacctgggcattctgtatttttatttgtgaaccctggcaacgctaccttagtgcccaacaaaggagtttgggtcttatttaggcaggcaagcaaggtgaccctagctggactcgtgaatgggtgggaaggggcggtggtgggattggaggcttcaggagaggtagagagatgcatgaggaggccaagagtgagccccggtaagaagtgttggccaacatggttgtcatgggaatgaagggaagacaagatgtaagagatgccagcattgtcagggctggggagaaggaggcccagcttggcggagggctctggcttggggggtataggcaaatggagcttctgaacgctgaactgggagccttggagaggcagccatgtgggcaggtagaggggcctggtaagaggggaccttggggtgcagcagaagtggggaggctgggacagagaggggcccgagagtgctttagaacagcttgcctgtccgtggcagctgtggagggggcttccaataaccccaagatgtagagccctggggaggattgtgggaatcctggaactctgatgggcagagatggtgaagaggatatggtttgtattgtacctggcaaccccacactaagcactccatgttcttttggggtcgtggtaagttgggagggtggtgggattcatgtggagattttccaaggtgattggaagcctgggggtaggtgggagggtgatagaaactggctcgtgggtaagaattgtctcccactttaaccccaacttccttggccccagctcctcctccaaaactgaaaattattgttggggaatcaatcttagttattcatttctgcagaactaatttttaacctagcattgccttggacattggaacttgctttaggagggaaggtgagctaatctgttcgaacgccaagtttaactcccactgcaaggctaggtgctaagatcatgaggtccactcgggggggatgtgggcattttcctggcttttgactctcccaacaagaggatctcctctggtgctaagatcatgaggtccactcgggggggatgtgggcattttcctgacttttgactcttcccaacaagaggatctcctctggtgctaagatcatgaggtccactcagggagggatgtgggcattttcctggcttttgactctcccaacaagaggatctcctctggt

SEQ ID NO: 47908 - DNA, 770 bp, Homo sapiens
gaacgcacacccacatggacccacgcacacacgctttgcacattccaggggtctgcatgctcccccagctgctgtcacgagcaggaatcccctgccctgctccctaggaggatgctggctcacctcctccgcacaagggctttcccctcagcatacagtgagggccccccaactgcactctgggcctggccccttcagcgggagcagctccgctacccaggcacacttgtttgctcttctatgtgaggttttattggaacaaagagtttgtagtaagtcagtgcctggcatattgcagaccctaaatcaatatttgctgaaagttgaatgagtaaacactgtgccccagaatctgtccaggttcagtgtgtcctgtcctgcctcaaccttcaccctccctgtctccgagtttgccgctggggtcctgcacccagccacatgctgggcccgtgaacctttgcaaatagccccatgtacctggtgggtttccatggatactcagtgttgaactcagcatggaggctgggactggccgctgcagtggaagtaactgcccgctctgctacgctgttcagctcccctccccagctccgagactccccacaaggcagtgttcttgactcttctgttctgttacccccacatccagtcctctggcaagttccatcaactggcttggaaatgccttcagaacctgctgcctcccatcttgggcaccctgggttcccttgctggggttgtagtagccctgtccttggcactaattcttt

SEQ ID NO: 47909 - DNA, 2261 bp, Homo sapiens
cctcggtgctccacaaagcaggcaaaggcatcccttagagctcaacagaccttgtctctccctgtttaccctctgctggcttcctaatcactgagaataaagccagatccttttctgtggcccacaaggcctcacgcctttggcccctgaacgcccttttctactgtcctgctggttgtcatgactgagactcgaaaggtctgtccaccatgtcctggctgtgtgaccttccaaagggccttaatctctccgtgactcaatttccccctcagtaatgggagaagtgatagtacctatctcacagatgtgttgggaggattaaggagattatatgtgtaaatgacatagaagagggtacagcatccatgcaggaaatgttcaatgtcaatgtggttttttttgttattttaatacacacatgcaattcatgagctctgcccacaggtggcagcccggcacatttgttaactggcttgttgacaggaaaatcaaggttacacgttcctttctcttaaaccagtttctttatcagtaatatgactgctgtctttaactggctaaatggtacagaggcactcaggctaacctcaactccttgagttgcaggcaagcaccttgtttcttgttctcttgaccctttgtccaatcaggaataatttaggactagaaacaaaagcatcccaatgcttctttaggcgaaattttatcaaagaaggatacattccttagcaacatgcattttcatctcagttttggagctgataggcaatctgcatgctgggatgagacagtaatttcttattgacccaaatctgttctcacaatgtaaatatgactgtaaaagctttctagcttccaaatgatattttccccccgaagtgacacatgaggcaccctacattttggctcaggtgagagtgatttagctaggcctcgggtctgtgtgccatatgctgtaatgttgctacattttctcaaatatggacggagggggtgtgcagtgaatggaagagcgtaggtgaatcaatagcgcccactaaggacagcacagtaaagggccgggaatgccatggtgcggttggaaagacctggcccatgcctctgtctgttgtgccctgagtcttctgagtgccctgagtgcatactgtgtgctgggaactataattggcacttttgtacgctaattcagtgagtactcaagacaaacagatgtgggaggtactattacaatcccatttacagacgagggaactgaggcccagagaggttagttaacttcctcaaggtgacacagctcataaagcaatccgacacctggccccttacttcctggtctctcctgcccacctcctcgtaggcctgttggggtgtcagatgaggtacgcacgtgcagggcttggtgcagaaccagacatttaaatctgcagtgaacagtagccatcctcacgtgcagtctccaggagacttggaggcatatcctacaagtcagactctcacatctatcatgaaaaaaatgtatcattggggcccttctaggacactctttctcatttttactcccctcttctcatattgctctagggcattctaaacccagtgattcatgctctttctccatctgcgaggggctttttttttttttttttttcttcagtctctgactcatgcctttgacttgaaacctcctcttggctcaggttcacggactctgtgctctatcaggggctcatcctgcacatgggcgccaccagcgggaacctctacctggatttcctttactccgctctggtcgaaatcccgggggccttcatagccctcatcaccattgaccgcgtgggccgcatctaccccatggccatgtcaaatttgttggcgggggcagcctgcctcgtcatgatttttatctcacctggtaagttggtaagttgtctgctttcatcatttcccaggcaatcgaagtgtggggaaagtgttgtgactctttgataagcctctggaatgagaacaaagatgaggtgctacctttgtctacaaagtttttttagattttaaattgaggggccgtgcacagtggctcatgcctgtaatcacagtactttgagaagccaaggcaggtggatcacctgaggtcaggagttcaagaccagcctggccaacatggtgaaaccccatctctactaaaaatacaaaattagccgggcttggtggcgggcgcctgtaatcccagctacttgggaggctgcttgaacccaggaggcgga

SEQ ID NO: 47910 - DNA, 2008 bp, Homo sapiens
attgcacctatgagacccacccatgttgtcacatgagagtgtagttggtacttcaaacaaaattattgtgtaggattccactgtatgaatatgacactctgcatcccttccactgttgattgtcacttgtgttgcttccaatgtttgccacttattgggactaaaatcatccttgcacgtatctttgggcaggcacatgctttcatttcccttgggtacaggtctgtgagtacacttgctgggtcccagggaggcatatgtttagctctagcagacactgccaaacagctttccaaagtggttagaccattttatactcctcccaggaacacatgggagctccgattactccagatcctcccaacacttgatctggctcatctttttaagagtggccattttggtggatgtatactttagtctgtaattcttacaatcaaagataaaccaagctacatttaaacctaaagcagattaacttcagtcagttttaatttgagtacgtaaattgcctttcacattcattgctcttggatatgttgtaaaataaatacaagggcagatctgctcttttctcagtttttactgcgtgtgctctgcacttgctgatttagtgagtcattttggcaggctttcgtgcagggtattgtagagactgttctgtgaaatctgtatgcccaagaactaggctgtgtagatcaggctggaaagaaaaagggttggggaaagaaagctcagttttcttttccctttttttcatggagaaagaacagagaacacaggaaaaggggcagcatggatctgaaatagattttgctcactttcttcccaatctctctgtttctggaatcctgggtaagatgtgatggatgggcatacttttaaaaagttcacagcactgagtgccaagaaggagggccatcgagggctaagtccattcagttgtcacctggacagagcccaggcatcgtcccctccccagccccctcctcccagctcctgtcctcccctcgtccctctgtcttagtccttatcacattttaggacagtcattcattcaacccgcaggaaatatctccaggccttctatatggctggcaggtatctaggtcctaggatttcaaccatgagcgaagcagagagagttcctgctccatggagctgacattccagagggaaaagagaaggatgtcagtgctttctacaatgggcacgggaggcctgaagaggcctaaatgaagtgggaagagccatgtaaaaatctggggagagttttctgacacgtgcaaggcccttggggtgagaagaatgtggcattggagggactgctcgggatctagggacaagggtcaggcgagctcgtggggagcagtggagtgaggcgtggagtgagttgggaagtagccagctgtggactttatcccaagagtggtaggaaaccactggtggctttgagcaggggtggacttgacccaactccagtctgaactgggtccctctggctgctgtgatgagcggccctgggggtgcagagtggaggcatgttcagttctctgaggccagggatgctgtttacctctggtcaagcatcaccaggctaaagacctgtgaatgaggacctccctcgaggcattggagtgaactccttgccttttatcttttagaagctagatgaggtgtggtccttaacagaaggctcagcttggcttctctatcagggctgagagctccaggaggcagagagactgtgttgcacccatgagacgggtgaggggcactctcatttggaccctcacactggctgagtgagatgatacaagatttccataaatagccagtatctggggacaagggtcaagctgacatcgtgtctgtgaccccagaggcctttatagtgagctggtgtgtcacagggttacttgcatttcagtgctgggggtaacccatgcagagcagatgatggtggttattaaggatctgagcttctttccaatgaagccaaattctt

SEQ ID NO: 47911 - DNA, 600 bp, Homo sapiens
tgcctgcaaaatagtcacaataatacttaatttacagagtttctataaagatctaatcagattaagtaggtgacagtgactaatccattgcctggcacatagcaggtgttcaatagagctcagattttctccattcttcttgcaaatcgtgctatgtccccagtgatcctccaaactaagtgtgcagaagaagcacaaaaggaacatgctaaaatgctaaattccttggccttcttggtttttggtttagaatgtgaatgatgcaactcaggaatctgttttaataatctctgccaacaatgcacatgcagataggcactctgtacacttcacttggggaaattctagatttctcagtactgataagggcaaaacactattttaacagtaaatgcattttctagttgctgatgatttccttctttttgatcccaagtgttgtgttatctgatttaaagatatttcattctagtgtgttaacagccacttggttgtcttttttttcttttttttgacttggagtttccctcttgttgccctggctggagtgcaatggcactaccttggctcaccacaacctccgcctcccaggttcaagcg

SEQ ID NO: 47912 - DNA, 703 bp, Homo sapiens
tcaaatctttgtccttgggaaaaaaaccaaaaaaacaaaaaacaaagaactctcaatggtggagtgaacatagcccttcatttcagtgttggaagcaaagcccttgccctgtatcttatactttctgatgataatgatcacactgtttactggtcacaaatagtaaattgtaggctttgaatgatgtttttcaaatgtgtattaaaaatgtcctctctaatctttcttagaatcctcttggcaaaacttctgaggaaggccttaaacaaacaaaaaaaagtcaacattaaaaacagcgacactccctggtcaaacttccttatggctctgtggacatgtatgaagaaattagcacgtgtgctgttcttgcaggataaggcacagctagtgtgtacttacagcacacagcggcattggtgcgggtcacagtaaggtttgtctgaccagtcaggaagtgaatctgggagagtggcaggacccccgcaggcatgtctgctcatgctctcccaagggagggagggagcgtaattccagggagggtttaaacatggagccatggaaacaaagtgtatttcatgttgcctgatgcatcatgaaggggacattggggacccttcccttcctgccttcctcactgttgctgtgacagagccaaagtctgtcttgataaaaatggggggtggcgaagggcgtctggcagtgt

SEQ ID NO: 47913 - DNA, 1182 bp, Homo sapiens
tacaggcacgccaccatgcccagctaatttttgtatttttttagtagagatggggttttaccatgttggccaggctggtctgtaactcctgacctcaggtgatctgcccacctcagcctaacaaagtgctgggattacaggcatgagccaccgtccccagcctatttcaaatatttgttaaatcaccattgctattcctcaggacaagagcaaaaaacaccccccagagcatagctaacatggtcccagattgcagtttctgtttctggaaggttcaggtacagtgcgggagtccatttgtctacttggctacaccaccggctgaggtgtcatggggtcaatgtcactcaagttcctggcaaaccaaactcctgcaaacagtcccagattgaggatcaagttcctctggaatcactcctatcagtggcaaagcggtggacaccccacgactatctccgccattgtcaggaatttcaggagcttcattggctaagcctgcagcactcagggtgacccggctggaaggcagagtagtcgagaatcattcttttggagacaagactgaaaaggcttccctggctggtctgagcaggacgttctaagggtcgctgctccttggtggtgtgagaagcacattctctttggaactgcagtaactaagcacctagctgcaactagggctatggtgagtttgcctcgattattgttaaattgcagtttacctgacacctcacttgtgatttagtttaaaaattttaaattaccaagaaacgggggaaaaaaagtaaaattcactttaaatcccaccacttagaagaattccatggaggaaaactgaaggtcggtcaccgccccgtctcccccaccccagggagtcagtgttgacaggtggtgagtttccacccttcctctctacagacggagcttgctgactaaggaaaaaaaatcaagcttttaaagaattaaagtttgctttattcagaggtcttactgaggactacagtccaggagaagattttcagagagttcctgtcaggctgttccagaacaccattttggctcagaatttatatgcggatcatggaggctcagtgcaaaatcacatcaaacttgcttataagttacatgaaagcagaatcaatcgcatcaaggtgtgggagcaggagcacatctggttataga

SEQ ID NO: 47914 - DNA, 748 bp, Homo sapiens
gatgctgcagatgggagtgtaaattgatacactttaaaaaataattgagaattctattgtaatggtgaacattcccacatcttatgattaagtaaattctgtttctaagtgtgtgctgtatagaaatttgtatacaagccctgggacatcacaagaatgtttagaattgcattgtttgtaaagcccccaagctgaaaacaacttgaatttcaatcagtaggagagtggacatataaattgtactaaaaagaatcacatgctggtttcacagtgaaacttcctgtggcagtgtaatgagtaactagtgctctctgcaacaatgcacataaaacacggacagtgtttggcctcaggagcaggactgcagctggtggataacattctggcttctcattctcattctttaaatgagataaatggtggataacactgtggcttctcattctcattctttaaatagacaattcaggatgtgttctatctgtttctcgtggtagaattccctcactagtgaccatgatgaatgcccttcagtgagtttctctccttcccctctcactttccctgatctctcactcctggttcctggggttacttcctcaataaaccacgtttgccccataacagtgagtaaaaaggcacttcagagaagactatagtacaatgtattatttttataaatttcaaaaacatgtttatttagccagcagaaggggaagaaccactgacatatacaacaacatacatg

SEQ ID NO: 47915 - DNA, 3296 bp, Homo sapiens
caatggtatacctgttattatattctagtctcatcagttgttttaagcttttcttcctgcactttagactgaccctgctcattccaacgagtgattcctgcagttcagaagaaacaagagggatgggtaatataaaaatctggatcaatattctaattctgggctcattggaatcaggtagtgaccccatatcagcatggtttcaacaattgccaggttcatggaaagccttctaatttagtttgcttgggataattttgcttatttttctttactgttgtggaacatattgccgttttactctttgtgtaggaatacacaaagggttgtgcaggataagcttaccaaatgttttcttaaattaaactcttattaatctttcagatatcactttttgtcagaactcagagttatgaatggccctcaccatactgatgctttctgactgagctcctctctaccctgaatacaagagaccctaatacttaatcagaaatatcatcacccttaatcagaatgaaaaagttacagaagatggatctttgtctctctgcaaccattaagattaagagttctcttacaaaagggaatggggaaatctcagaggtgtttgaaccagagaaactttatcttgaagaggggctgggtaaaataaggctgagacttacagggctgcattcccagacagttaggcattctaagtcacaggatgagataggaagttggcacaagatacaggtcataaagaccttgctgatcaaacaggctgcaataaagaagctggctacaacccaccaaaaccaagatggcaatgagagtgacctctggttgtcctcactgctacactcccaccagtgccatgacagtttacaaatgccatggcaacatcaggaagttaccttatatggtctaaaaacggggaactcataaataatctacactttgtttagcatataattaagaaataaccataaaaatgggcaacaagcagccctcagggctgccctgcctatggagcagccattctttatttgtttactttcttaataaacttgctttcacatcactctgtgaactcgccctgaattccttcttgtgtgagatccaagaaccctctcttggggtctggattgggacccctttctggtaacagagacaggcttgttatgaggctgaaatgaattaatattgtcaaaggcttagaatagtgcctggcacatggtatatacagtggaagtgcctattaaataattaacctctcaaaatgtctccaagcctcccaagattcacttggttattgtattgtaagtaatgcaaacaagaaacacattcagctggcatctgaatctctgaagtgagtgaatcatgatgaatacaactgattaataaaattaccattcgtttggcattttatatttgcaaagacaggcctagttaaccagaataatccttgttgatttttccagtgctctttcagccaggattttccagtgtgttgactttcagtcttctttgattatcgttttatggctatttcaagaccacaattagcacaccattattgtgtggaaaagaaagagaaagaagttaaaatgaaaaactattaggttttctttccactagccactcatactaaaggttagtgagggaagaatatgaaattactttcaagaataaaattagaattgtctttgagtttactttaaatattgaaatgtagttataatcctttatctttcctgcaggaaggtgtcaggcaggaacaagggtcaataaagtactatttgttaaatagtacttagagaaacatgaagttgtcaaagttgtttgaaccagagtgactctgtcttggacaggggctgggtaaaatggggctgagacctactgggctgcattcccaggaggttaggcattcttagtcacaggatgataggaggtcagcaaaagacacagggtcacaaagaccttggtgataaaacaggaagtggtaaagaagctggcccaaacccaccaaaaccaagatggcgatggaagtgacctctggtcatcctcactactcattatacactaattataatgcattagcatgttaaaagacactcccaccagcaccatgacagtttacagatgccagatgccatggtgatgtccggaagtcaccctatatagtctgaaaaggggaggaaccctcagttccaggaactgcccatccctttcctggaaaactcacgaataatccactccttgtttagcatataatccagaagtaactataggttactcaactgagcagcccatgctgctgttctgcctatggagtagccattctttattcctttactttcttaataaacttgctttccttttactctatggattgacctcgaattctttcttgtgcaagatccaagaaccccctcttggggtctgggtcaggacctctttccagtaacgaagtaaccatctgctatccagaaatgtcctgctgacccattagtcacccactgtccacctaagggagtggccaagattgagtggtctctaacttcctccatggcaggaaggaggacagagggtttgatgggtacctcctcatgatgaaaagagggttctgaggacagtttccttagccagtgttgggggagaaagaaataggggtcacatatgtctcaggagtagcaccagctactctgtggccaagttatctcaggataaagagcttgtgctctgtcaactttggccatcttattgctattaaactggatcatggaggaattcattgcatctgttttgcaggtaagttccatcagtggtttggaacttttgctggcagatctagagtggtggaaaattttccccctcacaaattccgtgagaagaaggggaagaaaaggaatgagcagggtagctgtgtggggcattgggcagccttaggagtgaagtggtgggagcttcccctgataacggaaatgagtgactgaggaaaatgtcccagtcagtcgaggtttattaagtcagctttagggcatgtccctgaaaagcaatgagccacagacacatctgtggctgtttttacaaagaggctttcaggaggttggtatttatacatttccttaaagtagggaggcaggtagggagaggggcaggtaggccgtagaggaatgtttccatccttgtgagactttaactagtgcccagttaaatttacattttacatatgataaggtgaatgtttaaagagaaaatgggagtaaagaaaagaatcaattatgcaggcctctctgagtaggtggagg

SEQ ID NO: 47916 - DNA, 2272 bp, Homo sapiens
atgctaaatccctcctcagggatttctaagcagaaacacaggaagcaagctgcaaagcagggtgcggctgaacatccagctcctcttgcaaggaggagaggcaggtccctcagggtggccctgggctttgcaaaggcctgagaactggcagaggggtcaaggactggatgctggagtatgcaaaccattgtgggggtggggagcaagtatgtatatgtgttatgctcaatttcccaaaggaatgagataagaatttgaggtcagagggtgaggtaactgaaaagcgagacttcatagtttgagtttgatgtagcagggctcggggagcccttgcaagtttttgagcaagactagaactattgactctgtgtctggagggaactctgagcagctgggttcagggtgaatgagttcagggtggaggttcagcgggaggagaaactggagaaaggagataatagggctgctgctgtggcagttatggtgtaaatgtaggaaggccccagttgggatcatcactctgggagcgaagttgctctgagaggcagggcttaaaaggaacttggaatggatgtttttgtggaagtgtaatagagacagcaggaagggtcactctcagggtataatggactgaatgtttctgtccccgctgaagcgcatgcactgatgccctcacccccagtgtgcaatttggagttggggcctgtggcaggtaattaagtttagctgaggtctggagagtggggcccccagatatccttacaagaagaggaagagagactagagtgttattttttcttcaccatgtgagggcccacaagtgggatgtctgcaagtcaggaagtgggctcccatcaggaacaaatctgccagcacctggatcttagacttcccagcctccagaactatgggaaatatgtttttaagtacccggtccatggcattttgtcactgcagtctgagctggtaaaacacagagttttattggcttttggataagaaacaggcttctgggaaagagttgagatgtttaattcttaggcaagacagccatgggaagaacaagtgggtaaatccaggagaaactaaataaatgggttgtagcatgggagagagatttggtctgataatccagtatcccctttgctttatttcagataatctcacattaggggtttctaagagtttctggtatttcccatgtgtttcccttaggcagggatgactaatatattttacttgccttggtaactctgattgattggtatggtctgtctggagtgtcatgttggccttatctgtgatgaagaatactgtgattcactggggatgtctgccttgggcatgagtattgggaaatggtgacacaagtgccatgctctgctttctccaccctaaagtttcctctgagtggggagagaatagtaatagtgatattttcagtctcttcaaagggtctaccgtccaaattgtaccacagctcctagaagctaatttaaacaccaaataaataatgtggaaatgtaagatccaagtcataaaaactttaagcccaaagagaaaggacatttgatttacagacggagaggtgaagcttgtggtttttattcctgaaacatggaattgggctctttgtgaaatgggtctggagagtgaaagcaatctcagaatcagaaagatagtgtgcattaaggaaggcagacttcttagcagaataaaatactttgatttatttcctttttattccaaatggacttaccagtaatagagcaagaagaagaagttgggcagagaaactgtgaactgcaaccacctccagtgaggaagtgcgtaagccaccccagctagcaccaggagcccaactgtataggcaacttggtaaaaaatccccactgttctccgatatctccgcccaacaaattctgtaactgcagagagaatttgaatggttaatgcaattcaatacaataatgagttggctgtccagctatcaggaaactagaacaccaacctcaaaaatatagacaaattctagaatattctacgcaactctctgaatatttttaagtgttttttggtttttattttgttataactattgctgttttactaattaataaatcttatagtcccattgtagatgggatgaaaggcctgccaacataagcaaacacatttgatttataattttcatgatgcaattgtatttcagatacatgcaagattttgacctagagtagtaactcaagacctgaacaaatgaatcaaacat

SEQ ID NO: 47917 - DNA, 4254 bp, Homo sapiens
tagcatgggcttgggaacagcatcacctgggagctggttagaaatacagaattttgggcccacccagatctgctggatcagaatctgaattttagcaagatccccaggagatttatatgcaacttagcatttgggaagcagtgctttaatttcacagagcctcggtttcttcatccattgtaaattatggataatgaaatctactttaaaaggctctcgtgatcctaaatgaaatataacaaatgaggatgcccagtaaagtgactagcacacagtaatcagtggtgaacgtgttttggaagatcccatatagttgggtaagtatgactgcaacccactgggactttagttctgcttttgatgcaggacaggcaagcaccaaaattggggcttagcctgggagggttcttggctttgcccaggaaagaattcaagggcaagctggtgttgttaaatagccatttttattgaagctgcaatgtatagcagcagcacctctgttccttgtggagcagggatattccataggcagtgtgcctggaatagcagctcagaggagtctgttctgtactcatatttatttttaattatatgcaaattaatttaaattataaatttgattatatgcaacccacgtttaattatatgcaaattaaggggtggcttatgcagaaatttctaggaaaagggtggtaacttctgggttgtagagtcattgccattaaaaggggctggagattgccatgttgccatggcaatagtaaaccgacatggtgcactggtggtcatgtcttatggaaagctgctcctgcctgggacctgttttagctagtcctcagtttggtctggtgtccaagccccgcctccagagtcaagtccctcctcctagctcactttgatctagttccatcacaacacataaaagtagggtgctggctcttaagagctaatgatcagacttacagaaaatttgcaagctaattgttagcataaccattattaaaaattaaattatatacatttacaactaaattatattgaaagcaagtgtaatatgcaaaacatcactttccaatgattttactatatttggccatctgtgcttgtgaggttatttacatctactgtatctgcatggtggaaatgctgtgtaatggtgcacacttctagccaactctatgtcctgtgatgtcatttttgtaggctgaagtgaaccacagtgggtatatttacaccagagcaatcaataaacactacaaactggggctttccctcccagagaactagttgttaagcattcacaagcatgacacagtaaatatagcacttatggccacatgcagtggctcatgcctataatcccagcactttgggaggtcaaggagggcagatcacctaaggtcagtagttcgagatcaacctggccaacatggtgaaaccctgtctctactaaaaatacaaaaattagctgggcatggtggtaggcgcctgtaatcccagctactcaggaggctgaggcaggagaattgcttgaacccaggaggcagaggctgcagtgagccaagattgcaccactgcactctagcctgggcgatagagtgagactctgtctcaaaaaataaaaaaaataaaaaatatagtacttataattgctgcttgttaaaattaaaaaaaccctgggattggtgaggaattgcttttttgtctcaggtgacactcaaaatcattgatgaggaagttatgggttatacttgggtccactcttagtcttatttacaatcttttcataatgccttactgtttttttaaaaaattattcatggaagacaatgtgttttatttaaagttggcttaatctgtgaatacaatggggatccatgacattcttgtcctattgtataaaatctggaaattgtaggcattaactatacaaaaaacaaattgctttctcatttctttaggctaggcttctcactcctgcatgcaggcacagaacagaagaagggcaatgaccggccaagcttcagatggtgtaagaaaaagaagtcgaggcatggagacagcctttgggggaagaataatgagtacttaccttgacagaggggatttcaacaataggaacaaaataatgagatcatctaagaaggtggataattgaccagggcttataacacaggaatgcactgtcagtagggatttatgaccaatctcctacttgttgagtgggatgtgaataattaactaatttcttaacccactgagcaagggttaaagattgagtcacctgtttactcacagcctgtcagggagtgagtgttagcacctctacctggtggcggaggagggagtgcagagagagtgaatgcctgcagggccagagctgcccaggggtgcaaggtggactccggacctccccttgttaatgtgtctctcctgatttaatgcgtcatctttaaagaatcatcctcaattctgcagcaataaaaataaaaaccttccctttcaccttgcaagcctcccgcagaaagccccaggaagagccttgtcagggcagctgaggagacaattaataaccatgggtgatggatgaggtgcacgtggcctgtgcctccacttttatccctcttcccttctgctgccagttgggccccaggcccctgtgaagtgcatatgccttgggggtgtgatatattaagccatcattattcatccttaacacatttgcaagttttaattcagcctaaaataatataatcagagaaaatgttctacttgcatttaacattatactcacaggtttggattatatcatagatgtagttggggatggcatgggagggcaacaagcataaaatgcattgactttaccatgtatttcagttatatatttatattttacatgtaaattcataattatatatttatatctagataaaattatatgtttgtgtattatatataataatctatagttatgtatcactatctcactaggtgattgctgattaaggggaatactattacccacaatgttgaacacagtgcctggccatggaaaacactcaataaacggtgttatgaatattaaataattagccctgacggccaagttatctaaagtgcctatcaactatgaagcaaatttttggttccttttccttttgaggacttctaaaaatgtctcattggtcatcaagagagcaaagctgcatgttgtaggaaacttgcagcacagtgagtgtgggattccaaaatgctggataagtaagagacatagcaatagcttgatccatacaaacactgactactagcttgctgaagacaagactcatcagagaggcctctcgtcatctctccagggacaatgatattgcagaggtggacatttacccctcgtgttgtaggcagaccctgtttccctttctttaagttatggcttccacatatatggtcatatatggccccaggaacccaattcaggactcttgcaatcccacgggtattagggagattctacattgggcctggtgctgggggctcccagcatatgcgagacaagcagaggataggattgagctcagaggccctgaaggctgatggccaggtggatggtgatgaggccaaaaaatgaattgggaattacaaaagggatgagatcatctgttactctcccttccgacttgaagcttctgcatagcccccatggaagatttgctgtgtaatgttgaaatatctgtctatgaccccagagaatttgaaaataaagacattggtcatggttatccaagcagcagaagaaatttaagattgtaaaaacaccagcatgaaggccaggagattgtggtctgtgtgcttgggaaaggatgggattcaagcaggggcaggtgcatccaagtgttctccaaacctttgggattgtttaaattccaccacaggtgattcaacctacctgtctgctatgtagccgatactcatagagccaataaagaatcctacattcactgatgactggaataggtccaacatccaggagttggcacataccaggttaaactgccagcaggggagaagtgttccaagttgggagagaaaggaaatgaaatcctgttagaatcctgttggacataactcagctagggtactcattaaatattccttgaattgaactgtatagttaagtggcaataagccattgtttcttgatcatgccaattttcttcttcttctctctctctctctttttttttttttttt

SEQ ID NO: 47918 - DNA, 3774 bp, Homo sapiens
gggcagttgaaactgctggtgaggacatgaggccagtttgaatccaagcagcctggcttcaaactccttgttccggaggaggaaccgcaagtcctcccaaggccttggagaaaagtgagctaaaggcagaacgtgggccgataacgtgggggcgtggggggaccgcgacccagcccggggaaggcgtcccagcatggacccagcagcctgggcagcctgggcgggaagttctgatcgcgctctgccgaattggcaggcgcaataagtaagcggaaaaaccaggattcaaaccaaccaccaacacccttccctggcgttcagaccgaaggtgggtgggaaggccctggcgaaggaggtctgcatcaggcctggccttgaggcgatcccttctcaccccaaacctcctggacgctgagcaagccccttcgcctgtgtgggttgcccggctgccctctggggaaagttgggtgatcaaatcccaagttgtagctctcgatgggtcgagggcgatggccagcgctgtgctgggaacgggcagccctgccctgccctgccctgccctgccctgccctgccctgccctgccccacatgggcgcaggaggcctccgcacgcgcaagggccaagggctggagggggctctcccgggcacaggcaccggacccggggcgcgcgcgcgcgtccttagtccccgggctgcactccgggccgctgagagatcgggtcccagaagttccgggagtggtcgggtgaccctggaactttcttcttctggagcccgacctggggctgactgcagagcaggctgctggcagggaccaaaaggagctccgcgccaggccggaggctgcgcccgtcactcgcggtcccggccgggtccctggcgcgtagtcaggccgcaccgcccgagccccaccgcgcgcccaccccggccgggtgcgtccggctcgcggccgtccctcccgcgacctgtggcccggggctgctgcgggcgcccggggaagagaggcgggggccgcggggggcaggaggagcggctgcggccggcacagcgccagggcgagtgaggcgggtggcgcgggggaggcggcggagtaaagagaggccgccggctgggtccgcgggtcactccgaggcgcgggctgcgggcggcgggcggcgggcgcaccatgccctccttcgacgaggcgctgcagcgggtgggcgagttcgggcgcttccagaggcgcgtgtttttgctgctgtgcctgacgggcgtcaccttcgccttcctcttcgtcggcgtggtcttcctgggcacgcagcccgaccactactggtgccgcgggccaagtgccgcggcgctggccgagcgctgcggctggagcccggaggaggagtggaaccgcacggcgcccgcctcccgcggcccagagccccccgagcgccgcggccgctgccagcgctacctcctggaggcggccaacgacagcgcctccgccactagcgctctcagctgcgcggacccactcgccgccttccccaaccgctcggctccccttgtgccgtgccgcggcggctggcgctacgcccaggcccactccaccatcgtcagcgaggtaagggcgccccggccctttggaagccggcgggagaggacgatgctggctcccaggcggacaagccgcgtgtgagacgctggccgccaggggaggtcggtggagacggggaccggtcggctacctctggggacagacaggattcagcgcacccttggaagtgccgcgtcgtaaatgctgggaaaagcctttcgttatctgcctgagcccgtgagttaatgcacagatactttggtttcgggtgtgaacaaaaactttcttcgaagccgagttgtaaacgcctggcgcacgcctgctcaggagtcaaagacccagcaccgcgttccttatctttgaggtgtgcgggcgccgtcattggaaattatggttaggtgcgcgatagggaacttcagtctctggggtgagcgacgttggcagttccggattcgcttatggtctccagggtcaaaggaaagggcgaaccaacgtttgaaggcagcagcagcttttttccagttgcccaaatggttactcaaaatgcaaggggacaaaggtcgaggctttcccggggaatggttttggtaaaattgctttggggcaaagagcaacatctgggataagttgggaaaactgaagtattggataaattttagtttttttttctggtaataaattttaggaacatagcgggagggccacagccttccaacgcaaatccccaacccatttacaggcggaggctgctgccggcgggtgggcgggggcgatccccacattttgggcagtcagtgcatttggaagttaggggagcttccttcacccttgccctcagtaatctgtttctgcatccttgctgaaatggaagattgcctctctgtgaggtccagatatagagcagagtcactttgtaataatcggaactcagaaacggcctcaattgagcatgggttgcagagatgagcagttttactgagctttgtctacaatcacagcttaagttaattttaaaaaaagattgaatgtgatcaggtacattaggaaaaaaggtttgtcttttttttgtgataaactttaaaaaatcacctacttgaagagtggggaaaacactggatgaggaggtaggagcgccctttctgccgctgttgctgttggtctggtgagcttatctcgctgcagttgggagtgtcggtggttgcaattgtacatgttttatacgccatgtgctggtgtgttcgcacagtggatggctctatgctatgtgctccagggataaaacccatggcaggacagccaggcgatgtgtgtatgtgtttgggatctttctgtaacgccgtgtgctgctgtgttcgcacagtggatggctctatgctaagtgctccagggataaaaccccctggcaggacagccaggcaatgtgtatgtgtgttcagggtgtttctataatgccacatgcaagtgtgttcgcacactgagtggctctatgctgagtgatctcaggataaacccccctggcaagacagccaggcaatacatatgtgtgttgggatctttaatttctacttaatccatggtaaggctggggactgctttataattggtgatggtctggttagagatttcacagttgaaaggacagggcatggacttggatgagagagggcattatctctgtgagtcgcatctgttaggtggcttcttccactccactcagcagcgctgcctaatgcttacttcccaagtgaaccagaggacccacatggagggcagacagctgatttttggagacatttaaagatgaagaataaaacgagcctcaacaagtgctcaagcgaggtttgcatgagtgagtatgatccatggacatcaaagaagacagacataaaaatctgtaatttaatgctctgacggatactttggaagcattctggagttgcagggttactagcatcccggggttacaataaggtgattttatgaagatcagtggctactaaaatgcagtgtggaatgatggagggtcaggggctggctcggtctccagctggctgtgtggcttgggtgagttactcgccttctctgggcttgtatttttcctctgtaaaattagccattggattcagcccgttacaatgctccaaatgccatcagggtcaccacctggttactgtttggtgtgcccagaacaatgattaaaaagt

SEQ ID NO: 47919 - DNA, 4213 bp, Homo sapiens
actccagctgatagagtgagactctatttcaaaaaaaaaaaaagaaagaaaaacagggaaacgtttgcaaagcttccatctccaggttgacttcagtcaataatcctattgtcttaaggctggagtggacttccttgaagctctttgcccagaaaaccttgccaaaactctcctaagattattaagagttttctcgagtctcttttcctgattccaatcaactggaaatgttatgaaaataattctgtggtcaagtctcacttactcttgctctcaaacacaatccaccaaaagaacaaaacacaaagtaaaagtggatgcaagacacaagaggaagaggggccctctgcagaggctgctaagcaaacgtaggtttggctcaaagatttttgtttctttgaatcagttcactatttttaacctgtggaaatttgttcactcattctaacagtagcttttgctttgtgaaattggtttatttagtgttatgttcctcctgtaaaccttttcattgtatgtttttctcctaatctaatggtaatcctctcagtgatatgagtaacctggtgtttgtatttaacactccttcaacattcacagaatcagaaaatatcagaacaagaaagccccagccttcaagattgtttgatttgtgttccctaattttatgtgtgaacaaaactgaggctgtgaagattctagaataatatgttgagctcaaaaatatggtagtagaattagaatatagctttctaatatttgtataaaagtcaatgatatttagaagtttaaaaaagatacacattaaactgggaaaatactaaatatttaaattctgtaggctagttttcatattctggaaaggtggattttcatatggcactggtgctggtgtttcatcaggtcagctgtctatgtcataagagggtgttcttattagaaaatgtaggctttggcaagctttaaaaggtacacgtgttactgcatgttctgacgagattttgaaaatctttggcaactgtgctttccaagtggagaaaaagggctaccataatgttgaaagacggaaattaaaatctaatcagatatggtggcccttatcctccaccttagaatttcttttcgtggaatgtctggtggacagtaatatatagaggctcctcgacttaggatgggatcacatccagatacacccattgttaaattgaaaatatcataagttgaaaaatgcatttaatatacctaatctaccagacatcatagcttagcccagcctactttaaattgctcagaatgcttacactagcctgcagtcgggcaaaattatctaacacaaagcctattttgtaataaagggttaaatagctcatgtaatttattggatatagtatcagttgtttccccttgtgatcgcatcactgactgggagttgtggctcactgccacttcccagcatatatgactagcctggaaaaagatcaaaattaaaaaacaaagtacatttctactaagtgcatatcactttcacaccattattaagtcgaaaatcgccaagttgaaccatcctaagttggggaccgtctgtagatcaggcaatccttgacattttatggcggcagattgccaaaagagattggagtctagaagtcctggaagcagccccaacaattacacagaactcagcatcatgccctcacatcaaggcaaggagggagagttgtccctatttttcctttccttgaaagggatagtgaaactcattctgaggtttttaaaaaatgtactttttaatgcttttcctctatctgttttgctctcccttgataccctgtctacatcatgatggctgtggcactgctcctgctccttacatggggtcttagaatgcacaaagctgcccaatatcactttctctgtatttgaggaaaatttctagtagcaaaagaatatcctctgacactcttttcaaaatgccaactaaatgtgatagaactactttttgcaacagtgaagtcccaaagtctctttcttcctgatgggttaatttagtaccttcctttttccaaatcaaagaaccataaaagtcagtgaaaatctgcattattattatcctgtgtgtttagttttgctttttagtacttaccattattaaacacttggcccatttttggctaattgttgtgtaattccaaatacaaaccagtcaccatggattattgcagttagagtcatcagaaagcaaggagctatgactcatgctctgttcttgccatgtttttctgatttgtatttcatttcttacctgtgctcacaagtcacatgaagatcaatacatctgaaatatatatgctgactatgtcaccagattttatttctcccatcattgaatctggacaggcttctttcaaaagtgttgagtcatttttatgtctttatcacactcttctaaagtccttaaaactcctaattatttcagaggattattgtcatataaggtatacaaaatcaattatatgaagaagttgtaatcactataattaaactgaggcttatctagacagatcctgtgtcatatttttcacataatgaggctaaaaactttgtggagaaaataatggatatttatagaatatactcaagtgtatttattttagaaggtctgttagacatttcacaaaagaatctgtaatctacagaaattaccaaattatgttacataatattttaaaaacttgttttagaataagttggaatgtgaggtttataaaacaactggaataataaactgaaattataatttaatttttatacccagtgcatttatttttcttcctatgacttgactatagtttaaaattcttataggtttagtatcccttttttgaaaacaggttttcaatgtgtttctgtaacaataatgaaaagtaaaggcatgtaatctcttttccaaaataaaagattggtttgagaattatgatcatatatacaatgtactaaatgcaaccttttatgatgatgatataaaagattcacagactcacaaatcatatgccactcaactaaaatactaagagaacataactttatctttataaaacatatacataggcataaatacatagacaaaggtctagaaaaatatgcatatcagtgtggaaatgcaagtgatgataatgatttctgttgttttcttctaatttctatagagtcactatgctatttaaattttcaaaaaattaagttatgtgcaataatctttttaaaattatttgttttttaatcagctttttaatctgatgacatagaatgataacgtagtaaatcatagtttctgaaccaaaaaacagggacacatagactgagaagtgccaagttcattttagagattaaaaatacaacggcattgggacttttctagaaaattcaagatatgtggtcacaattgaggtgttcagcttctagagcgaactgaaccagatatctgctaaggctctgatagagaacagctggaagctcagaaaggtaaacataattcaaatattggtgaatatgccagtgcagccgagaaggtgacaggatttgaaaaatgtgccaggacacaatgagaaaggccttggaataaatacaaaaagcccaaactttattctgtaaaagtggggagctactgaaggttttaatcaaagcagggataatctcatttccaaggcaaaaaaacaaaaagaggcattccttcctaataccacatgtaggagctgttcttattctatggtggattattactttagtagtatcttataaagacagtgcctgaaggtcttttatctgtacattgatgtaacacttttcaaaagcatatcagcagacacatttttggaagcatgcattctgaaacttgaacttcaaataggagttatggctgatatcatggagtaaggtaaaacagaagctgactcctctccagtattcaaggctgactgttgtctctggaactgagaatactgggaaaagtgtgagttggacactgtgcacaactctaattaacactgttctaaagggaaagtatatgaatatattgtttaaacactaatagttaaaagttatactacaatatcttcaaggtttaacacataaattgagacacacacttaattaggcctaagaaagaagtggaatgtaaactcgttgattttattttcataaatgatttatttta

SEQ ID NO: 47920 - DNA, 7287 bp, Homo sapiens
ctgtggcttggaatttgtgttaatgtattggttgggtcctttcaattggaatggggagagagaggaatccataaatctgtgactcagtgacctttaggaattggaagccaaggtctatttcttatgtcttattttgttattgtgcatagcagtgtctctcaactgtttgaatccaggcccctggagatgaatgtggactgtcagtggtgtggctttttccacctgcaccttctgcagagcagggtgcaccttgagcaccttgagcacgggcaccttctgcctgtgcacctgtgcacatgaaggagcctcttggggtcttgctgcctttggggcttttgctttcgcctccagctccttatacttctgcccatatatctcactctctgttttccagcctgtcttttctgttttctgaagtctgccctttccccttcatggttaggtgaaggaaggggaaatagaaggaaatatttgaagaggaaaggttgtggcactgcagggtatttgtgactttgtccccaattgcattcttcaagtgcagttcttggtttttagggtatctctttgagtgagattatctttaagtcttttgtccttattctgagaaaatcttataaagtttccctatatcttttcatagcctggatttctcagaaaacacatggagaagcaaagcttctgctaggttgctgtgggaaggggaagtataggcccaggcgggcagagtgagggaaggggagtggggcagagtgggcaggaaagtggacacatgtgggtccccacagagccctccagatcccatgcatagagcagctgctgccaccagcagcacagacatcttccaagggctggcagagccagggcacctgctctccaagaagggcagaggtcggcaggcatgcacagcacttaccccaaggcatggtgtcattattgctgttgctttggagcctcttatgggactggaatctgtggagaggatggagagagtaatgcatctggaatggacctcctggctccttcctatttctcatcttgatggtcacactgcacacttcccaggccgcttggccacctcactgtcatgcagccaccaggacagccagatccctgctccaagcactgcaggaggagtcctcctccagcagggtacaacctggcactgcagctgctgtgactcatgcgcatggcatcaaggcagccatgcccaggcccagctcttacctctggggaagatagacagctgacaggtcaggacacagactttggtggcaactgcccgagcacccacatagcaagttgccgaggccaggggcatgcagagccaggaaaacctgggaagatgcataaacaggcccagcccaactttgctttctgtaggtttcaggttggcagaggaaagcaaataagtgaagaaagagtggtgggggaggagcattggacagagggaaggaggccaaagacaaactcttctcactgcctgtaagtgagcaggagtctgacccccggcttttctcccagagcctgcttctggctttacagttatcactgccacactcatgagcagtatttccaatactgcacagcaagaggggctcccaaggaaatacatgtagacccaatctcagcttaggcaaaaagatttctttgctacaggatttgtcagaaccttaaaatgtcaatgtattggaatgtctgcattcagaagggctatccgagacattatactaatgtatgatggtctccactcatgtttttggaggcctcatgggagtagtgtttataggcgtcaccttaggaaatgctgccctagacttttctgactgtttgccagccccatcaggctttggatctcgtatcttcagaaatgctgtcagtattttccaaggtaaaaactagtaaagaaaaccaaacaaaaatccagaaatgtgctcagttaatagttctcctagtatcttcccagaatagcatgtgcatttcacccttgtcctggagataatgtctattacctggattataatctggaaatgaattctaactccttttattatgggcatgaccttgtttctgtactcccagcctccaaccagcaagaaaatgggggtctcagtcccacagccacaaggactgggattctgtaaatgccccagatgagctgggaggcagattcctccccagagcctgcagatggagttcagcctgcccctgacaccttgcgtgggagacactaacagggagaagagctgagcctcccccagccttctgacctacagcaccatgtgatcatgaatatgtgttattctaagccactaagttggtggtaatttgttatatagcaatagaaaacagatgcattaagtttgtctacaatgcccatgcctgcagtcatattctttggcttcctagaaggtgaccagcaatacatgtcagagtgtacaattagaaaaaaaaatacaaacaatacattatgttgtggttctcaaacgtgagtgtgcatcagaatcccctggagaagtgtattcaaacacagatttctgggacccacccctagaaattttgactcagtgtgcccgaggtggatcccaagaatttgcatttctggtaagttcccagatgatgctgttgctgctagaccaggaaccacactttgagaacactgtgttaagtcatgagctctccttttgaaaataatgatttactaagttgctgtatgtttctcaatctctactttaattgcttattttatgataaaaaatatttctataaaatgctcatagaaatgcctcttattgtgagtccagtccccattaagttgcctgtctacattgtgcttctgaatttagtcatttttccctttgggactgttctatacaccaccttattcactatttttattttcttacaaataaactttacaggaatcagcttaagaagctaacagcaattatctgcaacaagaataagtatgatgaaaatagagatgttacctgattgtggttctttattagagagtaaaggaacagagaaagaattaccccaaagctgcattgtgcatcagctgctaagtcatggcctgcttgggcaggtacgagaccagtgttaggaaatgcaataatccagacaactggagctgcagggcactggctgtcagttacccccaaaccaaggagagaagccaaggggaagactcccctcttgggctcccaaagaggtgaatgtattagatagtcactggctagagcatccaatttagtcatctttccagaacactcacggtcagatgacatgatgatgaaatatctcgtatagaaggctgatcatctcacttgattaaaaagttgtgtgacctgatttttccatagaattggcccttaatcatgagccatttttttgtcttgtatttaatatcagtcttgtgccagttccttggaatatccaactgactgatccaatcaatgaacgagtgtttatggagagtctaccaagtgccaagcaggagaacatcaattctgtcagccagtccttggaataatccaacgtggccatgtgggaggccacggcaaaggatggccaagcaccttaactgacagggttctgttcttgttcacagtggggagggtaattctccaaaattcagtcctgccactgccactggagcaagtaaggggtgtcaggcaactgtcactgtgccctgatgtgcagcgtggcatgtccacttgactctgtgacacgtctctcctcctagcccactggtagagcaggtcagagattggtcccttcttgaccatttgtactcccagtgttgatgatactacacccagatggtcagagcgaggctgcaatttcagctcttaactcatgccccggcttagcactcttctctcttagtggaagggaaaccctggtagtgccaggtttatggctgcagggctgagagcaacaaaacccatccaggcagcaggacctgctggttgggctgacagccttggagactgtgttgaacctggtcagcactggctccagcagggatggggcagagtctgtatagtgaagtctaacgtggttggccttgggtgggattctgtgtgggtctcatccttttggatggaattgcattaaatcaatgcagtgactcaagatgtttagttcatgaaaaacagtagctatgcttgccaagtatttgtgcctttgattaacttacttagaactaattaatcaccacttataatgtatacttttttaaacagactcctccaaaatggggaggcatgaatttaaaatagagtagccctattcagatggctatgatccacttgttaagcactccttagcctgagtggcctaaaaatcggagcctggggcaaaagcttatatattaattcttgatcaagggctgccatcctagggaaggaagaggggggaaagcaagagcggcaggaaggagggagagcaattcagagcgaggaaccccaagccagccacaactccacagccaaggcactggcctcattccccagggagctctgcaaagtctagtggaatatctgtgtctcagaacagccatggagggggttgggctccctcttctcctgtgctccatcttttactggtcagagtctgtcctgagagacagtcccatcatggctaggttgtcgggtcctctctgcttgggaagccagtatcttgcgggtccaggctgacacctgagaggtgggaaaaagatgtacactctctccagggggctgcaactggggaatgagatgagtgagccaccagggagatgcagctgtgtggaccaggactcagcacaaagctcatccctgaattccaaggagtgagaatgcagaagagagagctatcttccttgttgttttattaatctttgttttatgtgaaactgataggagtattcatttcctagggctgatgaaacaatataccagaaactgggtggtttcagaaaatagaaattgattcgctcctggttctggaggccagaagtccaaagtcaagatgtgcacagaaccatgctgtctcttgggctctaggagagggtctgttccatgcccctctcctggctccagcactgctgccagtccttggcactctttggctggtagatgcatcaccccaatctctgtctctggcttcatatggccttttttctggtatgtggctgtgtctctgttttctcttcttcaaaggatacctgtcattggactagggcccgctctgatacagcatgatttcatcttaactcattacatctacaaagaccctatttccaaaggtcaacttctgaggtttcaggtagacataaaatgtagggtgttgagggaggggggaagccagtcctataaaatacgctgaaattaactatcttccagcaggtaaatagttgataacctctatatcaactgcatattagactaaatcctatttaattggactggagttgggctcaggcattttttcatttacctcaagtaattctatatatatatattttattatcatcagcattatatcactgattataatgcaattggtaacatttattggacagttactgtgtctcaggcactgggctgagtactttatgtatattataccaatgactcatcattccagttcttcatcttacagataggaacacaagagtcaacaatgttggaaaatcgccagaggacacagacctgggagcggccaagtcaagacatccaggctgtctggctccagaactaggactcgtctttgccaagagaacccagaacatatttagaacctttcatcttcttctcgtctttagacagtctcagttatttagagaaattgtaaacattttaagatgcgtaactgcaagccttcactacaaagaaataaaacagcctggagagagaggggctgacgtatcatatgtatcttgtacaacctgaggatgagtcaccaagggcagaagttaataaatgacaggaattattattcaaacagatttaatactttcatgtctcccaatttcacaagtttagaaaaaaagtgatgcatttagaagacatctctccctcctatttcgaagcttagctgcctaacctacagtaaagcctgatagttatgaaccttggagaacagcttctatgacaagtgaggatctaagagcctatatctcataatgatgcctctctgcattaaactaaatcaccccattctgggcaatcattgcagatcccctggtttcctgtcttggccctggacccacactcccttccccatcaaaggtgggatggggagaagcagctgcccagcttaaaacagtgtacttcccagtcatgtgccaggcagaaccttgttggcacccacgtttctgtctctgtggctggacctgctcctcatcttgtcttcagtgcccttctttttcctttgatttctacctaaatccagctcattgtgggaccttctctggtccaaccttcttcaagtctccagctgctcttacctccatgggccatttctttgtttgaaattatcttacatttagtcgattccattctgtttagatctcagctgctctacatttgcttcacagaaattgaccttggctcccaaactatataacaagtacctcccagggacagaaacaaggtgtgtatatgcctggtattcctcccagccttctcggcataatgccaagcaaacaaaattggagtgatctccaacatacctgataattactctttatacctgtagtataagaagtgttaactttttgacattaaatgaaggtgcccaaatagtgccatcagatcatgttaaaattttttcatggtgacccaaattaataatgacatcctttttcctcatggaaacccaaaccaaattattatttatgattactataatttttagccattattaggctctgttatggtactgtgtggttgattaaaaatggaagttgcccatggaggtctacatgtcattgttttggccagtgcaaaatgtagccaggagcacaccacacctgacagtatcagtgattattattattattattattatttttaatactgatgaagagtttagtgactcctgatttcaagctaagagctgattaggaaaggttccattgacaactcatccctagaaaattaaaacagaagcacatagatattgcaatttgacttcagagacttccctttctcctagaacaatgcacaccgcaaatgagggctatttccgatggcttataactaaagtaaaatactgtgatatcgtctaatcttagaatct

SEQ ID NO: 47921 - DNA, 2412 bp, Homo sapiens
caaaaaccactaaaggagtttttttctattattttgtattcataaatgcaactgcccagtggcaggcatggtgagtgtgtatattcaagacatcatgctttctatttaaatattcttcttccttaagattattgatgctagctattgtattcatgtttaactctatttttaattccaattctaactatgaaaatacttgcagtaatttaatattcctctctatcccccttagcaggagtaataggaatatagactggaaattgctgactcatggctgtatctggcctaatattgttctggttaatccatctctgactcatggccatatctggcctaatattgttctggttaatcgagcccagcccatggtgggttcttgtgactgtaccattcagtgggtgatactaagtttacctttagagaactgcaaacagcaattaattagctaatagaacaacaaaaggccccatatcctgtagccaattgaagatctgagtttaatcagaccagtgcttcaaaatgggtagagccttgggtttcattttctgtcactttttctttctctttcatgtttctctctcgccctctccacagctgtcctttgcatgtgagtttctgctggatcctttcatgtgtgatgccctttcccctttttcttctttttatcgatgtccttttctcctgttctacttctagccctttcaagcttcatctttcctttcctaatttcccccacatgccactctttttttgctggctacaatttggaactgtgcagtttaaatatttatttattttgttttgtttttactctttctaatttggatattaggttttgcttcatctgtgttttttttctcttactcagtcaataaccatatctccaaactaaattaacgttactaaagtggggaatttccccttcctatattctcataagtgattgagcatctgtcctcatataggacttgctgccttggaggggaggggccagacctgggaaaaagaggagccatgaataactctgcttcctacatttggcttcttctcttcctccatatccatgatttatatatgtgaaggaagaacaagaaataacttaataggccatttgtcaatgagagtacagtgtaggaagggtggaaagtgaatataaaatctagattggggcttctggtttcctgttcagcctataaggagcttagaatttgccactcagtcttgacaacaagtaaaatgctgaacaaactgaaaaatcaataattcttctcagatccataagagaagtgagattacagggcaaactactaccttcagcatcaccccgcacccccaaccccactaaatagaaagacaggagaatacagagaatcataacacaggcgcagaaacctccttgagagagccagggtagataaacatgaactgtaattgatgaattcctggaggatcactgtggatgacctgaaggattaaaaactctagagggactcactcaaaggagggcccaagcttttgtgattttttttttttttttttttttttttgccacctgaagctctacaaggttccaaaggtgaatattaaggaaaatccctcatgctctggcagccagaggggaaaaggaacaattttgaaatatgccagaatatcgttcttaacaatgtctgccctcaggagaagatgtttaaccagagcctaatcttctggggttttctgagagcctcattgatctgggggaagggaaataccaactccagccccttctagccttccaagtggagaaagagaaacaccaaattctagcctcctctagctttcaacttggaagaagggaaatacccagctccagccccctctagcctttctcccctagttcagaggagagggatagagaagcatttgtgaagttcaccgtttagagacataggttcactaaaagactgagagctactcatagaaccacagaatgccttccctcccccaacacctcaccaccacattactaaaggtctatttatagcagttccgtttacccagtacaccatgtccacctatcaagaaaaaattacaagacatactaaaagccaaaacacacacacacacacacacacacagttgaagagacagagtaagcatcagaactaaattcagatatggcagggatgttggaatgatcaggctaagaatgtaaaacaactatgccaagaagtctgatgcataaagtagcatgcaagaacagttgggctatgtaagtagagagatggaaattctaaaaaaagaaaccaaatgaaatgctagagatcaaaaacactgtaacagaaatgaaaaacgttgttactgggcttattaggagattgggcatagctgaggaaagaatctctggccttgaggatatcccagtagaaacct

SEQ ID NO: 47922 - DNA, 672 bp, Homo sapiens
gtaccttcactggagcacttggaaaacagaagaaatcaaagggcagtcaggactctcccagcaggcagggaccaggtcagagtcaggatgaagacaaagcaccctgagcaagaagcaatggaagagatgcttgtgacccgagctgatggggaaggttgagggcaacgcagagaccccactgccgacttgccaagaaaacgtgcaggaaatgagggaaggctccattttcctgagaaaagggatggaggaacataggcagcatcaagctccagctactggctctttgagaatgtagtcgggacttgccccagtcacccttgccctgagaactcagtgactggggctaatgtcaccctggctgtccttgacctgtgcagaaagcactgccaaccctggacagtgggggaagggccttatgtgcccaggccccagcaggagacacctaccaggaatctagtgggacaaggtttcagggatcctggaatcctgcccacacccaacagctggaacagttccctcagctggcgagtggacaggtggtctgatgagctcatatgttattgatgatgatgttaaagaccatgttcccatagaaataattcccaaagcattcagaagactgagaagaagtgatgataagaattgttctgggcaggagtgtgtagttttgat

SEQ ID NO: 47923 - DNA, 643 bp, Homo sapiens
tgagatacacagtggtaaggaagaaagtaacaatgagtacagctaatgaaacccaggaagacaagtcaattctctttgaggggtgaggtgggggccacaggcagatggagtggattaaagaatgactagtagagtggcagcagaagacaagcctggctctgaaggcagcaagtcctccagggaatatggggtcaggggaggttctgaaagatgacacactgcagagagcgtgtgtttgtatgctgatgacaagtatcagtagaaaggcagatgaacggattctcattctcagaaagacctgtcctgacctcctgagagtacacagagcatgagggcaggacagggaggaggacgcactctcattgattcatgcaaagtcctcggccaaagtttacctgctctccacctctgtgactttgtcctttctcaatttaagatgctccaagctggaaaaatggattattgaccagtagttggctgatgcaattctaaagctaatacaccaaaaagcacttgagagatgtatcagaagatcatagagaaatagatactttaagctaatatccatgtcttcaccctgcactgtcttcttatttgaactcccttttccgggaagagttgtgcttgggtaaattctatagct

SEQ ID NO: 47924 - DNA, 1302 bp, Homo sapiens
gcctagggtagggtaatgccagcgacggcaggaaatagctctgacgcacttaagagttaaatacaacctacagaagttctggctgggtggggaaaacctattgctaaagagaagagctactttttttcttttctggaatttgcaaacagcatttattctcagccttaccttccacaagctccacctggaacattgctgggcagcgtggaaacagaagcaaacatcagccaggccggcagggggcagcagaccccacattttgccctcgcctcccgtgggagggagtgcccggctcccaaaatcctgtggcgggttttgtcccaagcgacttcagccagcagatagttcgtgtccttctgaggccgcaaaatttggggtggaagaagtggggcgtgaggctgagagtgaggagagcaatccagggtcgccagggtgggagccgcagcgggccctaggcctccgggaggacactgatgcttccggaccgcgcgaggcgcgccggcaatgccggcaatggacgtgcgacagcggcacgaggcggggcaccgggaggggatgcggggggaggggggactcgggcatggcgggcttcaggttccgagccctatccctgcggggaggcggctgaggcccagcgagaattcgagcgcggtgcgggcgggccggcagtgctggggggacccggcgcaccctctgcagctgctggcccgggtgctaagcccctcactgccaggagcctgcggcgcctgctggctgctttgagtgcggggcccgctgagtccgcgcacacccggaactcgcgctggcccgcgagcgccgctcgcagcaccggctcccgcccgcgcctctcgctccacacctccccgcaagcagagggagccggcttccgcctcggccagcccagagaggggcccgccacagcgcagtggtgggctgaagggctcttagagcatggccagagtggacgccaaggccgaggaggcgcccagagtgagcgagggctgctagcactttgtcacctctcaatttgacgttgtaagcttccttccacagagtgacctttttcatgcaatcgatgtgctcctgtgtcagctatgcaaaataatttttgtttactgaatctggtttaaaaggcaagaagttgcttcccattgggcactttgatcctggtgaaacgggatgtgtatgcctggaaacatggacagtcacatgcactgcttggttttgtgtggaactaacatgagatgatcttttcactgattttcagaattgtggagaattcacttaggaaaataagcatgt

SEQ ID NO: 47925 - DNA, 2129 bp, Homo sapiens
gagagaaagaaagaaagaagaaagaaagaaagaagagaaagaaagaagaaaggaaggaagaaagaagagaaagaaaggaaggaagaaagaaaggaaagaaagaaagaaagaaagaaagaaagaaagaaagaaagaaagaaagaaagaaagaaagaaaggaaggaagaaagaagaaagaaagagtcataaatacaaggaaaggtcaacctcaccaggaggtgaggtggagttcacccttctgtcgcacctgaagtggaaactgcagccaggtcacaacttcctaggtgacgcacgtccgtgcaggctggactgcattgctggcctgacatttgcacctgccagctccttgccacacccacgttccaccttcctcaagcccaggctctgctacctgggaactgccattccaggccagctcgtttcatcaccatgaacatctctgaatagccccaagaggacagtatcatttccaaatgaaaacagcaagaacttaattaacctattaattaatctattaaggactcatacaaagcatccctctgacaccataagggatttatgcaagtttatctgtgtcctcaatgccaatgtgcagattgtttttatggctgtttcagtgtattagggcatatcagcgaggagacttgtactaattaacctggaggtggcccttctttctttagttgcccttttccacatattagcctttgttcatcagtccctggggccatgtgatgagacgcttatcagctctcatgtctggtaaagagatagctggctcagttagcacagtggttaaaatgtaatccactaggggacactttctttttctttctctttttttttttttttggagatgggctggctttgtcacccaggctgtctttgtcacccatgctggagtgtttgtcacccaggctgtctttgtcacccatgctggagtgtttgtcacccaggctgtctttgtcacccatgctggagtgcagtggcacaaacacagctcactgcagccttaacctcctgggctcaagtgatcctcccacttcagactccagaatagctgggaccacaggcacatgccaccatacccagctgtgtgtgtgtgtgtgtgtgtgtgtgtgtgtgtgtgtgtgtgtgtgtgtgtgtgtttattttctgtagagacagtgttttgccatgtaatccaggctggtcttgaactcccaggcttgaggtatcctcccacctcagccttccaaagtgctgggatcccaggtgtgaggcactttgcctggcactagaggacactttttaagtgagccctgactaatttgaggctcagtgaagtgatatatttttaattgagttgtgcttgaaaaagtctagatacctattcatctttgaaaaaaataattttcattggccatctcctcatcagacgtgttacatgcttaagacaaatattagcagagaagaagatactcagtcccagataacttagtagcctgcactgaggcggcaccaggactcaccagaggagaaaccagggtccttctgccctaagttccagacccaccatgaataaaacagagatgcacccaatcatccttcccatctctcacattcactgatctctcagctcattcagaaaaaaatcccatctcacactatgtggaggagaccagtcatgcagaaaacatttaaatcttttcagaaaagcaaatgagtgcacacacaaaaatgatgaaatctgagcaaggtctcaggactagtttctgacattgtgccaatggcaacttcctggttttaatcatgaactatagttacataagatattgcctggggaaggtggggcaacaggtacagggacctctcagtactatatttataactccttgtgtttataattatttcaaaacaaaaattatgtatttggatgtatgtgtatatgtatgtatttgcatttatatgtgcctatatttagatacatgtgcctatttttggaggacctaggatgatgtaactgcttccatactagttaagagaattcccaatgtccagggagagtccacagtaaaagaacttctaactcagggtgtggaactcagccttcggctgattctcgtgagctcagaggacacatgggtggg

SEQ ID NO: 47926 - DNA, 2292 bp, Homo sapiens
gctaatttcacaactggtctttaaatataacatacctataatcaatttaatgtttttctttgttaccagagttgttcaaaacgtgcgtttcacctatcaaagctcaactaaatgaggtttaagaaatctgcacatttgaatgtacttaattttaaaagattctggttttggattaactctggatttcaccctatgggaaattttgtaaatatttccaacttaaaaaaaaactgtgaagccccagcgctaagagtaaacgatgcattggaatttcaacaggatttctgtaactctgaaataatctttagcatttcttcttccccccatcccctcagtgtaggagcattccagtccaagtttctgggagatcgctatcgaatcttatgacactggggtgagaagttttgccgggttgaaatgagggggtcactttaataatctggaattccggagactttatgtcaagtcttaaaaattcgagcctgtggaaggctgcgctgtcaagagaccggagttgcgagcgtctgggtgacgtccgtcctcctggaaggtgggatccgggtggcaggtccctgggcggcgactccggccgggctcatagcgtcgcgcccgccccgctcatcggccctacccagcgtccctcccagaccgacgaccgcctgggaagcctcgagctcccagcccgctgcacagcccggctccgctccacagtcccccactgccaccggccggggcgacaccgggcgagctggcgagacccggctccaggaccgaatcgcgccgacacttgacggcgctccccgcccctccctgccgccgtctccgcccccgtccggtcgcattccggcgcccgccgccgccgccgccaccgccgccgatctgggaggcttgtccctcgccgcccaccgtagccccggcgctcggccggtcgccgtttccaagatggccgcggcgcgcacggctcctgcggcggggtagaggcggaggcggagtcgagtcactcccgcacttcggggctccggtgccccgcgccaggctgcagcttactgcccgccgcggccatgcggggctccgtgcacggatgagagaagccgctgccgcgctggtccctcctcccgcctttgccgtcacgcctgccgccgccatggaggagccgccgccaccgccgccgccgccaccaccgccaccggaacccgagaccgagtcagaacccgagtgctgcttggcggcgaggtgagtgtggcggccgcagtcggtcgctcgcagaaagcggggcgggtcctggcccgaactcggtcgggcccgagggcctctgcttcccgccaggtggggagggaagcatccagtctctgcaggctggggcgggaggggcgcggtgcatccctgggtcccaggggaccgcgtctgagtctgtccggcgactcctcccggggttgcagctccgcagggttccgctcgagcgtgttgccggctccccttcccttgtagactcccccagctcaccctcaacgttgcgggggctgggagcagagtgcggctgcctcccctgccgctagcttcggaagagtggcctcactgaagtgcctctcatcattactgaacgaaagtggtccctcccctctgccctcattcgagtaaaagagacattcggaaatcgagtgcgtactggctatttccccgcgttctcctcctcctctccttttgcccgctccagagaatgcctgtcatctcttccgtgagaaattgcacttagactatgcagacagatacgttgctttcctgttctgagggccccttactgtcctttagtgctagtattgtgcagattgttgctcacacgtgcacaaaagtaaggattcatttgtctaaaactttgctactgcaggaagctctaaggtggaacttcggtaaccaaagcatttgttgctttttcttccatactctattaacttatttttatgtctttattttttttttaattgagagaacaaactcaccataactgagaatttccctctttttacgtgcctatgtttgtatgttcaaatgtcctcttactccctgtcctttgcatcccagagtaaacttgcaaactgctgccccctgtcccctgtaatgaaaatacctcggcagctcctcttggcatcttatggtcttgctctatggttctaggaataaggcagtaaagtgtcctctttttcctgcttaaagaaaattcacacctgtaactgtagttagaactgaacacaggagccatattcttgcttgtcatcattcagttggcccaaacaa

SEQ ID NO: 47927 - DNA, 534 bp, Homo sapiens
cacgctgccatggataactaatccacatggcttctttaaggatctgaagacaaatatcccagttggcccggcagataaatattgataatataataatagctgctgctcatggtgtgcttgccagggcctggcgctacccagacactgaacgatcatgctcttatgcaaccagccgggacctgctaagggaaaaagataagcaaatggggacgtgaagcctcaggaacctgacctgcgcttgcacaccacggtttgttgggcaccttagtgacctgtgccccagctgactgcgtgtcactctcatctccagggaggcaaggttcagcgtgtgactccaagatcaaccaaagccttcagagccctggcacatgccaggaagcactggctcccaggagaaccagagcctctggggacaggcactgcaatgagcagtggcctcatgggatcttgagtacatttaaaaggttgaaagcctctttgttaaaaagacaattccattactttccccaaaaagaccaattttacatttaaaaa

SEQ ID NO: 47928 - DNA, 592 bp, Homo sapiens
attcagtatcatttctttctgtaatatattcatctttaaaaataaaacaaaaaaagaccacaagtttggcgcggaaaaacaccaagggtaacgtagcatgtgtgtttctgggaggaaggagaggggagggttaaagagttcctgggaagaagcccaacttcttggctgaaatttactgaaagcctttgcccggcatgatcttgctctcttgtgctcatgacaaagaaatgtaacctttggccaattgcatttttgttccactggtaactaggttaatgtgaacagacagatctggtgagacagcatgggaagaaataacacatgggcttttgtgcagctggatataatgaaggtaaattgggtggaattcaaagatttgccagaaaaaagagagatgatttcactctaaaatcattttgcaagataatattttacaaggaaccttttggacatgcattataagcggttacattcccattgtcctaaaaaactccctgcatagttgtactctatttttatcaagccatgctctgacgcctcctgcctggttggcgataatccctaatgcaaagggatcgtgtgaaggtaagtg

SEQ ID NO: 47929 - DNA, 512 bp, Homo sapiens
gtcaactctaaagaattgcttaaaagcacctcttcaggtagtagagcttatcttgagatgaaactaaaaaatagactcatttgccttttatccttaaaaaaaaaaaaaaaaacttacaggttggtaaaaagttaagttctttggattggccccaattctgtttaggatacagtttttctgcttcccttacttgagagcaaatagctgttgacctagaggcaaaatttgggcgtgctcccagaggggaggtggcccaatccaaggtgactgatcccaagtgtgactggggcaaaggtcttgatcccaggtttcctgtcaaaatagctagaggtagagttggctttccatacagtcttaaacttttttctcttgtgcttgcttttatttttctatccccttattgggccagggtattttttttcagtccaaggacaaacaatgcctcccaccatcacagataataattacaaaactttacctttgcacagagccttgcagtctgcagtgatatt

SEQ ID NO: 47930 - DNA, 1371 bp, Homo sapiens
ttttttcttcctgacaaatccataagtgaataaatattttaagtcagtattggccaggtgtggtggctcatacttgtaatcccagcacttggggaggccgaggcgggtggatcacttgagatcaggaggttgagaccggcctgaccaacatggtgaaaacccgtctctactaaaagtacaaaagtagacaggcatggtggcacatgcctgtaatcccagctactagggaggctgaggcaggagaattgcttgaacccaggaggcagaggttgcagtgagccgagatcacaccactgcactccagcctgggcaacaagtgtgaaactcttgtctcaaaaaaaaaaaaaaaagtattaaaaattctgtccacggaattgatttaatagatgaatcaataagtctggtatgaccatcatagagcaagcagataaggctctaggtacaacaaatatataattgtattagtcatcgaaaaggaatgcaatatatttcactagtcagagaaatagcaatgtggaatagaaagaaaatatgtaaaaactgatggacttttatttgaaatttggttgaacattaactgtggttctccctaaatatcatatacattttctttcacttcattggtgatgagccattaatatcataaataatacatactggtagaatgagtaaaaaaaagttcagtagaaccaattaacaaacaatgtaaaacatgtagatttagaatacctgtcatttactcaggtctacctttttgcccaaatttcataattctcctatcttggtcaacatctacaaggacaagatgaataaatctctctctgtgtgtagaacatcgtctgtttggtttcctccaagtagaaagccaggaatgattcttccttcacatttcctatcaatcataattctatcagccagctgaatagcttggtacactcagcgcctatcaaatattaaagccttcccattcttgaaattcacataatagcttggtttgttatcttgcactaaatctgtactacattacacatttatgattacctgtaaatttcacactgatatttaagttgtaaaatatgttgatgcctttaaaagtgtgtgagaacataaaattacacaatcataaagtaagttaaaaattacggcagcataaatactaaagtccaaattcttgtcttacataatccaagtgataattgttgtgctcttactctgtggctgaggacactgtgacaagcatggagaattcagctgtgagccagattacacgatccctgccttctgggagatgataccaaataaactcaccaatgaataagtatcgcaaattattacgtggggtataaagaaaacaaagaggaagctgtgacc

SEQ ID NO: 47931 - DNA, 3617 bp, Homo sapiens
cactcaaatgacctcctgcttcacccgtaaaggaaaatcatcatcagtgtagcctgtagctataggatggtgaagttcactaacttgccagccagtcactgtgttgaaatttggtagaacgtcatcctctgagccactcctaaatcttagtgggaacacaagtagcacaggataggctgacaactgaagtgaaagcagatagaaggaacttttcaacctctcttgtagaacaacatttcaattaccagagaaagtggattctctgggatgctacaaggcagatgtcagcctcaattggttaaatctgagaaacattgactgaatttctcaaaaacaacagggaatcctgcatctaattccaattcatgtttaaaaagcccagaaaattaagttacatacaataaggcaagtaatacattattaccattttgttgccactcaggattcaaacaaaagagactccaataaaccccctgttgtcaaatgcagaagatgaaattggcagagtgtcaacttctacagaaggcctcacttctcttccttgttctagctatttcctgcttgtcttttaaaattcctattacgtcttatggttttgaaaaatattttcctgacccctcagtgtgtccccactttcagccaccttacttacagtctgattcagaggttccattgttttgccctggtatgcaaaatggatgtctatcatttctcacattgcatgcaaacaaatattagtttacttttttctctcatattagaaatctgttaagggaagggggaaatacatatgtgtgtgtatatatacttatatttgtacacgtgcacatacatataagtaaatttgcttaattacctaggtgctgaaccagaatttcataaattatttgtggggatataatataagtacatgaggtaattcctacatgaaatggagtaactaacataggtcagcattaagttgccattaaaaagttccaaagtatgcattactcatgtttggataccatgtaacctgtaatgagatctgaattctggaaatacaggcaatgattacaggagtctaagaataaagaagccagcataagcctaaaaaataaagagaaggttttggagaagttggagttttgtttttaattttcatacatcttggattttatagcaaactcaattaactaattaaaaattagactcaattaactcataaaaaatgcatgttcttatgctgtgatcatatttcacaattgcagtttaaacaaaaccatgactcactatgctgacgttatgtcctggtgctgccacctatggacaccaggtcacagctccctccaggctggcaggcatcttgcagcatggctggaggatcctcccatgtggcctccctgttcctgatctcagcagcttgtttcccacaccttcaagtgtacatttcctcaggtcactccatagcatacaatcctccactgagtgaatccccatcacacatataaagtagattctgcagttgggggccagtgccggggctcatgcctataatcccagcactttgggaggctaagtggggcagatcacctgaggtcaggagtttgagaccagcctggccaacacagtgaaaccctgtctctactaaaaatacaaaaattaactgggcatggtggcacacgcctgtagtcccagctaccagggaggctgaggtggaaaaattgcttgaacccgggaggtggaggctgcagtgagctctgatcacaccctgcctcaataaataaataaataaaataaagtagattcctcctcctcttctttttatttgcaaaatattgcaaactcataaaaagttattaaaattgtacaaaaaactgttcttcacctaggttaaccacttgttatcaattttgtgagatttcctctttctgtctctacttacatataatgaatataacatagttattactatatgtataactgtattgttattgttgctatgtagcgtctgagttcttagagagtaatttgcaaacatcacgatcctttaccccctaattgtttagtgcctcctaaggaggaggacactgttaggtaactgcagtacaatcacgaagttcagctggtgcagattctgaatggaacttgcgagacccttcagaacgtggcccacctggcttcctctttccctgtctgcctggtactctttgtactttgcctaggaaagaaacggccattccttgctatcctccattgctttgtacacacagcccctgcctttcaagcatttttcccattctctttcctcagctgagttcactattgtttctgtgtctggacttgaatccaggctctggcgcttcgtagttatgggacaatggggaagttacttaacctctctggggctcagattcctcgtctgtgaaatgggattagaaaaagaaactgtctcctgggatttattgtggggttaaagtcagatattttaggtcaagagctaaagaatacctaggaaaaagtaagcattcaaaatctacttactgcccctatcacactaccatcatcaccaatcacttctcgggcctcatctttaacctcacacactccaggaaggcctcactgatcctcaaatatgaatccaatggcccagactgtgtgcttaggtaccctgcattaaaatgacctactataatttactggaagtattttctatttgtttcctcctagtttgcgtttaatgtcttttccacagtgactaagtctgacttggtcaattttgaaaggctagtattcagcatagtgcctgacacacagcaagattttaataactactcactgaatctataaatgaatttcagtaattcagaattcagaatgaatttcagagtctaatggccgaaataattttcccaaactcggctgacaattgatttttcaggggaagtccagataggttaagagcagaaaaggtgactcattcttcaggggctcaacacccattccccactgcccagggaaagtgtttgcatgccatgtgaaacttcaagcaagctagtttttaagctgttaaaaaaaatgagggaattaattgttctgagcagtttctcaccatctccacagcattaaattcaacattcgatttgcttttcaaacacagttaacaggcaggaagatgagataatctatttcagtgaaaatgtaaactgtggaagtaccctgtgagtaaactaggggagagagtccctccacaaacaagaaccacggctgcccgtggggaggctgggaacatgcccagaattcacctggcatcactgttgaggtcaaatgttaagacttgctgggaaaaaaatattgttgttgttgttttttggtgaatccagaggaaggaaacatattaaaattctaatgaatgactaaagtgaaaatgctttacaggcttatgaatgaaaattttcccaaatttttccttatataaagattatgcatacaaatttaaataccacaaaatccaaatataaaacaatttatgatgggctaatataaaattacactttttcaatatgatagaattgcatctttgactttatagaaatgttgtttaaaaatgtctttagaggtcaggtgcggtggttcag

SEQ ID NO: 47932 - DNA, 1303 bp, Homo sapiens
cacatcttgcccctttgtttgttttaatgtctgtttctctgtaggttgtgatttgttctacctttacggacactacaaatcagatttctctcttttttagacaattaggaaaactttagagtcaaatttgtggaccagctcttgcaattttacataaatcataatacacacttcgtttaccaaaattacccttggcttcatattactttcctttgatccctttcctcatctaatttaatttttcctggttttcatctgcatgtatccctgcaaggttgtcacatcattctgaaacgagtcaggggataattaggtaattgtcgggccttgtgatgtaacctgactgacagctctaacaggagccgtgctccctgggatggtaggtcatctcgcctccagggacaaggtgatctctggccagatgcctgtgccaagctctggctctcatactgtggctggtggcaattcccagtgaaccacactgtgcttgaggcaccgaaaagtccctgcgtttaaaagaaatccatttcgctgtggttaaccattaactaaatgggacaacattgcttctcttctctggaagttttttctgactgactcatgacacatgcaatggtcaataacacacctacgtggcaacagccaagaaggagcactaataggccgggcatggtggctcatgcctggaatcccagcactttgggtggctgaggaggatggatcacctaaggtcaggagttcaagaccaccctggccaacatggtgaaaccttgtctttaataaaacacaaaaattagctgggcatggtggcgggtgcctgtaatctcagctacttgggaggctgagggaggagaatcgcttgagccagggaggcagagattgcagtgggccgagatcacaccactgcactccagcctgggcgacagagtgagactctgcctcaacaagaaaaaaaaaaaaaaaaaaaagaagtagcaccaataattaaatgcaggaattagggcccagttatattttgcttcacagagtaagacttcttacctcaaagtctagaattcagtgagacttttctgtgcatatcacagatgtttattttttcatatttaaatttttactgccctaatagcaactaaaatatttatggaacaattcccgtaattgccacatcaggtactatgttatctgacaaattcgtgttctacagagacattatagaaaactcattcacacattcttcttgatttcaaaccataacacaatggtgtaagtagtaaaactgaatggaattcttttgaatctggga

SEQ ID NO: 47933 - DNA, 1770 bp, Homo sapiens
gtacgttggcttgaaaaggacttagccttgcaggctcaggaaagagaatggtgtttccctatcaggaactctaaagcagcaagtgaagaggggtggatggatgtggaatgagatgtggacttgtcactctgccaccaggacgaatatacaaaatctggagtccgttacacttgacattttcacacacagaagccatgcatttttcaaggtactatagcttttaataaaagctctttgtgctttgaagagggtgttggataacagtacatatacatacttgttttaaaaaaagaagaaaattaattgaggccagcatacatttttccatgccatttccaactttaacaccgttgaaattcctttaaattcagcttgaggttcccatggaatcacctctggccacgggccgtcaggtacaatcttgggattaagagctctctgtgaagacctggtgaccttgaccattcagggcatttcagattattctaaggcatatttttaaaagtagggttttttcctacatgactagttttgttaaacttgtaatttctttttaacataaatttcatactgaaacaagttaaactgttttttactgaaagtcagcttttgacagaagcgtacccctccctggagaaacagttcttcagaacctatgaatatgtaacaccaatgacttctagcacttttaattttacaaattcccttctaacggctttaattgtaattcctggcataaaagaggcaacaggataatactttgttgaaatgtttaattgaagtataatacatgtatgtcttttatgaaacaacctcaaacttagcattgcaagcacagtacaaataactatttttaaatcaacaaaaatgatatctatttattgtatataatgttgttttgaaatatgtatgtgttgtggaacagctaaattgagacaatatgtgcattacctcatatacttattttttgtggtgacaacaccgaatatctagtcattagtgattttcaagaatgtaatacattgttattaactacagtcaccatattgtgcaatactgtgcaatacatcactttttcctcctgactcactgaaagtttgcttcctgtgaccaacacctccccgcccacacacagccccaacttccagcccctggcaaccagcattttaccctctacttctcagatttcagtgtttttagattccacgtatacgtgaaaccgtgcaatatttgtttttctgtgcctggctcattttatgtaacatcatgtccttcaggttcatccatgttgtcacagatgacagggtattgttcttttaaaaggtcctatggtatcttattgtgtttataaatataacacattttctttattcattcatcagtcaatggacacttaggtaggtccctacctgggctattgtgaatagtgcggcaaaggacatgggagtgcagacatcccttgacatgctggtttgtttcctttggatacgtacccagaagtgagaccactgggtcatatgacagttctatttttaacttttgagctgttttccataatggctgtaccaatttacattcccaccaacagtgtacaaggctttccttttctccacgtccttgccagcgcttatcacttattatctcttgtctttcttgtcttttttttttttttaagatagatgtcgctttgtcacccaggctggagtgcaatctcatctcactgcaacctctccctcctgagttcaagcgattctcctgcctgagcctcct

SEQ ID NO: 47934 - DNA, 616 bp, Homo sapiens
gggttacaacagagcaagactccgtctcaaaaacaaacaaatgaaaaccgttttgattatttataagggggggggcagggaatggagtgtaaaaaaatagccacaacttagaaatgggccaaatagacaactagatgtccttttggtgcagcgttgagcttgttttcctattggcagggagctgtaccactttgtagaggctgagataccttgtacatttttgtttggtaaagatttccatccagtgtaacagataaccccaaagtcaatggtttaatatcctcccatttatttatctctctcacacacacacacatgctagaaagaacttttcctttgatcctttgatgagtacacagaagtacagagagttgtataatgagtaaccatcccccagattcaattataaataatgtgtaactagctggttgtcccacttccactgatcctaagattgatcacatggcatcagccagattcccttcacttatatcaacccattcactttcatctaattgtttcatctatttatatctgttggcagaataaagtaggacttgcaaaatggtgaatatctaatttcgcaatgcatctccaattattgtctgaaacttct

SEQ ID NO: 47935 - DNA, 649 bp, Homo sapiens
aagtacatttacctaccacaactaatgagacctgaataactggaacagaatatttggaaaaaaataatggtttaaatggttaacgatgtgtaactagtaatataatagctacttcaacggagctttcatgtaaaacagaatttcattgcaagtttaagttttcttttgagaaaaatttggctatgtaaaggtgagtttggcaattttaagtttacaacttattggtcaataagtagtagtaagcctcttttgtgtttgttgagttaataaactatggttcttggacaatttctttgttggatgttaatctataactcttatttgacctgttatttgacatttctaacctcttccttaaacattaaccagaaccctgagtactttcttttccaacacgggtaagggattgattttttttcttaatttcataacttatgaagctaaaatgtgcaatattttgactgagtgaattaggaattcttgttgggatttgggaaaaagaaagttatgagaaactgatgactgcctatgtaatacttcctttataggaaattcttaatacccttatataggaaattttaatacccttcttacatatcttttgttcctggtgacatagaagaacaagtttaacaacatcttaagaaag

SEQ ID NO: 47936 - DNA, 542 bp, Homo sapiens
gaatagagatgtactcaatgttccctgaagtaagaggaggaaatgatggattactgaggggtacggctgtggggcaatatcacattaaaagtgatgtaggaactaggacatgaaagaggagtcagagtacaaccaagtagggaataatggtattggaaagtcattccaggcagattggacaacataactaaggaaactgaggcatgggaggacacgagaagctgatggtggttgaacactgtgtgataggatgctcgtggaactgtgacagaaaacaaaatggcaacattctgttggggtcaatttttgaaggccctgttgtgcaatttggactttaacaagtaagcaaaggagagccagtttgggctgataatgacatcagtgttttagatactaggattatcatggaagacagattggatttagagagtgggaagaaagaatagaggctaaaacatcaatactccaggcaacaactaatgctaggtaataaataatacagactggaaacaagacaagacagtcgagttggaaagaaggaa

SEQ ID NO: 47937 - DNA, 1488 bp, Homo sapiens
accacatctgacttcgaacgtacttactgcaatcaaaagtgttttgtaaaggaccctcctcaggaataaacaagctcactaaaccctccatacataacctggagaaacctccacaataatgaaaccccatctagcactgtttttcaaacatatggtgcatttccattaattttcagggatagcccctaaagtaacttttggctcaacaaccctggaagagaggacctttgctcatcttacacatcaagtgttcatgaacaactctgatgccactaagtttcgttcacaaacttgcacctcggtcgttcttttacaaaaaaaaaaaagaaaggttattttgcaaaaggcaatagatttaatcttggctactatttactcttaatgtttctttcatctcagccctccaatgagaagtttaaaaggaaacatccgagggagcaagtttagatctatctggaggagtttctgtggagccagccaccctcaccaggtgccttccattagagtttaatgctttgctgcggtttcctgaaagagccccacagagagtgggtctcgatgggtcctgaaccgcaccacaaccggccagtgaggtgaggggcgaaggtgaggggcggcggcggggcgaaggtgaggggcggcggcggggagaaggcttcgggaccccacacggtccgggggaccgcgaacgaggagcgggggtgcggggccgcctggcgtccccgtcgaggcggtcttcatgagaacgctcagagcaggggcgggcaggcgagggcttcgaacgcacacactggggccccggacccgcgtcgctgagctggggagcccggcggcgcgggccggggacggcacgggcactttggccccgtcattgacagttggcaccgggggtcctggtcggccgaggcggggcgtggcgccataccggggcgtggggcggcgcagagaggctgtacctggcaggtacccacgtacctatcatggtcactgggtaggtggcggctgcgggccaggaacaggcccatgcgcgcagcggcgccagccgcgcctcccaccagcggctctcctgggttaaatcctccaggcctccccgcccccgcgcccggccctaggaatgcgcacgcgcggagggcgcggcccagggcctgctgggagtcgtagttctaacgcgtagtttctcctcacgcctcctgcccccagccccccaccgccgccctttccggcttcaggcccagcaatcttacgtcaccggggggcggggctatgcgcccgccgtgttgaccagtcgcttagcaaccgggaggcttacctttggaagcttgttgcagctctagccaaggtcctgccctcttcccgccccgcccctagggtccagctcccttcacctaggagctgccaaacatctggatcaacctgggcactacgaggggttgaatttctaccattatcgcgccttttgatatttttttccagacctcctgctcacat

SEQ ID NO: 47938 - DNA, 816 bp, Homo sapiens
aatatattactaatctatgtccataaattttacttcccacatattttgacttaaactatagtttttattttgtatttgccttatatatttagttctcattaacctgctagttctgggagaaggagaccattttctttctgttttttttttttttaattgaatgattttgttttattcatctttattttcttgactatatatagtatcctgcgcatagtaagcattcagtaatgtttgtggaattaaattttgtcaaagcacacattttttatttgtgaaagtccatgagtagctaatgatctattaaactgggaacagaaacttctacctgcatagttccacaaaagaaaaccatctgtgtgtttgtttaaccagtagaattgaaagatgttttgactttgctccaggaattagagttccatgtgacctccagataatgctgtctgacacataatcaggcctcatagagaaggaattaaaaagcaagcattacagatcctacattattattattattttttggtttgagactgactttatttctctccaaaaagaaattaaagcaaatatttgtgtatgcagttttaaaacctatatttgttttgatagatggtgtaactgacattcattggtatgtacgcatgagagtatgactaaaaaggcctctgtacggctagttataaacctttcagtttagtctgtggctgtaccagctaggcctactatgaattgtgtttgattctgacttcacctaaatgagcctgatgacacgtgtgaaaagccccacttcgctggttttagcacagctgtcccttc

SEQ ID NO: 47939 - DNA, 801 bp, Homo sapiens
ccgtttgaataattctttacacctgctacttagccatagttttgctggaaggattgagttttcttctgaagacacagcactactctgaagcttatttccccctgaattttgtttttcccatttttggctgagaaggcatctggagtgactccagcgggtttacctaggttttccctgaagaggtttaggtgattagacaataacagaaggaaaagtagagttgccagtaggtggctcactatgaatgtgcttgggacgggatcagacatgtcacccctcctccacttagcctttgttttcaatccctgctgctttgagcctttttctataatgtctgagtcatttgcagcggggtgggtaaagaggggagaaagaagaaagcaagcaagcaacagcctttgagctccggaatagcaaaggcccccatcttgctccgagagttcacagagtatagcccagtccgagttctcttttccacgcacacttgcttgttcttttgttccttgtgtccttggcaaagactgaaagaactaagcctggaatacttgggccctcccgtgtcacttaagaaataataagccattgtcctcattaagccacccttgttttagcaaatagaatccagataccggagagggaacattttgaagggaggcagaattagagtagagatgctttacaaaattccctagagaaactgctttgtttctcctattttattgctccttactgagaagattcatattcaaatgggttggggttgtgaatagcggcttgcacattctcatgcacccaggaagg

SEQ ID NO: 47940 - DNA, 1245 bp, Homo sapiens
acctcaggggctctttacatttgtcaccttgagtgaacaaagctcacctcctgggtatggaccctgaggagtaggcaagctgggttctgatgagactcgactctgaacatcacacctggagaaaaccattctctgcatccagggccttgtccaggtcatttctatgcatcccccaactccatcccaccaacatgtctttggatttcaaactaacccgactgtccaggaagccttttctgaccttcgtgaattatttccattgtgctcactcgcgtcttccccactttagcaggcttaccctgaagtgttatttcccaaaccttcagaaaccctgactagatcattttgaagatggggcattagcatttgtgtgaatgcttagcaaacaatggaaaccctcagccaggcttgagctgtgctctctgcgctctgaccctcactggcaggggcacctcgagttccactccctgttgcatcatcagccttggagcagtgtctgacaatatgtattcagttattatttactaaatgaaactaatttttaaatgattaaaaatcagaattaaagtctatgtttcattctgtcactaccaggtttttttttttagctgactaccaatttgttagatttttttaaaaatgtgatttcacataattataaaggcatatttactgatgttacgtaaactgtctggcacatgaaatatccaggaaagagttttcctttcagctctcatgacacagcttgttggggcccgctgcctatttagctggcctctaattaatttattagatttttaaagtgtgatttcacataattacaaagacatatttgctgatgacgtaccaaatatctggtacattacaaatgtccaataaatgtaagttcccctttcattcctctcatggcatggatcattcagtctgcttatttacatagtgttcacaatgttaacaagtttagacagtggttttatatttattaccctctttttaatcacatctttaattttatcggtttttaaaatattttccagtctcagggcaagtccagtacatatgatttatattcagcaggagcaaacatcaagtggttcagaaggcatcaaacgatttttcaaaaactgtgtgtgtgtgtgtgtgtgtgtgtgtgtgtatgtatgtatatatctgcatacacacatacagttgactcttgaacaatgcaggggttaggggcacacagtcagaaatccacattccaca

SEQ ID NO: 47941 - DNA, 1005 bp, Homo sapiens
tgttgcagcagcctcaggaggagatgaacgtcgtgtcctcatatgctggtgagcatgggctgcggggtctcgtcctcatctggggtgtccgtactggtgagggtgggctggggtggtctcatcctcatctagggggtttctgtagcagtgagggtgggctgcggggtgtcatcctcatctgtgggatgtccgtgctggccatcaccgagttgagcacttcccatcctggagtcttggccacaaccctcacatacagacaaaagtcgatttgggtccagcggctctttcagcacgtggtgccaacctaagacatgaggcctcctgctggagctccaggaaactctagtctctgccctcctcttgcatccgtaggatcgctgggctgctgctggggcttggcaatcctcagagaccttggacttgtctgcttggagataaggcacagtcatttcatctccaactgctgccaagccctgctggctggcaggacatttggactctctctccctgggttttcccaggacagaggttacagatccttcagctcttaggctgatgtcacttccactccttgatctcagcttacaggaaaggtggagagaaaaggcgatcagagcagagtccctttctgaagacacacttggtcctcccctgcctgggtctgcaggggtcagaagcatttccatagcagtcattttcatacaggccctggctcccattaggcaaccttcctctttggaaaacccaatagccaggaatttaaaaggcaggactcttttctcttaattttctcctgaaaaacccttccctgaggcaaccagacccagctgctgcccaaataggaaggaaggtcagaattgacaggaattcacaaggaaagagagcataggtttatatttcagggtatcagtcatgcggccatgggatcagatttggaactctgtgattaagctaatttctggcattaggctcaatccctctgtgacagagaagtgtaaaattgtc

SEQ ID NO: 47942 - DNA, 1929 bp, Homo sapiens
atgagtttgcataggttgttacatagattatcatacacctataataaatagagtatggaaaacactgctaaaaagtttcaatgaggaccaggtgcagtggctcacacttgtcatcccagcacttcgggaggctgaggcaggaggatcgcttgagcccaggaattcaaggctgcagtgagctatgattacgccactgtactctagcctgggcaacagtgatactctgtctcaaaaaaaataaaaataaaaattcattgagtttaagaggggttttttgtatggttacaaaaaaaaagcagtttaattcctttactcttatgagccacttatttggttcttcaaacatgtagaggccaaaaaggcactgtttctttaggttaaaaaaatgggcaaaaaatctgattttatgtttcttttctcaaaaattattcactaattattaacagcaaacgctgcgtctcctggagtcaccaggcaccgagcgttgtgtgtgtttcacccgcttggcgttttcattctcatttcatgtatttgaaagctggggctccgtacagttatgacattgacccagagtcactcagattgcaaatgacagagccagggtgtgaacccagataggtcaacctcagcctgagtgtctctaactcttcaggttaacagccttctccggataccaaagcagcactaaaccatctattcagctgtgcgggcacctgtgtgggatagaaggggctgagggatcctgctgccacattgataactatcgctggaaccagggtctgaaaccgagtcagactgaccctgaaacctacttgcctgaccattttactcccatacctcgggctatcttgcaaaggaagggttaaagaatacgtgatgcaacctcctgaaacaggcagcctaggaactttgacccacacactcagccccgatctctgtggccacctctgtgatacagacggccgcttggggacagcagaggctcaggggcagtgaaaagcagtgccggggctggagatgaaagagccaattctccattcttctgtgagtccccggagatgaacactgtgaacttgttcccagtctctgtgtctcgtgccagcggccctcccctcccccttccaaggacaagtccacccccagaggatttgcccctggaaatgggtcctcatggacaggggagaatcagagattatttgcttgaggtggcaaaaaaaaaaaaaaaaaaaaaaaaaaatacagacacatctccggccaaccctttttatagatgtatttttgttttttacaaaccaaatagcagaggttgattattagtacagtagtttggggttttttctcatcattaaccacttagttactataaatgtgttttaactcacggggaaaaagtccagcataccgtaaaacctgagtcccacccagccagctcggaatggaaggcttccaaggcccgggaggcgcgctctgtcaagttgctgattcgggagatagcagtgaatcggggttccaccacgcccccagaatactattcacagcagctttgtcattgaccgttctcccttttggacgagatctgaaacaaagcttccaatcacttccgatcctaatagcgttacctctcttaggtagggtgtaaggattcttagtcaaatttcaactcaagtaggttacctaggaacattcttagggcttaacctacttagttcttcttgcggtttcagttgaaagtgatagactcttccaggctctttgtgttccacggtccggtggtgaaatcactgctatctctccctccttagagagcccactgcttcccaccaatgagttaagtagtttttcttgcccatttctgcaaatttgtgttcataaaatcagttgatggatgaaagttactgaagaaattgctaacaatttcgaggctttcct

SEQ ID NO: 47943 - DNA, 963 bp, Homo sapiens
tcccaatcagcatttctcgcacagcgtttccgcgagaacgttccctgatcatctagagttagggaagtagaaccgtgccctgcacatgataagcacatggagactctaatcaatgagagctactatgattgctgctcacggacagcgcccaacagctctgttgtccctgctaatgacaccgtcgtccctcccctggtcaaccacgacccaaatgttaaagtgacctttcactcttttcgccaacatgtatccgctccaagacctctcctgtcctagggctactgggagccttacctgtggcctcaccttgctgtgcagcattggggagttgctgctctgcaccttagagatgtcaaatgggaagagtgacagctacttcagcagggtttgaggcaacattaggcaacacagtgtaaataaattacataacaatctgcttggcacttagtgatggttcaataaatgttacctgttgtcgtcgttggaactgttgacagaattcagtgagacttcagtgatggtttcttgaaagagtcacttatcatattctgcaatcaaagaaggaagagaggccaagaaataaacagatacatgtgcacatgacacaagacccagggtgagcagatgttcagaagacagagctaaagaaagactagagagacagacagacagacagaaagactagacagacagacagacaaatagataaacaggtagaaagaaagactagacagatagacaaatagacagacaaatagacaggtagatagatggatagacatgtagacagactagacagacagactagacagatagatagatagatagatagatagatagatagatagatagatagaggcggacagacagcttggtaaatgggcaaatgatagaaaatataaataaatatatgaaggagggagaaaactgaagcagaaaaaaagtaagaagaactcgtggtca

SEQ ID NO: 47944 - DNA, 1651 bp, Homo sapiens
aaaggcttagaagtttcactgttcaacatggcatttcgaaatattcgatgtaattgttgtctttacatttgagacttttttaaaaaatgaatcatttccattaatacagaaagaaatctttctagtggaggctcaaaattcaaataatcagaatcagttcttctaaaatgacttacgtataatcttgtttgccagacactgaagtaagatgtctgtattagcattttctccattgccgcaggtttctgtctctgtgggttcgtgaaaacaacctacagccaaaactatgtccacatacagcaaacccacatgccacttgatttcatcaaatgcataataggggcattctagaaccagagctttaaatggcctttttgtctccttcctcatacatctggggcagcgaacatgacattaaaatgcagccagaaaaatgtcccataaagaactttattgacaacaaggtaaatttttaataactcttcagtaggcttcattcaagagggggtaatatgtcatatgagtaggatttttacagctctcataggaattccccatattaaaagaatgtttgcagtttagagagaacccaactgcaaaacattcctgaactgtgacaatatttgtctcaatctaatattatgtggtggatctttgtttgtggagaggggagaggctacgtcctgctggagtgatttttccatcaattcagggctcagcaaatatgacccaaacaaacaaccaaattgattaaaatgctttattgagaaggaagagattgagtcttggagacctgtttcaatagctactcatgtcaccagcagggcaaaggccacatagctgacaaataccaccacatctcacagaagaggctgaggcgtcctggccgaataatgctttattctggaaaagatctgtacgaatctgcaaagcagtgaaaatgtgtggacggcttctgtttcttcagccgcaagggaggccacccttcattgccggaggaaggcccgccctcccggctgtggttgctgtggagctcacaggggtgaaggcatgtggaaattcactgcaccatgccagcctgcaggactgggagcgtagttcccactaaagagcaaacactgtactgtttttccaaaaaaaaaaaaaaaagttaaaatctggatcccaatgtttgttcacagcagggctgtaaaacaagtagacaaagatctcaggggctttgtgacagcatggtggattggagttaaaaagaggtggtgtcatttggatacacagatagtctaggcgagccttgagagcagagaaactggcctccaatctaaaacacaaaatgagggctagagaccggtgtgaggtggagagtaaaaccctttggttaggattcaaggccaactaaactgcagctctgcctttactctccagccttactttctccatctgcaaaatgggagggaggcattggaggtattttgtgaaaatcacttaatactgtgctgacacgtaatctttcaatagaagataagtgaaacatataaatataaaatatgaaataaatagagaataaacaaggtgaacagaggccaggcgcagtggctcatgcctgtaatcccagccctttgggaggccaaggcgagtggctagcttgaagcca

SEQ ID NO: 47945 - DNA, 1218 bp, Homo sapiens
gcttttagcaagtgacagggtcgagatttgaacctgggacctcttcagtgacttttctggatcctcctgctctgcagctgcctcggaggaccagcaaattcttcaggaaaaatgtttcaggactttccgtccttgtttcaggaccgttcctctgcattatctgtgagaagcgtttctatagtcttggcacatagttatgctgtggggctaaggtattattatttcatatttcagtgcagaaggaagtacttattaaaaggccccaaaccagttgtctgagcctagagatgaaaggcctccttcccgcaccggcctgggtgctgagtggccctgacgccaggccagcctgccacttacagtctgagacttgtgtctgctccctcttcccaaacacagaggcagggcctggctggggccatctgatgaagtgccagtgtgccttcatgaaatcaggcatgggactgactgaaaagctgaaatctggtgagctgagggggaggagaaggtcaagtctggctgtcggtctacagaggtcaaggacctggcacagagcagggcctgctgcctctgccaccaacagccaggcacccagagaggaactggaggagaaggcggctcgctgctggcaggtcagctgatgggagagtttacaagactgtctttgaactcctcgcatgcaagcccttcttctccttcctgattcacatttaagtttgcgttcctgatcccctcacattctttctgctcctttaacagcttcacctggacacagaaaggacagaggcaggagcagggccacgtccctctgtcgatcacagctttagctttcagtttctcacggctgcttaattcccagctcacactatcaatatagggcacgcattttaaaactgttaaataaaaacagctgctcatttcactatgccacattttctttccaactcaaaaggatgctcactaccaatggatactgagaaaaatacagtgtcattaatgtcagttaatcaagttggtggtccttgaagatctataaaatgtaactgtaacacattttacagattggcttagacagaataactaggaaataataaatgctagcatcatcagtattacttgtacagctcagcaaaggaacgcaaatggctacacaggactggggaagaacagaacagagatatttctttgtgtgaaatacagagtttatcataaggaggagaa

SEQ ID NO: 47946 - DNA, 582 bp, Homo sapiens
tcaactcggattcagggttacttatgcagtgctacacaacttattagcatagaacgaataaggctttttatacctagcacagcaatcctttctctatacaccatcagctagaatactggaaaaaagagactcaaacgccacaggtattttaattaaagtacagctcctgaggtacccaagtttaacttacagaaaggtcaacagtgtgccttccatcactcaggactccgaaggtctgccttgaatcctgtcctgaattcagtagctgccacatgagtcacattatgtagttaaccctctcagcctctgcttcttcagcggtaaaatgaggataattattaactcagagttgctgcatactcagtaactgaagtgcccgaaggttgatcgggactctataaatgtcagtcttttttttggtctttccttggtctcactgggaactcagttaagaacgcattaatatacagaaattactggaaaagtacatttaggctctaagttaaattttagtaaaggataatggcatttgattaaatgtctgggacatgaatagtcattccccttgttggtaaaatggtc

SEQ ID NO: 47947 - DNA, 5092 bp, Homo sapiens
aaggatagggcaaggaaaaaaagcaaaaaaaaaaaaaaaagctttagaataaaatataattggattataatcccagacacaggactcactagctatattcttgggcaagttacttaacttcatctttcttgggtttccccttatttgtaaaatggggataacagtctaacctaagcccaagttgtactgatgattaaacgagatatgcatgtagggcattcagcatagtgcctaggagcttaataaataagcaggccattaagaaggggattgcatcttttacactagcagcatcaaaaccttgattttgatttttctaggtactgaaacagccttcattacttagagaccatagcttttttgcaagttactattccctgcatttagaaagttcatctttaaacaggcaattcagtaagtaaatattctatggctctaaaacagatacggctgttggagactttaaaacatctgacagttacatttttaatgttgtctaccaaggctattacatttcctctgtcaaagtaacttaattttaaaaacgaactctgtgcttgttaaacgaaaaggccagaaggctactggctactcagcgttcatttgaaattcttatagtgccttcagtacaattcaaacttagaggtgattctcacaattcatgtgaagcaacattttacaaaaaaaatcacctacgttcactgttaagtcagaagacagaatgattaacaaaatctcagccgcgaattactctcacgatggccaactggatattaaataactctgcattattttaatggaatgttataaaggatttgcaacaaaatgcagacgtagatttagggactgccgacttctatagatcaaggacttcattggtgcagctgaggaaattcttccaaacaagtctaaatgttggaaatccaccaaactgcagagaaagacctcttgcctccgtattctttcttcatctgtaaaaatgttgacttctgcttttcagactacgcgcacagcctctttatttcctactgcggcttcattccctcacggaacactgacgccatcgcgaaggaagcatttcgagcacgactgacgctccccttattatttgctaagccgctgcgctcgggtctggctacgatttgctttcagaataacgggaaggtgcaacaagatcgcttccctagaggcgcgtcgcccgcgtggcccggaccccccacgcccgcccgccgccccgtgggtgcgcacgcgtgtccgcgcaggcttcccgcctggcgagtgcaaggctcctctccgccgtgctgctttccagcctctcagcaaatcacgaacaccgaaagaagccacggcggcgacgggaggggcgtcgcgcgtgcttccctcggcgacaaagcgggagccgggcgcgccggccgagggcgcccggcgcagagtcccgcagaggcggacgccgcggcacgcgcctcgaaaagcctcaaactcttatcctcggctctcccgccccacctccgccccgcagccaagacccgcgccgtggcgggcccgacggccaaggaaagcccaccagccctccgcaccgtgggcgacgggccaagacccggccctaaacggccagacccagcccctagtcggctgccgcccccgccccacgcaggcgcgctccggggccctcccctcccccaccgcgcgctcgcggggcccgacgggggcggagcgaccctcggaaggggcgtggcgaccgggctcgacgcgcgcacgcgctctggagccccacggctacgtgtcgggccacgtgatgcccaccccgaaagtcccccgtgaagcaacaggacgttaaaaaaaaatttctcttctgcggggtggataagaggttctgaaaaaactatagtaacgggaggcgaggcggaggcagcgctggcgcgtcccgctggaattcctctcgcctgccgcgccagccccgaccgcgcccgcagccccacccgccccgtgccgtggaaagccccgcgccccccccgcggccgtcggccccgcagcccacacccacccgccccgggcgccccgcacggcggcgacccagtccttgcgcccaggcccgccgagcgccgcagtccgtcacactcccgttgcccccgtcgcccgccccgccggggaggcagggaggagggggcgcggcgccggcggctgccccggtcgcggggcggcgggcagcaggcagcgggagcgcgccggccgggacccgctaacggccgccctgcgcggccccgcccgccgcccgcccccggccctccccgcgccgctgcccctccccccgccgccgccgctgctgccgccgccgctggcagcgccgcctgaactgaggcgaactccgccgccaagtgagtgaggaggaggaggaggagaaggaggaggaggaagaggaggagcgcagtcggagcgcggcggcagcggcagaggcgccgcggcggggaccagcccagagagaccccccgagcccgcggcacaggcggcggcggcgctgagcgggctcgaccagccgagcgagcggcggccccggctcctcctcgtccggcgccagcagcccgcgccccgcgcccgcactcggccagccgagacccgcctcccgcccgcccgccggcctcgtgagggacgcgccgagccgggcggccgagagcggcggcggctgggagcgcgtcgggcccgggcggaaagtgcctgcggggggcgggcgagcgcgcggtgccggccgccccggggctcggcgcgggagccagagcgggagccggcgcggagcgggacgccgggtcccgagcggcccgcggccggggctcgcccccgcccctccctcctctccggcggcggcggcggcggcggcgggcggagtgagctgcggagcctggaatatggtcggggaaatggaaacgaaggagaagccgaagcccaccccagattacctgatgcagctgatgaacgacaagaagctcatgagcagcctgcccaacttctgcgggatcttcaaccacctcgagcggctgctggacgaaggtgagcgtctccagggccccggccccggcccgacccccgccggggcggcccctttccccgcttgggatggtggggagggcgggaaggtcacggccgggcgggaccgagcgccggggggactgggaggccaggagggcgcacaaaggaggtgccgggccgggcttgcggcgggcgggcgggccggggtggacccgccggtgccggacgccccctgcccggccgggaccccgcgccgctggcgtccaagttggcgcgttgcggagggctgcggggtgagccctgcggcccctctagcttcggcggtcacatttccgagaggtcggcgggggctgcgcggactcggtggtcctcgccgagccctcccgagagcaggcccacgccgcgccgccggcctggaggacgcgtgtgcccggcgcgggccccgctcctccgctcggcctcccgagcctgctctgcgcggacccccaccgccccgcgttcgggagctctcccctcccgtgaggactaaagcggggtttcgtggttggggagttggtgcagctgttcaatactaagtggaagtcagtgtggggctcgttagtttaaagaaattccgtaggagaccgaaattatgctggcgtagccgacaaggaggactaagtgacggcgaaaagcacttttttcccttttgtttggggaagcgagaactgttagggagttgaacttcacttttcgggggtggggggggggggggtggagtgcgaaataacgcgatgacagatcggagcgcagcctgagttagaagaacttgggcggagggtttgctcccggggacgcagccgcctgagtttgtaggacagggtttcgagacgtttggaaagggcgaaataaaattgagccaaagtttccaaaaagctgtatggagcgctgtggggagtgaagaatgacaagaagattaatgttgaccaactttggaatttccttaagaagttctcatagcagtacctgaagtattaatttctagtagctgtgggtttctgtggacgcctagagaaaaaaaagaccacaaaaaaagtctgtttcgaaaatcgactggccaggagtttgtttgtttttttttcctgcttagaggcaccaccggaggactgtgtaaaggaaactgaaaactacaggttgaagagatgaacaatggagtttagatttttcgcaagaatttcgagattttaaaaatagagtcggggaacaggagtttgaagcttggggagttggaatgtcactagagaacaaaaggccggaaatgtttccatgataaaaaatggttaaagaaaaatcccaggagttctgttgtcttgaaagtcatagaaacaacttaaaagtagaaaatggttaggtgttacggctttctcgtcgttttgcttccgtatgttaaacatacagcactcaccaacgttgaaatgggcattttccgctgttggaacagcaaatctgttaatttcaagttgctccagagaaaacctgagctgtccctttaaggggttctgcttttcctatttgtgttggcatttgaaagattgtggaggcagaaaactttctggaatgtcaaaaaaaaaaaaaaaatgctggaactcttaaattgagtatttccaaatgtgagcgctaaggggcgccagttattttttaaccatggaaatggttggaacaaaatgtgtaacatactcaatctgactgacctatattaaatttagttgaaacttaagttatagattatttgatttgtcataatgtgtttatatagtgttttcgaacattgaaaatactttccttaaaattattggcacaactttatgacgtttcaaaataacactcttactgtcttctccttggcatattttggttaagttaaagttttagtagtattagtaacaatttctggtgaaagtttgttttcttgagtgcagttgtttagaaggaatcctttatcgacgataaaatgaaaataggccttggcaatatttagggttaattaaaattaaattgcattcctgaaatgtcgaattcaaagactatagga

SEQ ID NO: 47948 - DNA, 478 bp, Homo sapiens
agtgacaaagacaaacagtacacaaatgaatctatagctgtaatcagtgttatggagaaacataaagtggggtagacagatgaatagtgactgtgtatggaaggaggtattcatttttaagggtaatcagggaagaaatctgttacaatatgatgggaatggagagacaggaacagaatgatgggaggaaggcatgaaaaccatctgggagaaaaacattctaggcagagtgaacagcaagtacagctgactcaggcaggaatgtgcttgggaagtgttgtaagatgtgaggttagagagttagcacaggggcagtgtcatgccgtggtcaaaagtaggaactcagattcagacttctagctagttttgctgcttgttttgtgactttggtactacacttgatcttaaccaaaaggccaggaagtgatgatgttttgtgactttaagcaaattacttttcattcctggtgttcgcttt

SEQ ID NO: 47949 - DNA, 979 bp, Homo sapiens
gagcaaaggtgaatatatgagggattaactaaacaggcacagtaatcattagtacagcagagcactgtgggaaagctgcagcatattcatgcacagtttgatatttgatttgaatgatgctcttcaatcataaaagttcaattattcaattcagtaaatacttgtttagagccagatatgtgtaaaatcaatgtgtacatactgtcaagagtatgaaaatcagtgagatgattctgatattcaacttggagcaaactttctaatagctagaaaaagacaatgcacagataactaagttactatataatacagaaaaaaaagaaataaaagtaaatattaaagaaagggaaaggaggcattctagacataggcgatagatagcttccataaacttatgggtgtcaaaatccatgtttggggaatggccagtaatacagcatggagtaaatctgagcctatcgtgggaagtgaatgaacacggcacttcagattagtgtggatagatgtgaatgggtgcatgtgcagcagccagtctctgtcaaagcacaagtaagccatgactgtgtttcagagatttcctacaaagcctcaaattctaaaaatccacgctgattcagaaaattcattcaggatgagtaatagctgagacattaattgtggacagatttgcagcagggaggtatgaaccccagtttggacatgtggagttcagactgctttagagattgaagtatacatttctagttggcagttgaatttggaggtctagaaatcagggggcagtactgtgctggaaaatgtaaatttgggattatattgatgcaaaactgtgttcttctatgttgctgaagatttagtagcacatatattatgaaatgatattgcaaatggtaactgtaaaacagacattatagtagtcatgagctatttttttccacatcagtatctcagctattaacccctgaaagattgtttgaaa

SEQ ID NO: 47950 - DNA, 638 bp, Homo sapiens
cagtttcttgattcattgactccttggtttcccacttagtttgcatggtgtaccctagtcaaaaagaaatatttcagagttctgtttattaaatatttactctacaaacaactttgaaacagactatacattttatttgtaaataaccacatttttactaatagcatttgtattttcttgggtgctgttcaaattctcaaactttggaatcagatttttgtactgccaccctcttttcttgttccacattgatttttgtatgttcttgatttttattacagcaaccgctaacaacctagctttgtaaagatatgacatcatcaaaaagaatgtaatgtgaccttatgttgaaacagtcagatattctgagctggtggttcacacagtgtcggacagatggtacccctgtaaaatgctgtgctgactcagagttcactctttggaaatacatagatggcccagcataggattgtgtctgattttttttttccctgtatccccttacaatatgtggatgcattttcatcctaaagatgtgttgattaaaaataaagcagaagcatttactgttaaaatttatttttagccttattggctaagctcaatcatgtgaattgttgcagaaagcagttttatta

SEQ ID NO: 47951 - DNA, 647 bp, Homo sapiens
tcaagaaattggatataagtatagaagaaaaattgaggactaaacctggggtgcttcaccatgtaacaggaagagagggaggatccagcaagggagagcaaagcggggagcccctggatttggaggagagctgtgagccagtcctggaagtcatgcttagaccttttaggtaggaagaggaaatcatcagccattggatttggcaagtagtggtcattggtgaccttgccagtcaatttgttttttttggaacagtggggttaaaagtgtcactggcatgggttcaagaaagaatggcacaagaggaaaaagaaccgggattttttccctcttcaagattttattatgtttataaataatccttcctgtactttggcctctcggttcttttatattgcttcacctgcagtgatcgtgtcttccactccacctcagtcatccagcctcatggtagttccttagacctttccattacccctaaaggtgccttcctaaataggcagcggcagaatgtccagtagtgaacatttcccttctcttcagtggaagagatgctgcatgaatttggcagagttaattaacttgtgcatatatacttgaagggtaagtctcttgaagtagaattactaggttaaagggtaagtgca

SEQ ID NO: 47952 - DNA, 505 bp, Homo sapiens
ccggcctcagaagggtgaagtgggagctcgctcttcccgtttctcaaatgtgcttggcctgggagaggtgcctgataaatagcatctgagtgagtgatgggcctgcctgaacttccgtcacttcctgtcaattactgcgatggccacacccacattcccacctctggtcccaagtccattcatcttcatgctttccgcaaactcttgcacaactgacaaaattccctccatcattgtatgaccctgccaaatgccatatccattcttttttctccacaaaggagaaaggtaaggagaagaaaggggtacattgagaggcctggctcctgccaaaactcggggtcaggtgggctccccacaagagggcttcccagaggttttccaatcatggtacacttgcagaatcatatttgaatgggtgactggggtcaactgatgaggctgctcatagctggaggcagccgctcagggcttagcagcagactgaacatttcagatgcatttg

SEQ ID NO: 47953 - DNA, 885 bp, Homo sapiens
ctgtgtttgacctctaccacactggacataagaagattcatttaaaagtggtgtggctaaaactgatcttttgaatgggctacattgtacaggcatttcagctacacttaattttaaagtgaggcttctccagtgggaccctaggatctggagcttaaactctggagcatgtttccttttgttggctgcaaaataaatggcttctggatagagcaggcttgcagggagcctgggcctcctgggagtgcaggactgctttggtgatgggcatgacccaggctttgagaagcctctgagagtgacttgtgatgacctacgtgggtgatctatgtgcagagctatgcaggagctgtcagcagccacaggggcatgtgctagatctgccgtgtctgtctcttgttttcatgctggtatgctctcatcaggcaggaatgttgtcttttctgattaaattgtgtatgggccagaaggtgacgataggagagaagctatatacaagcaacgctgtcactcggcgggctcagggcttttggcctgagaagactaaatgacgtaatggaaagacctgggctagaaccttagctctgtcctccagtaaacggatgactttgggccatttggtttcacctctttgcaccttggttttgtcatttataaaacatggaacaaatagctaataaggtcagaatgaagatttcttttcttgtttttttttttttttttttgagacagcgtcctgttctgtcacccaggctagagtgcagtggtgcaatcatagctcactgcagcctcgaactcctgggctccagggatcctctcatctcagccttctgagtagctgggactacaggcacacatcaccatgcctggctgatcgtttttatt

SEQ ID NO: 47954 - DNA, 683 bp, Homo sapiens
gtttgattcaactcagcatattttcagcaacttcaagtataccattctgatagaattgagggcaaaggttttctctctctctaatttatccaaatataaaaaactctgggctttttccatgcaacacaaacactggggttttaaattacatttttcaactctgatctagatatttggcactgtgtagacagagcctggaaactcctcaaaggagtgcaaaacaagacaaacagcttagcacgaggatggatgttgtgtttgtctagcgcctgtgacaatgacactaatccaaagtccacacccaagggaatgtgcatcaacacacttgaaaatgtagctgcgagctgcatcggtcctatgtggagctgctgagccaggggacatgctgtaagcgagctcagcatgacaggaacggcagtcacaaacccttatcttcagccgagttcacacccttgagaacaccgtgagcaaggacagctgatgtgaagcaagaaggctgacgtcactgttgagtgtggagcacaagatgtacatatagaataaaaataactacttgctggcctgtttattcatgcacccaaaagcccttcagacttggttgacatttcatgctaaataacggtaatgacgaatggaagttctgccattttcctgtcatttttgttttgttcttcctctttccc

SEQ ID NO: 47955 - DNA, 3251 bp, Homo sapiens
aggggcagacaactcctgcaccggggctggagccgcaccggagcacccccacccccagctcttgtctttcatgtcccagaaattgttttgcaaattttcatccctacaattctcaaacgaccctgagaaacaccaccaccaccgatgaaataaaccgaaacagcaaccacagtctcaaaattgaagaaggcatatcggggcatttgactgacctgacttttgctgagaattacgaattccttcattttacatttttgcttaaattctatttctgtaatcaaagaaatagggattttctgatatttctaaaacagcacttacgggttgtttgttaggttaagtggactcgcacctgggaaggagcacagtggggtggctaagagcgtgagctgttgatctagtctacctgcgctcaggggctggccctgctgttgacttctcatgtggttctcagcaagttattaaacatgtgctcctcagtgtcttcatctgaaaaatgtacctgcctgagatctcctgggagggttaactgagatattacctggaactgccattacctgacattcaataaatgttagctattattattagaatgaagacagcacccaaaaacgtacacttccgtgaactcttgcttcaacatgtttgtgcttcaagatctcgccaaagtcaaactaatttggctttggagatttagaaaaaggtggtgtggtcttgctgggacctgattcgccaagcaccaactcaccgtgtgtttgtggctgatgcaatggctggaaataagaggctgtagagaactgaatgcctgcagagtggagtcatgggatggactttatttgtagacggctgattaaattctgacccaagttaacttgggatggcttttaagtggcctgtgtggatgcattttgggctcaagcccagctcttagagaacaggtgtccaccaagaatgttggcactggtcttggaagcttttgtgggagacaaagcctgggattaatccaagggtccttagatcccccaccttggggaaaggcccactgggcagtggtctcagacctaaaagtggggacactggctataaatggtggggtggagaaaaacacacaatgatggtttccaaagcttgtcagttgccaatgttttagaaaagtaaaatgtaatggtgaggagctggggagtcaatgcttccaatagtagtggtgacactgaatttggtgcttgtgatgacatgttgaatattcagctcacccgtcaaaccacatctcttgaagcctgaagtcccagggatcagagctgataagtctgagcagctttcctgagtcactcagtcctgggacccagcagcgagcacatgtttcccgttgcctgtcctgaccctcgcttctgttgggacctatacctgctttatcactgaatgctgagatgacatatttttcccatgttgtaaacacaccaacatgtatttttccaggagcctaattgtaaagagcagtcagacttggaggaaatggttactaaatttgtctgaatcggaaatgcacctcctttagtggatatgagatggaacgtcgcagttgcttcctaaaggtctccttttcatcatcctcctgaccttttataaaagaaagaagcaaagagaagaatgaaaaatgcacgagtcactgttttacttctttcaactcccatcgctgatgttgacatggaccaacagagatttgaaataaagccagtgtagcgggaggagtggtgaactccagaattttgggactaatccccaccatcaaaggctgggctgtgtggtacaagaaaagcaggatgtcagtgagaatccggcattgatctcccccgtctacaaacatgaatcaagacgaagtttgcccctgcaccccacctcaccctccctctcaacagggccatgcacttgcttctccttccagaggaggggcgtccccgtgctgctggaagaagcacttggaacactttctcttttgcttctctttttttgggaggttgttgtttttgtggttgccattgacttcgagtgtggctgggggtgagttgcccaatagttgtggtacgtctcagacactctgtcacccaaatatggaactgtggcagcagaaacaccttatgaaaatagcatgaaaatgtgtaatgtgccataaataaacagaaagagaccgccaggaagctgtgctaatcaccgctttgatgtcgcctgaattactgtattttttaagggcctcgtgtttctgcttgtttgttgcgactcagctgccactgctctatgaaaggttggatccagttttccagctcttctcccctttgcagtgacagctgttgtcccttgactcataggaaagcgatttctccacccttccctgactcccagccctttcctggcaggactcctgcgaaccttactcttcgtccctgccctgaggtggccgagggtgaggacggccgcttggcctgagtccatgcgctcccaaagttcctgtgtcatttgccagccggtcccaggactctgcagcaacgtcctatttttaatctctggtaacctggccttctcttatttggccatgtcatgtcgggaaatggaagtttggcttgacttatgtagcaaagagcttgtaggagcacaagcccctcgctgagcagagcttgcaggaagaaagccccagatccttcagttttgggttgccagggctttctggctttgcctacacctggcagtcactcaaaaaaagtcccaatcctgaattgcttctcataagtctacatgttcttaggtttgataagagctcaaggctgctctccttgattttaagattctatgatgtcacaaagcgcaggtgaatgccagacactgtttcctttctgtaactacccaggtaaccacttgcacaagtgacctgtgggcagccctggtgcaagttccgtccatgcccggggcaatcccggctccactgctgggtccaggaacgccctcttgtggttggaagagctttgaccgactttattttttttaaaaaagaattacattattaaacattttctcaatttttgtgttttatctagtcttgggagtgaaaaatgctagtttttagttgaggataagtaggggggagagaaattagaggtagttttaccatcatcatcattgctgtattcaagccccagtccaccgagcttgtccttccagcctggacattgaagacgtctctttaatggtctctttgcctt

SEQ ID NO: 47956 - DNA, 864 bp, Homo sapiens
ggatggcccttctagaacttaatttggaaattatctgtctacattgtctcttaatagaggattcaaatgtcagttatttttaactgaatttaaaaccaacaggttttattcacctttgttgacaagctctcagcatggtactttgtccataataggtgtcagtcaattaatttaatttaaggactttgaatggtcgtctcttcaatttacttttgactttcaatctacttttggagtgtcatcattgcaaaacccagtttaatcttgtttgtctagctcactggtgaaaatcgatacattgattcagggcagaggtgagaacagggcaggccctcccaaaagcaccttctcctgctgggtacccacttcgccacaccaaagtttatggacccattgttcccagatggctccaaagggcccatggagatcggccctgtggcctttgctgaccagggtgggtttttctcgcttgctggcttcttggtgtggatgttgcagttggggccagcttgggcatgcagccgcctccttcgctgtctcccagcgcacacaccattgctggctctgagcagtgggcgcttaacgttagctccagctctgtgagaaagcaacagctgcttgctctctcaacagttaaaacagtttgatgtggaggctgtgtctcccatcccgggggttcaaaacaaccctaaccttaagtcgtcactgtggttggtgggcacttgctagtgtcatcctggctctggggtggaggaaaaagaccccatgggggagaagtccactgtgacagtgcttctcggcctaagaaagctacatatgtcttgcacaagaggaagaggacagctctggaataaatgagtgact

SEQ ID NO: 47957 - DNA, 1061 bp, Homo sapiens
caaaatattgttacccctgaaacacatctgtaggcctggttttgaaacccgtggtagcagagcctacatgttaggggcttgaggaggacagggaggttgggtgtttccactctgcatgtgaatcctctgaattatactttttttactctgctgtttcaacagtccacttgacattaatgcctactaatttgggtaaatgtggctctagatcctttaaatgaagaaaaaatcaaaagcatgaaaaagtgaaaacaaatttaaatttagcaattcaaggtgcaataaaacaccaccatatcctttaaaaaggtaattacattgtaagtctctggttaaaatggaaactgagagaaagattaataaaatacattattgagaaagtaatccatttttaaagttcaactaattcaacacagcatacatttactaaaagcctaaactatattcctgtcataagtataattaagtaactaataaaataaacccaaagctcaatattgtttatatggcttggaagtaattcccaagtacttctgagccccaggggtaggagccttgtcctgagtaagtcacttcatttgtctaggtgttaattcttctaactgtaaaatgaaaattatttcctcatggaaaaattcttctctcttcctgtttccttataaggcccttcaaatccattaccttctaatactccttacattcctccagcattaaataaggtgtttaaacacaaggtgagtcattttcttttttttttggaaacggaatttttttgctcttgtcacccaggctggagtgcagtggcatgatctcggctcactgcaacctctgcctcctaggttcaagcgattcttctgcctcagcctcccaagtagctgggattacaggcacgtgtcaccatgcctggctaattttgtatttttagtagagacagggtttcactatgttggacaggctggtctcgaactcctaactcaggtgatccactcaactcggcttcccaaagtgctgggattacaggcgtgagccaccgcgcccagccaggtgagtcattttctaac

SEQ ID NO: 47958 - DNA, 892 bp, Homo sapiens
acccaagcgacagaaactgctgccaacaggagcaaggcccctgggaagcaggcattccttcttcctcattgtcaggtggaaggggccgctggggggatggcctttctgtgcttttgcattcagtggctccacaaagacctacttgccacctggccataatagggaaaaacaactgaggttacttcctgtttctcttcatttgttcaccctactgtgacagagcagacctcatccgcttggctatcagaggctgcagccaggacggagtgctgacctaacaggaagaagatgaaaccgttttgaagggaatttctttactgatgactaaacaggttcccttctcctatcctgccggcctgagagagactacgtgttggcaagagttaggctagaggtttgagccttggttccctgacctcctgatctctgacggtggccaagtccatgaacctttccggccctccatgctctcatctccaaaatagcacctgcctcataagtgggtcaaacgagttaaaggagtcaatatctgcccagtatttggagcaaagtctagcagatactaaatactttacaatgattagtaattattgtcacctctcacttagtcattattgtcacctctcatatgctcagcagaaaatgttttaaaatagctataaacaatttatcaaagaagaagtacaggccaggcacggaggctcaagcctgtaatcccagcactttgggaggccgaagcaggtggatcacctgaggtcaggagtttgagaccagcctgggcaacatggtgaaaccccgtctctactaaaaatacaaaaattagcagggcatggtggcacacacctgtaatcccagctactcaggaggctgaggcagaactgcttgaacccgg

SEQ ID NO: 47959 - DNA, 932 bp, Homo sapiens
ttgtccccaacacccccaaattaatattaatatatcaaagctctaaatgcactgtgactatatttgcagagagtgcctttaaggaggtaattttaaggttaaacgggcacatacgtgagggctgtgatccaacagaactggcatccctgtaggagaaggaagagataccaaggctctatgaggacgcagtgtgggaggcggccgtctgcaagctaggaaagaggcctcaccagggactagccttgccggcatcttgattctgaacatccagcctccagaactataagaaaataagtatctgttttttaagccgcccagtgtgtggtattctgttaaattggcccaagtaaacaaatacagatcaatggctgtcctaaagaaccgctcaatattgactgtcctcaaaccaaagtcattgctctcggcagacctggatacacctttggacatgctgacccattagattacgtaaggaacagttccagttagttttgtgtctcagatacccttcatcctgtagaggcagggtaaatattttttgaatgaataataactgaacaattctgggcctgctggcatactatcctgctcaaagtgaaatactcaacagatacttgttataatttcctcgtaaaatcaggtgttgagctccatgcactgtctggggttggcttttcaggacacgcccatgcatctgcagttctcagagcctgcctcccgctctggtgacaggatggcatcaggagtggcatcaggagtggcatcgggagtggcatgtgctgtgttgtagaagcttgtatctgggaggctctcataattatgctgacagaggtagacgagggaagacctaggacacagtcatcaagggcggggactccggatgaatgagatgtggggcaaggccccccagaagtggagtggccagcactccc

SEQ ID NO: 47960 - DNA, 1361 bp, Homo sapiens
gtgcagcagctgggcgccgggcggaggcgcgcggcggccctggccggcggtggggggtgcgtcggggtcgctggcggggccgcccctccgcgggcccgcggccctagccgggagacacggggcgagtaggcgcctgggttcggccgagggtgaggggaagggcctgcggggccgcgccagcagctgcttctccagatgacgcttctggatgaccaggacggcctcgggggtgagattcaggcagaagcgcgcagcggagtctggacaaggccccgcccccgaggaggtgcccgcggcggtggtccccgtccccgccgaggtcgccgcataggtggtcctcgctgggctgtggccggagcctgccggccggggcggggcgcacgtggctggggcccgcgcgcggctgggcaaggcctggggggagacgcccggaggggccggcggctgcgtcctgtccaggccggggccgcgccgggccggcggcctcttgagcgtggcggagggccaggagctggagaggagcccctcgggccgctgtgggggcctcttcttcttgtcccccgcggcgcagggcctccggggtaactggcgcgcggcttgggcccccggggcgggggcgggcggcggcggcatgggcgggaagggcatagtgcagccgagccgccggatcctcagcccctggaaagagaggcgggcgctcagccactgtgcgcggagcgggtccccgcagtccgggcggcccctccacacccacctgcgtccagccgcggcctctccggcttcctcacatcccagcgaccaaacccggggactcaaagagaggcgctcccaccctcccctcctcctgggggtgctcccgggactggaccctgcaggaaccgcctcccgccgtccgactgtgggcgagtcgcggcgcccccgggtccccacagctgagacgcgggccgggccggcaggaggaggagcccagcgcgctcgctaaggacgcggccctgccaggccccgggctgtgcccggctggtgtcacgaccgactgttgaatgggagcaaagtgccaggacagcggagggcggagcgcgcgccaggcatcccggggctcccccagctggcgctccggtggtccgaggttaatgtagtccgtcgaaagccaggagcattcccctgggggagccggcagccttccggagtcacaggtggaggccctgcacgtttcagagaaaatcccctgtagcctctccgtgccttcgagacggcgggaaaggcaccgccagtagatgcagctctgcggccccggacacatcctgcttcacagagaaaagcgggctggagctgagaggggagaaatgaccctcagtgaatct

SEQ ID NO: 47961 - DNA, 632 bp, Homo sapiens
gataatatgtttcacaaaagtccttatctgttagggacagccgatatacactgatatggataaaatgacatataagatatattataaaatatacaaagattaaaaaaacacagggggcagatgcaacaggccaggcaaaacactgaaactgcagaggctgggaaagagtacacaggttcattatctgttctctctgcctctgcaggacgaattcctcaggctcctagatgccagagtctgagtgcatccgagtgcatccgcactcagtgcaagtcctgctggaggcagaggctggccttccacacgccacctcccttcggccggtcattggctgcaggccaggggtggggtggggtgactgcaccccatggagggtagaggacgctggccacctacaggaggcagcctgagcagccccagcagagacgatcacagcacgcaccagacggtacccgttctaagctctttcagtccaacccatgaaagttttgggcccctcctccaccactgtaaaaacatactgtgaaatgatcatttattctagagcaacagcattcctatataccatgcaaattctagccaaattatgtggggaaaaaagtagaaattactaagtctactttgtacagtat

SEQ ID NO: 47962 - DNA, 2375 bp, Homo sapiens
ctccatctaaaaaaaaaaaaaaaaaaaattcattggccacatgtggctgtggtaatatacagagttacagagtgcaatgagaacagatacttgtcttacactctctgaacccaaaactgtagcccagaactctacccacaccaagtgctgagtaagtataatgacaaggaagtcaggagagacaaatagaagatccttatgaaatacaattcaattttaaacgtccaacttctgcgacagcacacaataacgtgcaatataatcgcatgcaataacaaaaaaacttacaccgcagttcctgctccactgctacttttaaccttcttgctggaggaagtaacccttatcaagtctcgctggtaaggcgcagacacaagggcttttattaagaaaaaaaaaaaaatctcttaccagggctcactgccttaacagaaaaattttaattcaatattatttcacttaccaatgtcctgtttatttttcctccagtctccctatttccaaaagaccaccccccagcaaacacacacataacaccacctttacctccaaagacaaacagatgcaacaagctttagggtctcggctcactgcagcttgcaggataaatgccctgcatagctacttacgctgcacagcccgaggccagaccccgcaccaggctcagaaaaccaaatagtacgtgggagcgatggattatttgggaaagcgagggcagacgttagcggattcctaagtcagaaggccagatgggagagtcgggggggggcctcaaagtgggtttaagtagaccgcatggaaaactggaaagttctcaaattctacccaggaagcaggcggagccctcctaaatcaaccagccgggcagaggagtcccagacccccggcctcgcacccaccccacccgctcggccggtcctcagtgcggccggggccagcgggcagccccgggactggacgagggcgcaagttcgctacctgcgcagtcaggccctgctcctcgtcgtcctggccgctcaggactcgccgcagcttctccatggccctgttacagggccgtagcggccgccactctgttgcctgcccctgacgcccaccaggaaaccccgaacccgaaaccccacagaccagccggaagtccggtcccgcccgcttcctgtgcgtcagcgcggccgccgtagcaatgcgcgcatgctcaccagcctttctctcggacccggtagtggtccgtgaagtccgcggagtgggcgctgatggtggggctatcccttcccactgtccgcgaggtgcgccgtggtaacgcgcggggacacagcgcgggtgtggaccccctgcccacagctggcgcacagccattgagtgtagacccgactggggcacgaccactgaaccctgcacttggcgtcctccgggccccgcgaggggccttgctgggcgggtccgcggcaccccgggttcccagaagtcgaggccccgaatgcgcctcccctcgcctggaatcggagagcggagggctcctgcgggcaggtggccgtgctccgaagagcgccctgccacccatgaggtggccctgggggcgtcgctagccttcccagctgggtgtcctcatccggagacacaaacacctgcctcaggattaaagcgaggagctgtatttcagaccgtctcaggagaaatagcaagaggctgcctcactcctttgcccttgtgagagctatttctttactcagttcactggtcagctaggagtttgaaagagtgaaatcttatttataaaaggaatagctaatgcaacccatttttccagttttgtgtgaacagtgaaaccattgaacaagcgtttactgttctccggctcgtgctggatgaacaaacactaagaaatggggaagtggcatttttctctctctcattttccaccatgctaagaaaggagattaaaaatcagggctgcctgtctaatatggtctccagaagtcattaagtgataggttttgctcttctgtttgcttctaggcttggtaagatggtaatgagaatgcctgttcttttgattactttgcccactccatttcctccctaaaatctttcagttaaaaggtggatcctcaaaaagtttcattgtccatcctactgcctcagtagagattttatctaaactcaattagataaaaacaaataccacaggaaccctaggaaagcaagtcgcgccttcttgtgatgaaacggtccaatgctcagcatccttttcctttaggcagaagatatttctatgtggcctgttcatactaatatgagaagtcttatccttatgtccttaactttaaaaggtcagaaaatagattgtaaaatctatagaataaaactatgtttct

SEQ ID NO: 47963 - DNA, 1677 bp, Homo sapiens
agtggtgcctgaactgaaggagctgatcctatggggagaagcccatcccaccatcccacaggactggcataaacactgaaggtcatctctggttgaaagccaacagcctccctcctaagtgtctacactgagtgcttaacacagaatgacaattctattttgggctcccccatcccagttggttataaatattaatttattgggggagtatggaaaagcattgttctaagagccataactatatcaaaagctacacccagaggtatcagtttccccttgtctcctctcattctctcctctcattctttccaccccattcccacccatcccctataggtaaatgatctcattaattactggtttctacttcctctgtttcttttgcacaagagacctgatacatgcatactttcctacatctcccttctttcttacgtgaaggataatatattacattcttttcattttgcttttttcatttaacagtataccctggaaatcagctcatatcagttttcagagattttttccccttttttggcacagctgcacaatactgcattgttctatagttttctcaatgactacttagattgtttctaatatttttcagtaagaaacaatattgcaataaataatataatgcacatatatatgtatatgagaggtcttcaaaatgttaatgggaaatgtgtattatgaaaaaactatgcatgaattttaaactttttgcaccaaaataaacctgtactaacttgttataacatgtctgaacaggttcaagtttgaggcattaagaaggataagacatcaatttgaaaagagcccctgtcagagcaacatgacttgaaagcaagaagaaaaaacaaaaaatgaagcaagaacaaacatcaaatttatgctgagtttggctgcaagaatggtgaaatcattgatactttacaagacactaatcaggacagtgccccaaaggaatcagcagtttacaaatggatataacctgttttcagaagagacaagattaatttgaagatgaagcagtggcggaccatccatgtcaatttatgagaaaaaaattcattctgttcatgccctaactgaagaggactgacaacagcacaaacaatagccaacatcatagacatctcaactggttcagcttactcaattctgactgaaagttaaagttgagcaaactttccactcaatgagtgtcgaaaccctcatgcccagatcagctgcagacaagagcagaggtttcaatggaaattttaaacaagtgagattaagatcctgaagcatttcttgaaagaattgtaacaggagataaaccatggcttcaccagtacaatactgaagactaagcacaatcaaagcaatggctaccaagaggccgaagtggtcccattaaggcgaaagtggaccagtcaagagcaaaggtcatggcaacagtgttttgggatgccaagacattttgctcgttgactttctggagggccaaagtgcagtaatgtctgtttattatgttttgagaaagttggccaaacctttagtagaaaaatgcccaggagaacttcactagagtgaccttcgttcaatttcagatcaccacaataaagcaaaaaattgcaattataaattttttggtttcccagtacatgtaaaagttataattac

SEQ ID NO: 47964 - DNA, 1413 bp, Homo sapiens
agaagaaaagaactgaacatttatcctgccttttcattaggacccatgtttgtgtataagtgaacagatttagttaatggagtctactctatagaaggtgatctaataactagaaatgggaaaccaccattaagctaccccatggaattattagtttaggtgggaattatgtcttggctgaaatactgtcctatctacctcagatggatgactcattcagagagcctgaaaggaagaagaaatgcgattcatcaggaacataggagaacagcgaggtgtcctgcttcctgctaatgtactagctaatgaacgtctgctaaacgcatgtctgtagggaaggcagattttgacctatgactttcataataaagttgtcagggagtagctaatcctcaccaacttttctatgatttctgttatatctaccaaaaacaaaataacagcaaaaccctgggaatcctacgtgaccagcccagtttaggtcagttctcagcagctgcctgagggaagatcaggaggactgcagttttctcactgtgggtggctcctctccacagacatctgcagcctctgccctctccacattcccaggggacactgacctgccagggctgcaggcagagccagctcagtctttgctgtctaaatgcagtctagagtgcacttctcttctagaccttgaaggagaaatgattatttttgagcccatctagtgtcttctcagtaatctgatgcaatttcagagtatcctcaggtgttgaaacaacttgtactttcttgttaaggcttgtaaattctccatataaattaatctaagaaaacatctgagaaatccaatccaaaaacgtaaaaacacgaaagagtaactgaacccaacttgaaattcggaatggcagaaattcaccattgctatgtggagtgtgggaagagagctgacaaaactgaggtatgtcatagtaagccaagtgcagtcagaggagaattatgaaacaagagaccgttgatttctccaccactcccacatgcgggccactctcactgcgcatgcagcctgcagtcatgctgcccagtgccaggattcccactgtctaggttgagaatgtttgcttgtgcaggaagtatttcccaactgtcacctctgccccatgaagttattgtaacaaagaaaagcactgtctctggagctgaaaccaacatgacactttactgttgacaactagcatgaacttcatcttggaagttagtcatgactaacatttgagtctcctaactttctttatattttgtcatttaaatgaaaaatattttgagttcttgagagttattttgagaaagaatgttatatggcagtttaaattctgaatatatattgttgggcttttaaagtaatcaagttctgcatcaacctaatct

SEQ ID NO: 47965 - DNA, 913 bp, Homo sapiens
cttacaacttataaaaacaataatataggttgggtatccctcatctgaaatgcttaggcccagacatgtttcagattttttcagatttcggaataactggattataccagttgaacatccctaaactgaaaatccaaaatccaaaatgctccaatgagcacttcctttgagtgtcatgttggcactctaaaggtttcatattttggagcatttcagatttttggatttgggatgctcagcctgtatcctagttcatgttaactttcatggtttagtaagttgtttccccaactgctaaagcgcatctatacacactccagtcccgcagcactccctcagaaaagattttagtttcactctccccaattcctcaaattcctgaaaagaaagtaactaaattgaaatctgcttactcgtgtttgataagccgccctccctggatgagctgggctacttcatttgttgcgtggcatgcaaacagaagccagttccgaggctgtaccttgtaggcaaatctcatgaatgtcaaagaatagcaacagagggctgccaaaaatagcagagcaaagacaatcaataacttagaaaactgagagggttgataggaccacagagatgaacagttccattgccctgatcaaaaaagaacctcttctgcgaaagcctttgacagataaaagttgttacttaaatgcctgtatcaataggaagctcataaaaaaatttactgtactgctatgcatttttgttaattatttaaacatttaaggaacatatttccgagcaagagtaggctgaaatttgttctagacactttttttgtctcctggagttgcttataatccattcattatctgaaagaattgttatttattccctccacaatagttttatgttcaaatatcagggtttc

SEQ ID NO: 47966 - DNA, 664 bp, Homo sapiens
gtgtgtacaacaggcaactgatgaagtaaaaagaggaagggatggaaccttgtttctgattagaagaaaagagatacaatgacgttttctgctttatattttattctcctttgctaaagaaaagccgggctgtaagcgtaaagcttggaagaacaaataggaagtactttcctctgatatgttctaggaagaaatgtttctctttctagggcaggaaacactaaaataaaaagcttctggtcagagtgttgatacctgacctcaaactggccctcaatcactgtttggcagacctagcatgaattcccactgctgccaagaatggcagggtaaacagatcagctgaatgtttcacatcacgtgttcacctttcaaaaataatttcagttcaagatcatagagctttatagctcacacaagattttaactttctaaataactgtaaactttaaaaaatgttttcgcttgcaaaaacagaaggatataataaaatgtagagtgatttggagtttccaagtattttcacatcccttatccaatttaattttcttgataacccaaaaagagcattatcattaaacccatttgatggacaaataaagtctgctgggatcaacttgctggggatcctggactgtaagtcattcttctgaatcttagtgtg

SEQ ID NO: 47967 - DNA, 3347 bp, Homo sapiens
aaaaaaaaaaaaaaaaaaaagaaaagaaaacggttaagtaattatcagcataatttttatatagctaggtgtcataactgtatttttaattttaccacacaatgttatccttagctgtacctattaggaaggctcagtatccaacacattagtaaaaagctaaagtaatattcaaagctgtagagaaacttaacagcaaggattgagagcataccctcagactgctaccttgttcacatttttactaccattaatctgatacattgctgtgctccacagtgctaaacacccatcttaattaatagtagttctatttaagcatagaaatgtctttttttgaaagtcagaagtgaagcttctgtttacaagtttaccatatggcagactgaattatttttcctaccctactgctctataaaagtagaagtaaacagtatttgcaataaaattcaggatttaaaacttttttattgctaaaatcaagttgccttcatactatcccttttgtgtggttataacaggatttattcctcctcagctttcatctctttacctcttgaccacactattaactaccgaaaaaaaaccgcagctgtacacgtacctaggttttaaaatcatacactgaaaaactaactaaaattacactcctaaataacctaaaactgcttcaaagttatattcaatattttgaaataaaagcaagcgccccaagatgagaggtgcaaataaattatagaaagtgtattttcaggctttccaaccgcgaatgctctttgtttctaactggaaaggaggagttaacagaaaatagaacaagaagaaaaagtatgaccttagagacacgtcactttactttggttgacagaatttcgtatataaaaacatcttaaattgtacttcctcccaagcttaaagtccttagaatgagaaaaccgaaaggcgaacccaaggccagcacattttatttccgctgtcccagaagcgcgctgggcgcacccgaagctccgctccaacagcgccgcgccgcgctctcagcagcgcctcccgctggcgtctccccaccccacacccaggtcgccgcctctggcacacctggacggccgcaggtgaccggcgacccactccgaggatctggtagaaaccggccaggaaaccactcccgcccggaggagcgagccactgtcaactggcccggagggacgtgcccactgccaaccatgggagaggaacgagcctctgtcacccctgccgggtcaccctgccctgaggggcgcccactgtcacccctgccgggagaggcgtccccatggtcaccctgtcctgaggagcgccgtcgctttcgtccctccaggtccccactgccactctggccgggaagggcgtccactgttatgcctaccaggagaggcgtccccagtgtcaccttggccaggagggacgcccaccgtcacccactccctgaaggggactcaatgtcacccctgccttgaggggcgcccactgtcaccctgccgggagaggacacccactgtcacccccgccctgaggagcgcccactgtcaccctgccgggagaggacacccactgtcacccccgccctgaggggcgcccactgtcacccccgccctgaaaggcgcccactgtcaccggctctctacgccgtccgcttcggggtgtggcggtccgggagggatccgggtggggcccccctgacaagcgcaccctctcgcctgggccccggcccacccgctgcccggggccaccgcgtcctcgcggccgccctcgtcgcggactgcacgggtcgcagcctcccgggagcccctccgggttgcggggttcggcctgcggcgctcgtcacctcatgaggtagtcccggaaatccttgcttcggacatagtccgccgctttccgcaccaacgcgcccgccatggctgtgccgacaccagaccccgagtggtccctgcctctgctgccgcttcccagagccaatgacaccccggccaaccccccggcagccgacggcgagccagcccgaaggcccgcctcacgacacccggccacgccttacggccgcgccgcgccgcccggctctcggccaatgacagggcgcagggccagagatggtggcgcggactggctggctcgtgccgcacgcctccttcccgccctcggtggcgcacgggggcggggcccgctgccgtaaaacggctggggctgggccggggctggcaggcggttgctaggctccagcggctcccggccagcggggacgtggaggtgacatttctctgacccacaggactgtgggcgccctgccgagcgtcgcgcggtcttggggcgacctgcagtggggcccctgcggcgcagcgcgcggtgggactggccgggttcccgcgccgcccagggcctgtgtctgcgccggttcctggcaagggcaccttggccgggcggcccgcgtcccctgcgcttcccacacccacgtgggcggacccggcccgcaagctgggccagcctgcggtttccgggcactggggagtgcgcagagccccgggccagcgaccgcagccggggcccctggcttctcccgagcactttcccccggaccggtccctccagggtggcgggcggcacccagggccggcgctcctcaccaacgcgctgcagctacgggctcaggagggagccgcagcgtcggaggaggaaagcatttaagaatagcacaaagccttaggctcgaggaagcgtgactgcttacgtgttgaaaataaaggttctgtaagtcccaccgcgggtgcatattgaaaagaaagggatcattagcacgcgaccctcgcctaggagtatataaaccgcagcacgactttcggatcacaaaggcagagaaaagaacacattgaaggcttttgctcacttttccaagttgtttcgtttcgttttgtttctaatgtggacgatcatttaaaatgcctctggtggccgggcgcggtgactgacgcctgtaatcacagcactttgggaggccgaggcgggcggatcacctgaggtcaggaattcgagaccagcctgggcaatacggttaaaccccctctctactaaaaataaaaaaattagctgggcgtggtggcatgtgcttgtagtcccagctacttgggaggctgagacagaagaatcgcttgaacccgggaggcggaagttgcaatgagccaagattgcgccattgcattccagcctgggcaacagagcaagaccctgtctccaaaaaaaacaaataaatataacaaaattcctctggtagccgggtgcggtggctcacgcctgtaatctcagcactttgggaggctgag

SEQ ID NO: 47968 - DNA, 974 bp, Homo sapiens
atttcattcattcattcattctggaaatggggataaatagcccgtttgtctttcctgcaggtttgttacgatggtgaaggcaatttagaaggaactatttagtggaggataaaagtgttttgtaaatgttaagatgcattgttttgtttctgtcctgttgcccaattttctctcagcccaacacctgcctctatttggttcttaggttacacattaattccatttgcttagtaatttaaagaatgtactgtagtacaccaataagctaacaaactcgggcccttgaccccaagtcaccagtgtcacctagattcaaaaaccaatataacgagtcaagtatgaatgcacaatattttagctaagcccttcctgtcccacctctaatgaatccacatgctgccccagggcttggtacatgctgttaagtaagcagctttgctccctcctgctccctgtttttgtcttaggttggtttcagtccttccactgtggatggagaagtcacaaagaaatggttttgcaggcaaggaatctttactctgtttagcaactcagtaacttgctagcaaataaatggcaaagggtcaaaggaagtggaaacatcactattttgcaatccctattgaaatgagggattcaagcagcaatcatcaatagaagccaaaatcctcctttgacgggaactggataatcccaagtgctggactgtcgcccacagattctccgctgctggtcatgaggggaaaagtgctcaacatactatacaggcagcttacccaacccctctgtccccaggagctgggagcagggagaaatagtgaggaggttttcatggtcaaatgtatttaggagacttatttgaatcaggcaattacttaatttctgcagctcttctgagagcctttactaagctatgtgaattgtgataccgcaagaggaactctcaccatgtagcatttcccaaatttttattg

SEQ ID NO: 47969 - DNA, 1733 bp, Homo sapiens
aggccctacctgttggggttctctgctcgggttcagacagagcctcacccactgggtgcaaattcactcacaccaactcctcagctccacaggcgactgactgtagatgttactacattttcatttttcttggcttgtaagtccctaatgacttttccccctactacctgacatgttagaaatggtcattcccatagccactgaaagatacccatgttaatctccacctctgagtcaactggccttgtaagcacactaacccttcatcacagaagaaagtgaattatgtgagtgggttgtggttgggaaccacttactcctgagaagacagcagaatcccaccactaacctataggaatgaagatgaccaagtcatgctggaatagactcaagagtacagaggtgggcaactggcacacccaaaggaacacaggacataatacaaaccttcctttcccaccacaataataaaaccccaaagagaatgtaatgttactgtttctctgtggagcagaatccctctgagtccagctgtctgaatcgggcgtcgttattctaggtaggccacccacagccttccagtaagctccaccagaaacccaaacaaaacacaacaaaaaaaacttgtcagggcagtctttgtaaaagtacaatcccctaatgaacattttctattgtttcacccaggcagatttagaagcccgctagaggctggtatgctgggcgtggactcagtgtgtagctggtgtccagtgttctggccaagtccacgagttctcaggcaagtgccaagaaacctgcatgccagcaaccagaccacggggcattagccggggctgactcatcacatcccgcctcgccaaacacgttttctcttcctgttacccagtgccaagtggctgtgctgaacaagagggcacaaagtagaacatgccctccccctctctgctaagttcctccctgatctacggcaggcagttcccacccagccaacaggcagaggcagctgcagcctgagtgcgcagagggtagctcctgccggggtgaggaccgtgggcgcggagcatgcttcccaagaacagcccgcagggaagacgcccaaaacctaaatcgacataaacacggtcctggccaccacgtcccccacagactcaatggtcaggtggccggggtcactctgaaaatgaactgttctcccactgagctgtgcctcaacccaaattaacctgaagttctgtttacagggattgagagaaatgaatggattgaattatgctaatatcttcccttcccataatcctaattgagtgatatggtctggccttagagtttctctggcacctttgtcaaatgacagaaaaatcagcttttgtgtttttgtgtctgttattaaaaaatgttttaatgaagtattataccacataatagatatatagaaaagtccaggcaacttacagaaataatacagataaattacaagaaagttgttattcccaggcaaatatccagagttcaaaatgaaactcgaaatccttctagtctctatatacagactttcctcactctgtgaaccctcactatcctaatattttccataacaacttgcaaaacattttagccccagttcaccatccaaatagaaagcctgttacaccagtgtatgtcagggttcttcagaaaaacaaaaccagtaggtgatatgtgtgtatgtgtgtgggtgtgggtgtgtatag

SEQ ID NO: 47970 - DNA, 597 bp, Homo sapiens
tccaaaacaaagtcattcaaagtaaaatccccccactcctcctgttataaatttggcctcacagtttaatgagtaaaagctgcaagcccacaggcccttggcaggatgtgtggccaagatgtcttggtgcaaagaatgttaccgtgcacttcgagtgcagagactgctctccacagcaggccccaggcttgcattctggctaatgtccatctgaaaattcagattgtgaaactacagcatacgaatcattccacaggtatgaggcctgtttttcttatttgtcaatctcattcaagcctttcttttctttggcaacaggaggaaatacactggccaatacctaagtactaatctttgattcattttttaaaaatcttgctaatttcatacagaagacagaataactgaaagaagaaacaattcttttctctaaaaggctagataatttctaccagtgccttctcctttctcccaacagtccccactcagccattccttgtgggctgatgccagaaacagcgtggaaaacaagtctgttttccaagaggggctattaccacgaattatgtttaaaatgacagcatcaaagattaaacc

SEQ ID NO: 47971 - DNA, 2313 bp, Homo sapiens
gaataagagaataagatttgatggttgaaataaaacacaccacgagagaaccgtccacaaggaaactctaagatgccaagatgcgggacaggtagaaaggacagggctttgggagtactctgggttttcaggacgaatctgtatcagcctcggcgctgcgaggatattgcatcaggctctttactcctgaacgccgttttagacgcctaagcagattgtgctgctgcctgttcttccccgttctgtgaattctacactgacttcaagtgcacgaatgagctacaagataaggtggaacctgccggccgggcacggcagacagcacctgatcagcgcctcggagggcggagctggggggcttctccactcgggactttgagggacccccgcggagcgctccgcgccactcggcggtctagctgcagagaaagcccctcctcacccggggctccctgtggcccacaggggaccatcccacaccccgtgcagccagcggcggagaaaccagctggaaatgcagtgggggtggagttgcccccgcgaggacccacggaccgcccaattactacggagtcccagcgataacgtttggagccgtttggttcgattttcggaaccggaccagctttccagtaacttgaactccctgacgggtctcggggtccacccaggggtggcgaggcgggctcgggcgaccacggcccgctcagtgcccggcacctgcgcgccccgagggcggccgcattacctcgagccggctcaggctggagctcttggagcgcgacttcctgcgcaggtacacagagaagaacctgcgcacggcgaacttcttcatgctcaggtccatcgccccgcgcccagcccggagcagccgcagggccgggggacgcgcatccccggcatcccaggcgcggggctcaggtccgcgggcgggcacgcgtggccagggagcccggcacggcggccatgggcgcggggcgtggggcgcgagctgcggtcacaaagggcaggccgcgccggccaccgcggccggggccacaatcgctccctccgcctccttctccgcctcccctgcgagtaccagcgccggccacgcgccacgcctacaccacgcccaccaccactaccaccaatcagcgcccgccgctccgcgccccggcacgcacacctcctcctcctccgccccgccccgccactacggccaatcagcgctcaccacccctcccgttcccacccaccaccagcactgccaatgagagcccaccgccccgcccgggagagccccgcctctgccgatacctccaatcatcagcgccgccctgtggttccaggtgcccatccctcctcctctttctactccttcctacaagaaccagctccgtgcagccccgcccccacgcggttccgcccacggccccgcccacagcactgcccgccaatcagtgcccgcagccgccgcatacctaatgagcctcggcccgggacagctcccggcccgggcgagttgtgcagctgctccggagccgcgcagtcgcgggcgttcctgtcacgcaacttcggcccggctgctctttcttccagcttggggccgtcattatgttttccttccttaaaacatccctatgcacactttgtcatcatgtttttctctgccgaaccaaactttaattgttgatcagcaaacgcagccaaaacctcagcggcacagcgagcgagggaccgccgcctgccagcgggccctgcagctcggccaggagccgccctccgcggaaccggcgccttccctccgccggagcggacaaaggcgcccgagggcgggggctcaggcagccctcggggcgcctccctcccgcggctgcagaacaaagacgcatccgccctccgcagccggtcccgctctaggaaacgtctacacagatggcttatcagggcccgcgctgggaatacccgggcggggtgacctgggtctagggcaaggccctcagacccgctgctggcggcagcgccgctcgggatccgccttaaagggaaacacttttttcttttttttcctagaaatgctcaccaagggctgcagcagggccgagaatgcgggctcacgaccccgtgcagcctgctctgttttcctcttgtgcacgtgttgagtttgtatttaaaaacagggagaaaccgagcccattgacatagcaccatcaccacctgcaaagagcagaaacgagtgcggtggtgagttgacaagtcttgcttgctcttttgcagtgcgaactgcaaaatcctcgcgttgttttgctccctggactagtcagatgttgc

SEQ ID NO: 47972 - DNA, 535 bp, Homo sapiens
tcttttcgctaaataaagttgtattttacttccatgcaaaataaacaaaaactcagtttcctgccttcaatccttctctcttttatttcacagaaggaactttggttctcttaaataaggcttccactctgcatgtctttcccaacagataagatcgtttacgtctacttacagttctcaatgtttgctgttctgcgtcaccctcagagttacagatgactgtgactcacgcctggagaagcagcaaggtggggtgagaaaggccaggtggtgacctttgtccaaccatggctggcaagcgacaaagaaagggggctcaaaacgtggcctctgaagtctcgatcccccgcatttctgctgcgccttgagccccctgtgcttcatggggctgggctctcaaccgcaaagcaggtattttttgaccacagatgaatttctaaaatttggcaaaaggatttaaaaactctagaaatagtgtgtatttagatatctgttccccagataaatttgagtatgactttttttgatcatggtc

SEQ ID NO: 47973 - DNA, 1176 bp, Homo sapiens
gaggaagaaccgtcgtttcaccacccgccgcagtgaaagctgaaattaagtgtcccctccacgacttcttcgacctctgagagaacttcgagtgcaggaacagtgctccaccaagcctgccacctgctttgtcgcgtcctaggctgggagcagtctgtgggatgagtttccagtccagctccaggctggagtgtacccaggacctcaccctaccccctactccttcccaggggtcaccccggggagtgttcagggctccccaacccacttcttcccaggagtcaccccagagcgtgcccagggctccccccaacccactccttcccagaggtcaccccggggcgtgctcaggactcccctcatcgcactccttcccagaggtcacttctgagtgtgctaagggctccccccaacccactccctccaggggtcaccccgaggcgtgctcaacttcccaacttcttcccaggggtcaccccggagcgtgctcggctccccccgccctccccagtcgctgcccggggctcagcgaccgccgaccccgagagctgcagccttcacccagtggaaagctctagggcccggctcccacgctccccactttacctcgcaaggtaactcaccgcaggcgcttgtccgcaccgcccaggcaaagcaacgccaggcagaggcagcccagcagggccccgcgcagggctgcagggcgcatggtgccgacctgcggagagaacgctgccagctgccgctccggctcccacttcccacctgctgcccgaggaagacttccgggagaaacgctgtctccgagcccccgcgccgccgcgctccctccgctgcagcagcggccaccgggtgcgcccggagccctgggacggcctaaaccagtatctcgcgggccccgcgccgggctccgggaatggccgcagcagccctggcgacccgggcccctcggagctccccttcaggatcgtgcaccaagcgcgcacgtcccgggctctgcttcgcgacccacagcgaccccagctcctccacgctgcagccgccgtccgcccacgaccacggtcagtcgcgttgctcccagcccagggcgccctgcgggcctgcaccggagcagagagccacgcccccaggacggcacgcccccgccggtggacacgccccccagaacggcacgtc

SEQ ID NO: 47974 - DNA, 1802 bp, Homo sapiens
ccggctttaggctagtgggctttaactacgtcgataatatgactccggcgatcttgtgcggcgatgggatgcggccgtgggcggtggagtccaggcggagtccgctctccacacgcgagggcgcctcctcctcaccgctcgccggcttcaaagctcgcgcctcaggcgacggcagccaacgggttgccggctggaggccccgccgacgccccgccccttgcgtgcccacccgcgccccgcagccccgcccccagcgccgaccctaagtttcggcgctcagtggtccggcgctccccaaggctcggtgtccagcgtcaaccccgaggtctctatgccccgcctcccgacgccagggggcagggccagcgcgctgcgcgtcggggcggggctttggctgcgtcggccgcgtagcccgcgcgcggagcgtaccctgctgcggccgttggccgttagcgcggcttcggcggttgtcttggagaagcaagatggcggcgacggcggccgcagtggtggccgaggaggacacggagctgcgggacctgctggtgcagacgctggagaacagcggggtcctgaaccgcatcaaggtgaggccggaggctggggccgggcctggcggatccgcagggcttgcgtggacagcgggcgtcacaacggtcgcggcgaggaggccgcctccctggcgagggaccggggccggcgggcactgggggcgcgccccggcatggcctccgtcctgcccgccccacagagggggtcggctcgttcgttcgtgtggtcccggagggcaccgcggactgggggtgcctggcccatcccctgcctcattccgtgggggcgggaccgcggggcttgggggccacacgggcggcccgcagctgggccctggagtgcggccccagcgtctcttcctcaggctcgggcatgatccgcggcgggaaagcagcgcgtccagccgaagcctgggggtcggagagcttgtgtgactgagaacgtttcggaaggcgtttctgacctttgcacctgccctcccagctcgttggcttgctcgtgtttgttgctggataaatgtgagcttgttgtgaaaattgtcttgaaattataatttcctgtttcttaacttttttttaaggctgaactccgagcagctgtgtttttagcactagaggagcaagaaaaagtagaggtatgaagtttccagattttaacatggctgtattcgttaatacttaatttcttattcattaaaaaccgtcttaaaaatagtttatagtaacatatagctagggataattttgaactgttaaggattacattactattgagagagagccaaaattattcttttttcgtgtagcttttgaatttgggggtaatcttaaggtaccacagtaactctgatactaatgcttaatctgaaacaaatggtcataggagtttcttgaagaaatggtgccattgtcaatgtgttaagtgcaggttcactcagatcctttagtaagctaatatgttattaatccctatgaaacggggtatatagtatgcaacttttcccaaaattatctgaccactcaattattttgacaatgaaaaagacagcgattattttaaaagtgcagccactactctatatttaagtgggtaatttaactttttcggagtcccaccaaccatcctgagtaaatattctggaatttgtcaacaagaatagaaccatcatcaaagccttaaactcttgctgtatgacaaatcagtctactgtcctctcacttctttagacctgtatacctaatctctaattt

SEQ ID NO: 47975 - DNA, 1132 bp, Homo sapiens
cactgtccccagtaatttgtacctctgcaacctaggtttccactcagttgctaccttggagttcttcccaattgcactagcagtatttggtttgttccactgttcctcttcactagagtgtttgctccctgagatcagagataccatcttagtcattgctatacctctaggggacctagtcatcactcagctggttgataaattaatcatatgatttggctgtaagagaattacattgtctaactgtctggacagagcttgaatcccctcagcagtctgaccgatttagagacagtccagccttatctgagggaagatcgaggacaaggcccgcagggtctttgaacggctctctgtcatgccaggtcttctttttgtgatctgcatcttctgcatgtggctgtacatgcttcctgggtctttcataggccatccattcacattttaagttggctctcatgtgcctccaagtctgctttgaggctgacaactctttttcctcatctagccctcagaagtcctgggagggaagggctgctgatttgcaaatttgtcctttatagccttaagttgatctgaaggtgccccctctgtcagaggcttgtggtgcactttgagaaactggtaacactgcctcactattcaccatcccaccttcattcagttgccttttattaagatcttactgtggaccaaggtctctgttaagcacatcatgtacctgaatccttatgttaactctgattggtgtggctttggctgtacgtcagagcagaggacatggcccagaaagggcacctcacattcccaggtcacagagctgttgagtggcaggtctgaggcctgagcctggctctgtctgactgaaggtgcccttatttgctgtgcttcatggcctcttcacacctcatgagtgttttttaacttttataacaaaacaattagcatgttgaaaacgctcagtagttcatctagtacctagaggggattgatgatgacttgctattgctatacgccattaagtcaagggaccttattaatggtgagtgtgccccatgttaattgccttagagtacccggagtaaagatgaggtgttaaccacattttatagtcacttgtaacagtttatta

SEQ ID NO: 47976 - DNA, 497 bp, Homo sapiens
taaactctatggcatctggctcagcgcaaaccgtcttcccaaagacaagctctgcccacccctccttagtcctagagatgatgccgtatgcagggaggcacagcattgcctgtgcttggcgagggcacctgtccggctgtggctacagggagggcaatgacaagggctgtgaaacactgcctgggaagccacgtccccagctagcagggccctggccctgggagggcctggggggatgaagtccggtctctcccagacaaacagatgatgtcagtgagagagggattccctccaagaaggaaagtgtcagataaacaccctggaacacaggcgcttgccttcctgggggcgggccttctttcaacagcaccgttacagacatcctgtgaacaaggccccagggatgttctattcccatccagagaggtgctttttttttttaaaaaaaaaaaaaaaaaaaaaaaaaggcctttctctggatataaagaaagttatga

SEQ ID NO: 47977 - DNA, 962 bp, Homo sapiens
ttgtctggttagttcaggtttcatggcgcggcatagaggaccccgaccgttcatcactcattgctgtgtccccagttggctgtggcctgaaactgcctggtttcagtcaacactgttgccgtcttgcatcagccattcagggggtgggtacccatgggagggcctcagccaggacaaaggtccacttctgtctaatcgtgtaactttaaaataaagcttttgtgcagggacagagtaaacaaactttaaatgtgaatttgcatcaattgaacatttacaagtgtgacacttttacctggtggcccactgggaccaggacgaagcagctggaggggccccaatgtgtgactgagagaggaatgtgtgggcagccgtagcgaggctgagaggtgagcaggctgggaaaacccagcgagatgagcgtggctggagaccggcggaacaggcaggctgtgcagggcttgcatgggcgagtgaggcgcccgtgctggccagaacatcatggctctgtgctgagggaaccacggtgagcgacgcccagagacccagtcttggatcaggagctgtagtggatacagttgagggagttttgtgtagtgcctcactgttctgataagaagaaaacatgtacaagctacgaactgcaaattgagaaattttggtgattttgcaaatgagataaatggtcctatatttgcatttgaaattggcattgcacaaaataagttgactaataatttttaattttccttcttagaatgacaatgtggcaaataaaggaacccaatgaaaagaagggaaagagactgcagagggaaggaaaaagctttatattttactaccataatggcactttttaaaaaatttttatttatttatttatttttgagacagagtcttgctctgtcgcccaggctagagtgcagtggcacaatctcggctcactgccagctccgcctcct

SEQ ID NO: 47978 - DNA, 731 bp, Homo sapiens
agccagtgggccgggggcacgttacggccagtcaggtgcatttgtctccagtaggatcaccctctgtgaaggtagcagcttgcaccttgttgactggtcaccagtgacatggagtctggccaaggagccatcttcaccctgagaactgcgcctgtgcccccagtgctcctgcctggcttctgctgtgtgcctacaaagctgggctttgtgctggcccctctgccttctggcctgtgacctgccttggcgacctacccttagccggtggagccttccagctggcctctgaccatggggctctccaggccctgagtcactgctggcctgaccaattcaggtgtcctggcttttgctgcagggcttctgtcctgggtctcctgattgtccagttctgggctccccctccacaaaagaacggcccctcctgcaaaagctctggtcagggcaaatccaagggcagaagaggcagattgcaggtcaggcagagagtggacgggcagctgctgggccactgtctccaccgttctctggctatctctgtctctctctctctgactttctctctctctgtctccctctgtctctctatctctctgtctctttctctttctgtctctctctgtctctgtgtctctggctatctgtctctgtctctataactctttctgtctctctggctatctctgtctctctgcctctttgtatctttctgtctctctctgtctctgtgt

SEQ ID NO: 47979 - DNA, 1332 bp, Homo sapiens
gtgccagcataagccaacctgttccttcccacaccgtctgggccttcgggccctgccaggtggcaccactgcagaggggcaggactgagtgggacacataggtgtgtggttacctgcccgagagagggtggctgaccatctgggacaccatgcccagtcacactccctgccacacaggctggccctgagccatggcatttaggccaaggggaggggccctggctggcatttgtcacacgtcttcccgtgtctaaagtgcagaattcgggaaatacttctgagggcaggattgccatgtagccagctgtctgccagggttcatcccagggcccaatcccactgtgtgcttctttacagctcatcataaacaggtcaggacaaaaggagttgccagccaggaggggaagtgagctggggcctaaatgattggtgatgagccgggactcacactgcagtgcccacatgtgcctcgatggtggcctgactcgcccgtggggctggcggggatgagagttggcctctgtcgcaagcacagggctggagtcgtggaagcggcttccctgcagctgctgctgtctcaggtgacggcatctggtacctgagctggcattcagtttctttataacccactggggtgggggttctggagggcggccctgggcagcagctcaaccaggagaatgggcagcctggagggtaggtggggggcttagcttaccttacagagttctttctacaacaattcctttataaaagtgtagttttctttaaaaattgtattcttcttaaattagatattcttctttaaagtatagaagtagtatataggtgcatgaaataaaaagagtaaacatacccctttcctcccaccaattctatgtccagtgaagagttagttttctttctctctctctctctctctctctatatatatatatatatatacacacacacacacaatgagcctataatacattttgtatatatgcatgtctatatatacatgtctctatttatattcacatatggctatatgaatatatatacatatcttatattcacatatgtatatatggacatgcatatatacaaaatgtgtatatgcatttttagtcaaaacttaagcaataaccttcaatgcttgtctttataagatgttctcccttcatcatatcgagtacctttccagtctgtctgtctatagctttccagcaaaccctttccaaagacagtggagaagtttccagcaggagcagctgctgagagacccacactgcacatacaggccttaccgcccgctgagcgggaagaagcggcacagtggcttctcaa

SEQ ID NO: 47980 - DNA, 1668 bp, Homo sapiens
catttattcagattcatgatgcaaaactggaaaaccacccaaggttccttctgggcaccattccctcaggatgatgtggttttgcttaagtcaagtcgcccattcgagctggggtgcaagactctctacccctaggacagcagtctcttcatgactgaaaacctttattcagatgtgcttgtgagcagaggcacactcccgtgtacctgggcctggggtgtaaacatgcagagccttccaaggagcccacgggacgatgggaggtggcagtgtgagccacaagccacacacatcacaggtcactagggtcagtgtctgtggacggggctctggggcatcctgggcagtggtgggttttctgggagcagcaggtgggggccctgtggatgtgggggagcaggggaggccagggtgggcttcctcctagaggctacatctgcatcacgtatgggctgaccactgtccaggtggggtggggtgcaggaggaaccagggcaggaggtggcagggatgctccaaggccttgctggggctggggcccctaagaaggcggcctggggggagtgcagaggagtggggtggagtggcaagtcgggtccccaagtgtggggccagcatgtgggggagggtcagatgcacctaggtcactggaagcagcagaaagcgctgacacccaggagtgactgggagctatgtggagtcggccccgtgtcacaacaatcaattccaaaaggcaggtgacaaggtccaaggtgcggccctgtggggagccgggagggctggttgtcggatagaaggtgacatcccatgatgatggcaggagccaaatgccaaagtcctcacagaatagggtggcctggccaggaggtcaggcagggcagtgaggacacggatgggagatgagcgggagccaaggagccaagcaggagccagggaggaaggggccccaggctcaggcagctgcactagagaggcctgagggcaagagagctggaaggggacatggccgttgcacctgtaatcccagctactcgggaggctgaggcaggagaatcacttgaactccggaggcagaggtcatagttagccgagatcgcaccactgcactcatgccaggctctgctgagctccgaggtgctttgtgcgggctggctgtgttttccacaaggagatgcgtgagagcgttttggaggaaggtcactaggaagagaaggaagctggggcagtgtgtgtggccgcttgccggagggtgtgcgtactgggtggtgttgaaaatgacacagatgaggacttagggtaggaaccctgaatttcccaaaaaaccccatctaaggccccgaggggtgtcagaggcccaaagaggcaagactgcgtgtctaagagatgctgatgaggtgagatgaagtgtcctctcggaggtgagcatggctcacatgagaccctcttcccttcaggagagacttcaccattctgcctttatctgggaaacactcggggcttagaaaatggaaaaagcaaacccacaaacgaactacaggccaatgtttctgagatgacagacctggctgctgtccctgcactgaggataaagagcacatgtgacctcagatcgcggacagaacactccagccacgtcctttcttgtcttcctggtgggttgcgtatcca

SEQ ID NO: 47981 - DNA, 1357 bp, Homo sapiens
ggaaggagagatgagtgggcaggattttcatctgtcaacaagggagatgccacaaagcaagcccaagttacggagcaggcacacgcctcacaagacactcatgccctacgcgtccctcttccagtcgcactcctgcaagaccaagacctccccgtgtgtcctgtcagaccgtggcaaagctccagatccccaagcaggcaactttgttcttgtttttcctttcaatgaagcaactctcggagcttccaggaatggattaaatgtcaaaagaataatccaagagctccagaaactaatgaataagcaacattcctaagtggtaaaaaatcaaatcaagaaaaagtgacatggatttttaaaaaccaaggatcctgtcctagagaaagcaatagttcaagtccctacctgtgccaccagcatgttaactatgacattgggactgaagatgtggccatatgtataaatataacagctctgacaaagcacaatatgttcaagtggtgattaaactacattacatcccatgtttatttgctcaggtgtcttgaaagaattctacaaataccacacagcctcccaccagtaattgaatgtgctacactacgattatgctatgtatgtatttaaagaggagaaaaagattattctaatatttttaaaggattattaggtgaaaacagtacaaaagaagccaggagttaactttctgtgtgtttttttttaaatcaaccagttatttgttaaaattattttgttaacttaagatcagacaatcattcagagtgagataaatcactgaaagccctaatgactctgttgtttacaaatcctgggcttgaaatcagactttgcaccaaagagctccctgtgggggcatctttgggctgtatttaaatagtggccccttggccttgtcaccatttgtttaccatcacagcatgtgaggtcatggcctcccagatcaaagtatgctgtcattcctgccacataaaaagcatctgcagtcctaagacataaaaattccagtaggttacttgaaaacattattctagtgaaagtagtcagatacaaaaggccacatgttgtatgactccgttgatatggaatgtcagaattggcaaatccatcaaaagcagattggtggcttaggggaggggtaatgaggagtgcctactgatgggtagggggcttccctttggggtgacagaaatgttctggaactatatagaggtgatggttgcacaacacggggaattcactaagtatcactcatggtacattttgtgttatgtgtgttttaccacaataaaaaagttaaaagctggccatggtggctcatgccttcaatcccagcatt

SEQ ID NO: 47982 - DNA, 1153 bp, Homo sapiens
caccgctgctgtctccagccagagcactgggagaggcgcggctccaggaaacatttcaaggaccctgggaaatgggtggagatctccgaatctaaaaaaccttcaggagactggaagtgttttgaagttgagggttgtggttctttctcatttggtttcaaaacaggatccccatttcccttaatgtaggattcgaaggcataagcagaagaggaaaggggtgtcaaggtcagagccgcctagaagcagaagcgcaggccagcgagatgctcttcagagtgacttcgctgtgggctgcggcaggcaacagaaggaactcagcatccactggccacgatcccctccccggagcggaggacagagcccagtttcttcaggcggtggctccagccagctctgccccacagggaaggagcgcgcagctgccacacaccgcaggcagcgctgacagactcggccttccgggagcgcaggcgggtggggggcgccgcccttgtcgctgtccggagccccgcaggcccgtggccccctgcctggttctcccgcctctgcaagcctagccttcaggactccgcctcgcccccctcttttctgttcggagactcacggggccgtctgtctggaccacgtgtgcacatttctgaccacgattcctccgcacaccagctacaggcaccgcagcgctggggacggcacagctgaactgtgctggcagcgaaggggcctcacggggacggctcagctccctgagggcgcaacccacctggtccgggggcgggggggggggtgaggaataaacttccgcggttttcagtgacccagtttgttgcatggcacatgttggaaaggtgaatctgaccgcgttgaccgcgttacttcagagatgcgctgtgagctgctttgtgccgcgaaatgacctgtttacccgacagcgccctctgcagcccagcgccggaacgggctttttcatgatgttcctgcgttgtgtttacagcctccctgcgaggggttcgcacgcacaggcggacctcgttttgttgcgccttgctctattgtgcctcgcagatactgcacttgtttttacaaattggaagtttgtggtaactccgttggggcacatctgtgggtcccgttttcaaacagcttgtgctca

SEQ ID NO: 47983 - DNA, 547 bp, Homo sapiens
ccctgggcgggtggaggtgctgtgctgcctcccgtgctgtgcgcgcttctcagccctctctgccagcatttctgtcctggagctgcagctgctttgcctgcgttgagcagggcgcctgcggagcgcaggtgacatcagccacagccgtgcctgcacccgccaccgctccaatccccacgcagcccggtcacccggtgcctccactgccttggctggcgctgggccggggcctccaggtttctgtgtccaaagggcaggagagaggcgcaagcgggagctgctcttgctatgccagggcggtgctagagatagactttgccctgggctgggctgttttccccccacgcggatcctcacctccgcttctccactggctttccgcctttacatacgtctattttaaatttgtgttaggcacccccacactgtgactcccctcaacactgccgctcccccacgcacacagcggctcccccaacacacggctgctccccccacagcctgcggctccccacacacggcggctcatccacatatgctggctccc

SEQ ID NO: 47984 - DNA, 468 bp, Homo sapiens
gccggcagcaccagactattgcaaaaactgaggcaccccagtagatgttactaaatgtgcctaaagggagcagactgcccgcccctgaaaacctgaactcgggttatttaaaaggctttttattcactgtttgtaaaaacataatgtcctctagaaagcctgtttttctgataaggcatgaagagggaggatattaattcgcatattgattgactacagcattgaggtgtcccttctccccccgggggatcggcttgctgggacagctctgggagtccccgagtagtcacctttggataccatgttggcagaatctcaggtcaggatggaggagcctctgataggcattgagtggcctttaaatgaccccatgctgcttcaaagcccacaggactagtgtttgctttttgaaaaaatgactttcctacatgttctcagtaaagaatagaatccacacacactcccatg

SEQ ID NO: 47985 - DNA, 2610 bp, Homo sapiens
acatacacactcacacagagacacgcatacacatgtacacacacacagttatacagagatttacacacacaaatacacctacacacatgcttatacacacacacttatacacaaacacatttatacacacatacacacactgatacatacacacacacacacatacacttatacacacacacacacacatctgggtccaccaggaagagttgagaaattcttcaagggtgctaagaagctgatggggaccgtggcattagcttggaacacttgtcatttggacccaaagtcacatccactgctgagcccgaggctgcaggaacagtggacctgggtgagcagaaggcgaggcggagtccagatctttcccaggaaaacatcacctggcgttggaaatgaaacgcagcccttcagcgggctcacctacaatcaggcactccagcattagctgtttagagccaggctaccatttcctggattctcttctgttttccatacccggagctttcttagttttttctctgggtttcatgaattcatcagtggccaggcattgttttatcagatgtgccaaacgctgataaggacacagttcgccctttctatttgcatttgaattctttctctggtctgacttcttgagccagcaggatttatttctgccctggcatctggtgagccgcctcccggcggctgctgccttcctgggtacatttcagtctccaggcttttctagccacagggaccctggggacatctccaaggcaagtcctaatatagctcatttcatccctctgtcaatgtcctccacgccttgaataattatcatatgaaaacctttgagagcagagcacccctgattctgattttccccagctagatagattcccacgccgtctgtctttgagccagctctgggccagggagccaggcagaatttgcagagaggttctcagtcacccaccctgcccctgaactcaacaatgagaccatccagccggggcagctgcgttcagtctctggccacctcccatctcctgccgccactgtcttgccattgtttatagtgtgacactctccacaatgaatctaatccatagaaaacagcacccagctacatacagaattttacaaataaatctacagatgcccctaccatgacatgaaggaaaaataaaatgaaaataactaatgaaaaaaatcctgtgtttatgtgtttagtatgtaaattctcaagcatgattaccctagaggaaagggctctaattttatccgaaacccctgagtgaagatgtgtttcagaattcctgtttccaaggactttttcatggaaatggcctccttacattgcacattcgatcaactctgttaggacctggagcagcatcttctaatcaaacacattaatggttcccaagcacaatgtgtaatcacacagagcaggattttagaaattggctattaatagcctcacacgagtatagcacagactccccttgggttgggcatgcagcccccggccctgggacctggccccaagcccccgaccaccacctcatggaagcacgtgctctgacctgccgtgcctcggagtgacagggctggcccacacagcagtgccacctgggtggagtagcacctggagccccacctaagcccacataggccctgttcccatttctcttctgggtggcccctccgaccctgtagtccatgtatggggctgaccaactctgggacttgcccctgggggttgttctggggccaatggccgagccctgttccaggctgacagcctggcccaggatggctcccactggtaggcacagcatgtctcctacacaatcgtgtgagactgggctgccagaatggggctgacgtgctggttgtaggtgattcaaatagtttaaataatcagggctcttcagaagaggctttgcctggggccttgcacaccccagtcgtgtcctgttgtttcaggtcagattttgccactaaatggatgaagaaaagcactttgggttttcaaggctgtttagaattctgagctacaggtaaggaattatagatcaatagacacaagcttttatttgtgtacaccatcttgtaagtgtgagaattacaagtgtgagagtacagggtaccggcacctgaggactgcagggccattgacatcagcggcgtgagtacagggtaccggcacctgaggactgcagggccattgacatcagcggcgtgatttcccaagatggtaaataattcccagaaaatcctcaaacaaaacaaagttcaatctttattctagttacattctcggaacattcagtgtacgctaaagccatgcaaaaaattcttgatgtttacatacaaaatggagtcaggttccagtgcaaagaattacaagccaacttctagctccctagggacccggtgagacatctggaaggtatgaaggatataagtcagagccagcttgatatgatttatctgtgtccccacccaaatctcatcttgattatagttcccatagtcccatgtcgtggggggagcctggtgggaaggaattgaatcatgggggtggtttcccccatgctgctgttgtcgtgatag

SEQ ID NO: 47986 - DNA, 702 bp, Homo sapiens
aatccacatgactctgtagcccgcaggtccacaggctcctcgtcatgagccaactccctgcattggatgcagctgcagggagcattgtgttgggaagagatctaggacaaggcaccgagacacattggtgatgtttgctgtgaacagggaaggcagcgtgggaaatttcgtcaggcacacgtctgaagtgacactgggatctcacaatcagaacccagactacgcaatcaattcgtctagcgttgactcagaaacagttactgccacacgccggggttcccagcaccttcgcaggagtgcagcaggaggcagcagagaacagaatccaggtgcccagattctcatctgcacatctgccaatgggtgagggagggccacagactggagggaaggcagaagagaacgtctccatgatttcaaccagccggtccccatctctctagcagtcaccaagcagtgaggccccgctcacgtcgactgacacgtacgtgcttcttgggcattcttctgtgctccatgcaagataattgctgtttttttttctttagtctttatatcctttcaactatctggaagtgtcctacaaataagtgtccccctgggcagaactcccaaatagtcacccctttgcccccactcccctccaccctgggcctgccctgacccaactcccatgctcctgctcgaagccactaacaagcc

SEQ ID NO: 47987 - DNA, 1139 bp, Homo sapiens
ctaacggggcaaccctaaattgaccagggcattctataacagcgctggtcccagcctggccacccaccccaggatgtgctggagcctgcttgcaccagctcctaagagccaattagtaacttctggggaatgtttcaaactagttagtcacagccatggtgagaaaatgcagaattaaggaccgttcccacccctgcaactacacaaaaagctaaagtgggccaatcacagttggtagtgctgaaactgacagctttcatttaatcaataaaatttgtatgagctgacatgagaaaccatttaggagatcgtatcgcttaacaatgaatgtatggagaaaagtgacaggttgaaaatagccccattaccacaccatgggtggattgtacccagagactgtctgcagatgtgaaagctgggcaaaaaccaccagaatgtcctgtgggcatggggtggctgctcggagtgtgcagtgagtgtcctatgtggctttttatttggaacttgtgcaacttgcctcctttctatcagaaagatttataacagatatacaaagatcctcataggtactttttttttctggagagccagttgttaaacatttaccagcactgctccaccgcccaaccctccttccctcacctcctcccacacactctcctcctgatgtaaaaatgcattttctagtatcagctggggactaatcccatccaagtttggagcatcttggggtgaaggggcccttgtcttgctttggaagtccttcagagccagaaacatttcacttttcatggcgtgcctggaggctgggaggatcaccggctgcctagaaacaaggttgaagttttggaaaaaagccttattcctgcaattgttgatccacagatttccagtgtttctttaatgggcgttctccggccccagcagcctcgcaggcgcttgctcacaccaaccccactccagggcttcagacacttttgaaaccgccttttggactcatgctcagggctggtgtgtgagctaaagaagtaacccagtcatatttcagaattttcaccaaaaatgttattacccagcattattttttatttcatttacctgaaaagctccagacgatggtggcctgtttgtgcaggaaa

SEQ ID NO: 47988 - DNA, 1495 bp, Homo sapiens
gacccatgactgtcactccaggtctgccgtgagccactccagttcaccggccagcaccccatctttagacagcgggtgcgtaagtcagccaggtcctgtgtcgcttaagccttccttccttgatatgtcccaaaacggcctctcgagctgcggggcaaggcctccagtcctgcgtcttgtgtttggggagcacgtcagcttccagggcagcaaactcgcggtgcttcctctaaatgcttagactatggtacaaaagatccaagaaatgccagtggcattcggttccccttgctgtgtcctcctggccctttccatgaaccttttgttctgacagggaggacggccggtggcctgggtctcacactcggccacttgagttccccgtgggcctctgcagcctcctctgtgggccacatgtgtgtggtttgggcagaacgggagacttcacaggcctctgctgggagctcgcttgtttattttggaagaattgtttgtctctgctgctgacagtgcagcctgaatcctgttttgttatttcgccgtccgcgtgttctgtcaaagaccagtggccttctgccctcatctgctgcctgttttgttatttcgccgtccgcatattctgtcaaagaccagtggccttctgccctcatccgccacctgttttgttatttcgccatccgcgtgttctgtcaaagaccagtggccttctgccctcatctgctgaccgcctgactgcactaagcagcattagatgacatttttccgtcactgaatttttaggtcaagccagttctatcgctgcagaatagataactgaacggcagcgtgacagcctttggggcaggggggccgtctccggataagacacgtttgtctttttcccaggcacacagcctttgccgtttcagagccagggcttttcctgaagactgcatttctatcagctgcaccttgtgcaggtcccaccccctcatgcccctcccttactctaacaggtgcagaaggggaaggaatgtctgtgcttttccaggttgcgtcctttctgtaatgtgactcacctgttccgcaatattttttaagcatttacaggctgcgcagaattgcggaggatgaaagtttgacagagacgtgggctgacctgagggagtcatgggcagcaaggccagtgacaaggcagatacaagaataactgcagcgtagggaccgaatagtgcacgctgcagcctcccgggggtgcagccagtgggggatgaacagacccgtggtcctccacacagaggtcagcacacatccaggtgcatttccaaacacaccaggttggtgtgtctgccaggacccctgagcaaccaaagcccacagtgcccctccctgcccccggcccaccccgtccaggaccctcaccgactgcctacagccactgaagggtagaagggacccgaacttggtcgaagaggaggaagctgctcttccccaaagcgcacattttcaggacagc

SEQ ID NO: 47989 - DNA, 923 bp, Homo sapiens
gtcctgggctccctgcagccagaggggtgatcaagcggcaggagaagccaggaatgaccccaaggacacagtcgggtgaccggttatcaccctggacacaggaggcatccacacagagacgggtggacgcagagccaggccccccaggatcctcatcccttctcttcctcctgtggtcactggggacgtgacccagggacaggcccttccccaggaaggctaagcacgaagtcccacccttcttgcgatcgaggccagcaacattggtgttcatgatgtcagccaaggatggaagctccaaatcgctcactgcccagacttgtgaaaactaaatggctgcccttttccttggaacctcttttctgaaagcacacaggaatcttcagttttccgcggagacctggaaggaactgaaaacccaggtttagtacaaggagagcgttagagatcttactaaatatttaaggaggctaagagtacagcaggcattctgtctaaaaatcacaggctacaaaaggaatcagcgacctttggtcccagtgacccaatcaacgctgaatcgcagagtcgtgttgagggagttacagactgatggtttctccaggacaggctgcatcagaacgtagaataccagtgtgaccgacccaatgcactcctgttcttttgaattaaaaaatgacaaaatccaagttgctgttcaaatcagtaggaaacccagctgctaaggtttatggcagttgggcctgcttggaagtcacagttcatgtcaatgcaaactcatggatacagtgcaggctggccagattaaataaaagttttccattccacttctattctgcagtctcatgcagccaacacttttccttgtttagtgtggaaatgttaggtgctcagacctgaggcactacagtcacactacaatc

SEQ ID NO: 47990 - DNA, 514 bp, Homo sapiens
tggagataaattcaagtccagggcagcctggatccagtacctatgtccttgtcctacactctcctgtctatagaaagggtgttttccatttatttgctcacttacgggtggtttgttgagctctgggtggatagggatgcatatgttataatagccatggtccctgtcctcattctgcttacaactttgatcaaaaaagcttccagagatgaggacatgctggaaaacgacccagtcagcctccttccctggaattcccctaagacattcctgggtttctcatcaagcgtttgctgaccgtgtctgcatttagcagatttcaggttttggagagatttcctgccactcacagttagttatctatttgaaggcaactgcaattggggaaaagttcctttttgtatgaaggtgaaatttccctacaatttctactcgttggttcttgctatctctgcccacgaggcctccatggaaaagatgtcttccttcttttgtgcataactttgggaatatt

SEQ ID NO: 47991 - DNA, 1140 bp, Homo sapiens
gtttcatattttcatgtttgtggggagaagggtgcatctcacattacaacatgggcagtattttttttcctggaaagtgatgattaagtcctggctctgtcttacacctggtgatatcttacaagtgagaaaatgcagtgagttacagtattcactgggacatgtaaaggttctaaatgacaacacttctctacagcaatggttctcaaacttggttccacagcaatagttctcacattggaaccatctggtgaccagcagtaaaataaaaaaacactggtgcccagggctcacccccaagagattccatgactaggagctgggatgttaaaaagctccccaggtgatacgaaggtgcactttgcactagacccgagccaactcttcccccatcttcccccttagcttccttcagagcatatgtaaggaccgtcaataattgctggcgtgattagccgtgtctgtgccccatctcttgaggataggagcatgctgcggccagtgtttggtgcatagaaagcactcagcatgcactgcctggatgaccgtgtggacttcggccactcaccagcactgtttgctgctttttgcctgtgtaaatgtgcgtgtttactgtttctgctatggcagcgactgcaggactgcaggactgtgaactttgccctcatttttcaccggctttatctccgcgagaaacaagcagaggaagcagctgggaaaggctggacgggaaaccggaggccacagtctcctcccaacaccactgctgagtgaagatgtttaggatggcatcaaacctggggacctcatctgcacagggggggtcctatccaccagaggatatataagcccccttccaattcaaaatcctttcatcacgtagactcgacggcatggagttagcaccccatcacagctttatgacagacccggttttttactactttgtggccatatctacacaaaatgagatacataaaatgcagttgtaggctcggtgtgtcagctcacacctgtaatcttagcgccctgggaagccaaggcaggaggatctcttgaggcgaggagtttaagaccagcctgaacaacatggcgagaccctgtctctacagaaaagtatgaaaaaattagtggggcatg

SEQ ID NO: 47992 - DNA, 760 bp, Homo sapiens
acaagcagccccaggaaaaaactctccatttctttctcgtggaggctccagaagaaaagctgcgcatttacccggcgcattctaaccgcctttgaggttccctccggcagccatgggagccgtggtggggcaaagcctgggctgggagacgctgcaaggctctggggagcagtgaggcgccgcgccagctcctccgttcccgtcatagcctcacacgggcttcgctggacacgtccaggacgcagcgccggtgggcaccaggcgttgagcgcctgccccgcgtctgtgctaagacctccctttgcattattgcatttattccaacgatggggtgaggtaggtattcttatttccattgccagagtgaaacactgaggctcatccaggggccggtgtggaaatcagggctcagccctgggcccctgctgcttggagccggtgcggtggccaccgtgacctcacgctttccctgccagtcgctctccgccgcatcccggcctcccgccccgcccccggccgctttccagggactgaagcccgagttggtgctgcgtgtccccgcggggattattttcaaacagctcctcctgccctggctcccacagcgcggccccaggcagctgcaccactttctcctctcaccaattaaagccgaatccagggctccttagcatatgaattgaggcgcatcggagccctcactgctgggccagcccctcccgggctcctccggttccgggaggtccacagcccagcagca

SEQ ID NO: 47993 - DNA, 2335 bp, Homo sapiens
cataccttctctgagggtcttgctcatggtggctttgtcaggagatgctctgggggaggaggaagcagagcaaagcccaccagtgacacagagtgaaccataaaggtgaagacagtcatgcccagagaaccagggatgcagaagttcatggaagctggagtttggggcaggaagcatctggaaaaacatgagtctcctctttccccgccctcaccatcacccccaaaacatggatatcctcagaaatatctgggaggatcctggatttcccacatgcaaagataggggatcaggtccagaaggcacagctgtgctcagggtgcctgtgttttgtgaactaactcaacaacggacagcgcgagatacacagagccacactgtggctgggagcctggccgccgtcttcctgatccctggggccgatggccagaagggctttcttaccaggtgcttcccaggagcctgggaggaggtgacgctgagcacagacaccacatcctgcagccgtccttggtcccgtctcagcaggcattcccaacagagaccccaccgagagctgctgggaaggcaaggagatgtgggtcatcgtcatcagctaaatggagggtggcattctgcttctaccatccagccagtgccacagatcaaagagaaataagctcggcaattttcctgccatcattttgttttgagataaggaaattatccacaatccaattatgaggtgtaatgtcacattctttttttttttttttttgagtcgggggggacacggtctcactctcttgcccaggctggaatgcagtggcacaatctcagttcgctgtcaccttgacctcctgggctcaagcagttctcccaccttggcctccaaagtagctagaactaagcaatccatccaccttggcctcccaaagtgctggaattacaggcatgagccactgcacccagcccataatgttgcattctaatgtgataacaaattgagtcaaagtgtgtccatttcctccaaatttgtttggaacaaagaaagtctttcataacttggtcatattagatatttgtaaaatacagttttgatgaacacaacccttagtggcccttaacggaagtacttgtggctgacaacaaactcaacatccctgggaattttgctcaaagagttgccacagtgccaggatgagtttaggggaatgccatgctggccacgcctgctcacctctgtccattccactgataaagggccaagtccaaaggattcctgccttctgtagctgaaatctaaaaatggaaacgctctgtgtgagtcagcatcagatgtacaattgggatgtgttcgcacagccgcttcattccggcctgagaacaagagcactttgtttcctgtttgctaaggaggtcaaggtcccctggccgtctgcgtgtgggtttccctgtctcagacaactgtgctgtgaaagtttcttcagtgcatgatactggcccccctcctgcctctggacagaagcctgtcattattgtcaccggtgaggagacatttgtcccccatcacgcatgagggacggagaagagaactcctggcattccacaggggatggagggatgggggtgcagagccacccgctggccctcagccctgactcccagcctctgaaaaacaactctacgacaaatcctccttctgagcctccactcagtgtgcacatgagtggctcctgtcagcgggagctccatgggaagcttctaaatacggaaaaagtggaaatggcatgttgccatgcaaatgtggccccactagacgtttgtcccaaaatggagcatcctagagtacccattcttcatctctgccttgggaagatgttcgcccaagcgcttgcttgatttgcagatagaaacgttgtccccactcttgtgtgcagttcaaagacttcacacttgacaactgagagtccaccaaagggagaagtcggaccagcccccagccaaacacgggagaaaataaggacttaggaaaaccagcactgaggcctggaggcctggagctccaaggggcaggtcccatgagcatcccgttccacgtggttttcaccagcttaagtcccatcattggcacattcctttctgaaaaaaaaaaaaatcaattttcatggcagctaaagcacgatgcatagttcaggattctgtgtccatccaatgctagctgcagatccaagcccgagtcccctcccttcggtgttgaacatccacactgcgctggaatgtggtcagcagcgttcacagttgtatctttaaatgaatcttgtttctggcactcaggagttcatgtccaggaggg

SEQ ID NO: 47994 - DNA, 701 bp, Homo sapiens
ttggcagaaacttcagttttactgagaactgagctggaaatgtacgtgtaagcacaagaggcctcccagagcatttgacccaaatccagcaccagtgttgcatcctcttgctgtaaaataggacattttttcaaaaggagtgtgaagtaagtattgattcacaaagtgccctgaagtccttggatactcctgtccctgaattccctccgtggattccccaccccgtctctcagtgtttggacaagcgtgggttttctgaccaaacattctaaacaatggcctaaattcatccctgagaggctggcattcagccttctgttttcaatctttttgaactcaactgtgtacttggactgagattttacattgtgcaacttcctgacagtaacgtgccattaccctggggggtaaagggctatttaagtccagactcagccattcccaccagccacaacagagccagacctctccgtgccccgggagggtgccctgaactcaaaatgtcccttggcgattgggtttaataacagcattttcaaaggcactccccagtccaccatggaatgtggaggctgcctcctctcctgcctccgctttgcggcacagctgtggctctgggtcccacatgactgcacaaagtcaatgccaagggcgtgaccagggtgcccgagacctcactgtggtctgggtggagccccagc

SEQ ID NO: 47995 - DNA, 1094 bp, Homo sapiens
agcccagagagcttccacgactttcccagggttgcaacagagcgaggagggtcaaaaggaggatggaatgggcatggcccccagcccgtccttgaccaccagttccttcctctgtctccagttccaaaggggtcatcacagagcactttgaaaccccagggcttcccccaccgacctcccccactgacctccgccgctgacttcccctgctgacctctgccactgacctccccctctgacctctgccgctgacctccaccgctgacctcccccgctgaccttccgccgacctctgccgctgacctccccctctgacctccgccattgaccttccctgctgacctccaccgcagacctcccccgctgacctctgccgctgacgtcccccactgacctccccctctgacctccgccactgacctccgcagctgacatcccccgctgacctcccccgctgacctccgccactgacctctgccactgaactccactgctgacctcccccactggcctctgccgctgacctctgccgctgccctcccccgctgacctcccccgctgacctcccccactgacctctgctgctgacctctgctgctgccctcccccgctgaccttccccactgacctcccccactgacctctgccactgacctctgctgctgacctcccctgctgacctctgctgctgacttctgccactgacctctgccgctgacctctgctgctgacctcccccgctgacctcccccactgacctctgccattgatctcccccgctggcctctaccactgacctctgccactgacctcccctgctgaactctgctccctctatttgtccagctccagctgctcaagagaccctgcaaccctgaggccaccccctctccgtcaaccccatggacaaagtgagctccttccccagctagagaggcctgcacccccacctggcttcgtgtctgctttcttatgtgtttttgtttacttttctctcctcagtctttctcgtggatattattcatattccttaactccgtttctagtccctaagacactctggaaacatattatccttgcctgaaagattccac

SEQ ID NO: 47996 - DNA, 588 bp, Homo sapiens
aagctgtgctccaaccaccttgggcacacgtcacaggccatgatcactcatatttggctcagaataaatctcttcaaatattttacagagttcgactcttttcaccgacaaatgggcaatgtgttgtgtttgcatgaggagcccctggttgagagcaagttccctgccggttctgccctcaggttcttggtggccagagacactccccagggcgggcagccagtctggtgctggccagggctgtgctgcttagcaaggccacagaagggacggagctgccctgcctgccaagcctgggaagcctgctcaggttgtttactgctggcctttcaggaagtgctttgggaacaacctcacacctctcaggtcatctgactctcagtcccactgggagggcagcttaacctgtttgtctgcttgttgcttgttgggctgtgcaagcagtgaggctggattgttgcctcaggagtaagttacataagagactctacattacattacattacagctctacaatgcaccagacggacccatctggattctttcggggctcttagccctagaaatagcatcatttcttcaaactgg

SEQ ID NO: 47997 - DNA, 987 bp, Homo sapiens
taggtatgaggaggggagaaaatcaagagccatgttgtaatcactcattgttacctcccacaccgttctggaaggttccaggctcatgcctgccaaacccaaccctgattccctggcaagcatcaagaccacacagtgcagaacagaaagataaacatttcataggaaaagacctgactcagaatgaaggtagaggtggcagaccccaaaccacacacatgcgtacagtaggtgcttaacaaatacttgcggaacagatggatgcacagagggggcctcatgggaagaccctggccctgaaggccttgagcattaggatgtgtgctgagccaaggtcgccccagggcaaggcggctggagcgctccttaaagattccattcactccctgccaagagccggcatccacatggctgccttggagtgctgaggtcagaggtgaggaagtattttgaaactgtgaaaactttgagctgactctctggttcccaggactctgtccagtgcccatgtgacgtgtgctctggatgggagtctgcacgatcgttctccagcccagctctgccacagaagctcaagcagccaggaggccagccactgagtgaggagggattggggagatagtcacggttgcacagcagacgctgagccaggcactgctcctggattaactcactcaatcctcacgacggcccgttattattgacattttacagttggaaagactgaggcagggggccatacggggaggatgctgggcacagggatttaaactcaggctgcgcagccctgaaaggctggctcttagtcaccatgccatgcagcctctctcaacccagaacaccggattacagctctccactgtacacccgtccatgcctccctccctttttccctccccccatccctccatccacccatctatatattactaacaagcccattggtttggcagcagaccaagctgggtggtagcaaagagaagaaga

SEQ ID NO: 47998 - DNA, 694 bp, Homo sapiens
tcttcccattgtttgcccttcctaaatgtcaccttagttctgaacaatgctgcgttttatactagtgaagcataaacttcacctatggaaggaaagtaactggaatgtccatgataaattacccggataagagtagcataaggggttgattgcattgattgattagtgaaattatcaccagatatatccagtctcccataagccgggcaacagactctatggcaggtgaaactcacactcctgggacaggctccattgcaaatgtcctgacaaactatgagctgtttctcaatcatgttatcagcggtgcaaaatccagtgtcagcacacagccactgccaggagacagtgtgagcaccaacacacaatgcagtctttgtgtttccatctggtgcaaaagaaaggaaaacagctttggtcaataaataatacgcatggctgttgcggtttttcaatacagccaataaacacaatcttaaaattgagttatataatgctacattcatccttcatttctttttattggacttgatctacctagagcttctgtaaagtggctacccacaagaacatagttgaaagccaaaaaatagagtgaaataaatcaaaaataatctcgactttccttcagattttaaaacaaagaccctgtgtatagcatccatgttacatgacatacccgatgatcctctgt

SEQ ID NO: 47999 - DNA, 622 bp, Homo sapiens
ccagtgcacctccagcgtcctgggatcctgcagctcctgccctcctgggtgcaggtccctaacatccccccctaggcccacccaccttcacccccacctgcctgctccagcctcttctgcttcccaaagccacggccagacgcacctccccagacatggcctggccggccctcctctgctcaggaatgcactcgggctggtaattactggccacgccaggtcaccagcttgtttgtcttgttccggagacttccatgtgatcttggctcccgtgtgagcttggtcgcctccgagcctcttccacgcctctctcctttcccccaagccgtggctccagccaccaaagcaaagccatagcaatgtccactgtgtatggtgagaacgctgcctccagagctctgcagtgcctcttaccttacccgatcaccacactcagccacatgtgacaggcaagctcagttcccatttcacacactggaaaacagcctcagaacagtctagcagtttgcacaggattgcgtagctacagcctggcccacccttcctaagaggcctgtggttcctcacggccatagcttgcaacctcctccgaagcccggaggcctcgctctcttctagttcc

SEQ ID NO: 48000 - DNA, 2120 bp, Homo sapiens
accatccaccccatctcaatcacccaatactacccctcaccatcctcccctaccccccaccatcctcccctaccccccataatccacacctacccctcaccatctgcccctaccccccaccacccaccctactctctcttactcaggacatccaccccgcttcaggcatctgcccaaagcccatgcatccaccaacctgcctgagagagcaaaggaccctccacctaaattcttatctgctcttcaagggtttccatccattccactcaccctccgagttatcgccattgcagtgggtgagacatttcacttgagggaatgaagggtttttttggtcccctctcccttaaaaaaatttcagggagttgaacgatgaaaagctgcccttcccttaagacacacacacattggcccagcatagtgtgctaggcagtaccctagcatgcagcaggcaaatacagggcacctgggtccacctgaacttcaatcaaccacagataatttcttaacttatactagattgagataacactatatacaaccctactctactaccatgtattagattatgccaaaaaataatccatggtcattgtaaatgcacacttacctggcacactgtattttacttgctctatctggcaactccttccataagggaagtctgaagtgagcagtcgagctgggagagcagagtcatgcggggcaggggaatgatggggtcccacagccgtgcccatcagcccgttgaccacatctgcatggcacagggagaaggaggggaggacaggtgggtcccggcacggccaccccttcatcagcccatcaaccacagccttcacggcactcatcccatgagctgtcacccagcacccaccaggaactgaacaagaaggacatggctgtgtcctcagggaacttagggaggacagttatctcccccacaacacagttcaatcaaatgtaccacggggcaggtgttagtctaatattaaccagtgctgggaacactgcgtgatcttagttccttcttgaaaagtttgttttcaaaaagctgaaggaaaatacatcacagtgatacagaagttgaaccagctctggccctgagcaccagggcaccaagcaggtgatggggcggccccagtacaggcaacagcacgtggggtctgggggcagccggggatccaagcttagcctgggcagcatgtgaggtgagtggccagcagcacaccccagcgtcacctggagccttggtaagtgaagctgccagaaaaagcatggattaagcaagagtttattttgcctggggtcatcattttagcaacataaacttacgtcattaatttgcattggcatctgaccattttgtgaaatgtggagtttctgagggcggcaaggcacctagagtccagcagcttcctgtgctgcccactctggcagagaccccaggcagagaagaaggcggcagagaggtagactagctgatgaaatttctgattttgtaactcaagccttctttctcattaatttttttcacttctccctttttatggaaatagaacatacatacagaaagtacacttaaagtatcagcttgatgaattttcacagcctgcactcagcctcatcagcagagccagatgaacaacctgaacacacagcagccctgaaccctctgcgggccactcccaggcaccaagctctggcaccctcacttctgaaggcagagagtgatgtgcctgtgtttttgcactttatacgaatatattttgtcttacatcttaattgcatatgttatttatccccaagttccctgaggacagaaccatgtccttcttgttccttcctgatcagttcctggcgggtgcggggtggcggctcttgggatgagtgcacgcttggtagtgaaggggtggctgcgcctggaccaatccgctctctctctcaacctccctgtgcttgacaggctgcgggcatggctgtgggacaccatcaatgattactctccctttaaccctttcagaatcagcaacacaagcagtgctttaaacccaaaaggtcccttagcaccaggtcatagagattttgcaaaagccgtgggatacggagctggtacaagt

SEQ ID NO: 48001 - DNA, 1637 bp, Homo sapiens
gatccaccctgcaggagccgccccgaggcaggtgggccacatctcccaacaagcggcacacaagaaggcccctcgcaagaggaggcatctgtggtcttcccagagcaaaggcagcagccccgggagcccagccagtcactggccacctgcacgcctctacacagcagacctggccaggcgggcagtgcccctggccccttgcgaatagaacgttgtggaacaggcggaacctgggcagctgtcctgcactctggccagccagtccgtggatgctcctgccaggcaggactgagccactgccagtctggccggtgccagccttttctcagatccagccacgccctctctggatacggtctggacaccggcagaccaagcaggcagttgcctccctggctggctctgacctcctgcagcacaaggagaggatgcactgcactgccaggcctctgggcaccgagggccgctgctccgccgtttctttctgctaccgctaattcaaaacagggcagggagcagctaggcagcagctgggagagctgcgggctcctccacccggttgctggtgggctccatccggccgcaccgcccgcacctgctcacctccagctgcctcggccccagcggcacggacggactcaacggcgaccaccgcggcagctccccggggactcctcgcaggtcagctgagctttgctttcagtcggcgtgcacggttcccaaacgtcggtggtgatttttgtaagtgaggtgggggtcaccacaggaagagaggggaggcaaacctcccttcccgctgtgtcccgcctttcctcctggcggttgcgtttccacgtgtcctgcctgctgcccgccccagcccacactgagcaggaaggtggggcgtggcggggaggggagtggaactgagggaagcagagagggtggtgccattgcccccggcctagcttctgtttgatcattagtttcaattcaagaaaacgttcttttgagggaattttaaaaatgaatcacgtgcacctcttaagaaaaccgagtgtcacaatcgttgttaccacgcaggtgagaggagaggagggaggacgggaaagggaaggggcatgagaaaggcggatgggactgagcttctacggctccctggccgcggcgcacgcgctggccctccccgtccacagcagcagcggcatcctccccaccctacagcgaggaggtggacgttgccccgaggggaggagcgtgtcagggtggcttccaggtgcaggttctcgcgcaggcctcagccttcataggtgcattccgctctagaacattcctgttcatgcgtggtcgtcgctcactggtggccgcttaggtgcacttctcaatggcagtgcccagcacggagcaatgcctcggagtggcagtttcttcagtacggtccccacggcctctcccaaggcggaggatgctgccgccaaggaaactggctcaccacggacgctggtgagctatggagctatcagtgaggtgtggatttctcaggcctctggcgggagccggagtaaaggccctgagtgtctagaccagccagagtgtctgcgtgtaggtcagcaaatgtgggcaaatgtctaggcggtggtgtcctgcagggagccgaa

SEQ ID NO: 48002 - DNA, 1401 bp, Homo sapiens
gccagcaggtgaggaggaggaggtaaaagttaggaggattctgctctttattccattaggaactagaaacagaagaaactactccagtgctactgaatctccaagcagaatttactactgaaaaggtacgcatcatcactgatacagtgtcagagttctacaacacggctagcctgaagagccaatttttatctctcagtgagattgattttccatttttcttgtcatactctattcacagtctactctcctacttcccataaactacaataagaaaacacagtaagttagaatcattgagcattctttagtcttttttcttataagcagacactgtaccgcacaacacagcagagctctgataacattttaatatgcgccgatgccagatattcaggctgcctacccaaaagtgaaagttttagttgcttgtttggaagtatcggaatagccgacttgaactaagaggaaaatgctggaaatgcattaacctttcatctggttgtttgttatgtagatataatcagaccttagtgtcaaaaagaaaaaaaatagcatatttttgacggactgccatctgccaagctgcttggcagatgatacagcctctgcctattctctcagtaactctgaaaggtgggtgccaggactctgaaggctacggggttttaccctacttgcaagccaacaggtgggcctgcagtggttctgtacacactggcagcagacctgagccccctgagctcaggacaagtagctttattactcccacacagcaggcagaggagttgtatatgtgcctcagttccccttgctctccaagtcccatgggggtgaggtggaaagttccagttggatcctgcatatctggtgggtgtgtgtcacagctgacaaagtccaagcttgggaaaccccatttttttatgatgggctgcaagcaaacttgacctttgccccagagggagacattatctctgtctcccaagatagtgtcacaaagggctgttgatggctttgcacacacgatgagttgcaagtggagacgcatggagaattagctctcaatggcaggcaatgttattccacttattacagattcataaaggaagcatttgaaaaggtaaccagcctgctcaagtcacaaagcttattaaattgaagaatcagaactcaaatccgggtgggtttgactccagaactctcccctctgtatcttacagccaaatagtagtcctccacattagagcatgattaatcaatatataaaaggcattatgggccaggcgaggtggctcacgcctgtaatcccagcactttgggaggctgaggtgagtggatcacttgaggtcaggagttcgaaaccagcatggccaacatggtgaaaccgcgtctctactaaaa

SEQ ID NO: 48003 - DNA, 1825 bp, Homo sapiens
aatccagttggtggagagaaaaattatttccacattggaaaaaaaagtaatgacaaaaataaaaaggctttgtcaaatatagttcactcttctcattacttgccttagtgtttcaaagataaacgctttttgttacaacacatcacagataacgcaacttcgcctgactgaacccggcgtggggagactgcagagatggcgctctgcagccaaaacaaagggtgggggaggggaggggcaattacaaaaaagacaccttatgaaaaaaaatccctacaattcacaaagcttgctactgaaattaatttcaggtttccacgtccacggggacacgtacaggatttaaaatgacgatcacgtggcatctctcagggccaaatggggcgcatcaaagcttcccctcgacgtttattaactctgcagtccgttctctacgtctgcgaagaattggcagataacgatgtgtctgagagaagaggcgttttctaaggagacacacaaagggagtgggaccctccaacctcactctgtgagaggaacaccgcacagcagtgtgggggctcgaacaccccaagagcggcagagcgcggttcagaaaacatgacccttgaaatgcacacaaagcctaacaacgtgtcctccgcggaagaaaacagcttgaaaaggtcggctttgaagtgacccagcggaaaggaatcaccctggaagaaacacgcagcagccccggggcaatgcgcgggcaggaggagcagcgagcgcggggagcgcagggcccttcggagagggcgctccaccggccctgcgctccgtacctgtgccgccacgcccaccggtcccctgctgagcctagcaccgcccatttagacccagcaccacccgtccggaccgaacctagcaccgcccgtccggacccagcagcgcccatttggatactgcaccgcccgtccagacccagaaccgcccgtccggacccagtaccacccatcggacccagcgccgcccatttagacccagcaccgccagtccgaaccgaacctagcaccgcccatgggacccatcgcccgttcggacccagcaccgcccgtccagatccagcactgcacccccatttggatccagcaccgcccgtccagacccggacccgccagtccggaccgaacccagcaccgcccatcggatccggcgccgcccatttagacctagcaccacccatccgaaccgaacctagcaccgcccatcggacccaccgcccgtctggacccagcaccgcccgtctggaaccagcaccgcccgtccacagatccatcaccacccatttggacccagcaccgcccgtccccgcccgtccggaccgaacgcagcaccgcccatcggacccagcagcgcccatttagacctagcaccgcccgtccgaaccgaacatagcaccgcccatcggacccatcaccgcccgtccagatccagcaccgcccatttggatccagcaccgcccgtccggactctgcaccgcgcgtccggacccaacacagcaccacccatcggacccagcactgcccatttagatccagcagcgcgcgtccgaaccgaacctagcaccgctggtcgggaaggaacccggtaccgccggttgggacccaccaccgccagtccagacggaaccctagcaccgcgcggggcccgccctccgacacctccctccctggcggccgcggcagcagcacctagtggagcggcccggaggtgcggcggcgccgcgcggggcggcggcgcgcacggcgggcggcggcgcgcacggcggcgggcggggcgcgggcgggtgcgggcg

SEQ ID NO: 48004 - DNA, 1281 bp, Homo sapiens
gcggggggtggcgaggggcgccgggcccccgcggacctgtcgtcctcggcccgtcctccggccccggccccgcgcggctgaggaggcgcggccaggaccatgtcggcgggcggccgtgacgaggagcggcggaagctggccgacatcatccaccactggaacgccaaccggctggacctgttcgagatcagccagccgaccgaggtgagcaccgccgggcgcggggcctgcgcgacccccgcccgctgcgccgcgccccgcccctcccccccgccgccgcccgccagccgcggacccgccctcctttccccctcccccctccgccccttctctcccctccccctcccccaggcccaccgcgggccccggcgtcccccgcagcccccgtccccctgccgcggtgtatcccggggtcgcgcgggccgagcgggggctggcggggcgcggcagtcacctgttcccctctccggccgctcacctggtggctcacctgggccgccgcccccacccccgcgagcgcggcgcggccccggcctcatccccggcggcgcggggggcgcggcggcgcgcggggccggcgccctccacctgcagcccggttgtggctcgcggcgccccttcgccgtggccgggatggagcctgtgacgcgcgctgtgcttcgggttcataaacttgcaggctgccagctgggaggggaaagtcagtatcacaaagttcgggaggtgcgggctgcctgatggcacaggcccggagtcggacgcctccgaggaaaggcgcgccttctccaccttcggggccgcgaggaagggccctctgcggcggcctctgcccggagggaggcgccggccccaggctggctccctgagaggaggaggaaatcacgctcgctcctggcctggtaacaatgggggttgtttatagcaaagctgctgaaagcgttccgagcagcttttaaaaaaatgtttgagtccaagtccactaggaagggctccgtggagaggggagggaggtgaagggtcggggagcaaccctgtaaatcgctccgcaagggtcggttccgcgctctgttcattcggtggctgcacagactttaccagcataaaaaaatttcactcaatatttgtgcccgtttaggaaatcattttaatagcgtctatttttgatttgttgtaataggtaatttatagttaatacttgctataaaatactagctcctaggcaacaaaacatgtttggcagatttgaacattcttacgaaatgtaatccttttatcattaaa

SEQ ID NO: 48005 - DNA, 1179 bp, Homo sapiens
cctaggatatttatttaacagtatagaagattctcaaaaacaggagttaagagtattattctagtgaacagagtgtttccataaaattaaatgagaatctacttcactgattggttcttttcaccatgattctgttttgcaaagagaattaattaagaaaacttaattgaacagtgagctggtttcattagtgtcacttttcctgtcgaggttctaggttccttttgtaagttactactgataagaatcctcctaaacagcttgacctcctttcagaagtccgtgtgctgatttacacagcttacctttttgtttttctcatgcctggtactaagtgacattccaatctgctgtagtcatttggtaatgcaaagagtgaaactggaagggtaggcaggaggtaccggttggcaccaaatatgcagttcaagatcactcatgataccagggagagaatgtcaaatacttgaaccagaacaacacattgttttagtttgtaaaattccagttataaggcagtaatagtcatgttactctacctcaaaattattttctttctcatttgttcttttcacctctgtcccaacccccctctcgctcatggatgtgttttgtgtgaaatgtgaaaggtcttaagatagtggaggcttgaaaaaactgcctgtgttttaaaatgtgcttgtgtttgtttcctaatgcagtactttgaagatattttaggtttaggtaagttgctttaagtttttttttcttaattggagtaggttgagtgctgtgaattcaatttttagtgtactataaaaagatagatggaagcactttgattataggaagtttctttgaatcatttgctatagtttgagtgtttactttaatgtgaaactcactgtaaatccaagtaaatgctgatctaccaatgttcatgtatataatttgtatggtacattatcttcatcgttcaaatttagaaccttcttattatttcacatacttaaagaagaatcttagttgcagattcaagatgaagattataaaacattttcttgggttttctttcagtattataattttgaggctgaatttaagaacatggttattttctgtagacaccaaaacattttataattttgtgtataggttgatttgggtagatcagttatatcactggaaatgatttca

SEQ ID NO: 48006 - DNA, 2932 bp, Homo sapiens
tgggcttttcagtcacgctgctgctgtgcatattctgctcctgccactggcagccttggagcacggagcccatggcaccccctctcaaagcctcagtttccttgcctttaatatagtagtaatagttatagttacctcagctcttcagagagagaagctgtgtcaggcatgttgagcctggtattggataatcacctgctgtttgtattcttgttagtctcatgagtgtgtggtatatgttttttctgcagaggaacctatagacttgtgtcgttaaattttacccctagtcatttgtgtgcttttcttgttttctataagctgcgtggtttttgtctttggcccgttcttttttccttttctaaattggtgtatggggtagctgctgtaaccctgaaccatgttttgatgttaagttccctgactcgccttccacacggtggttaagttttatgaaatccagatgatttggaagcagtgtgggtatgcagtttactttttaaaacattgcttttggggacggtcagcaggctacttcttggtcatctgtgggacaacatgatgcttcctgtttaatttggattttaaaattacaaacaattccctcctttttatttttctaagtctttttaaagtttaaaagtacaaagcgaatagcagtcagcgtggactggttacgtaagagcctgaatattgcattggttctaggtcgtgttgataaatgccatacagggtcatagcatccagcgcagaatgtggtgatcccggtcttgaaaaaccagctgtcttggttgctgttgaaaactgagagaagtagacggttgattttcagttcatgaagttgttgtggtcccggaaatgaaaatgtggttctctgttgttggaagaacacagtcagtggtgagtttcttcagggggcagttgccggtgttctcgtgctcactgtggtcttgaaggaatgctttttctttcagtgtaacttgtttaaacctgtcaataattaacttgctcatgaagcaacaaccgtttaatgtagcttgtaattacacactctttttttgtttttgctacttttgtgctgcaaattcttaagcttcataaaaacataagccttctgtatgcttcttatttaagaaaacagccatgatatttcatcctgctgggtataatatggtgaaggttgctttaaatatgataactgccgctatgtaacttgctgaagacatggacaagaatatctatgatgtaacctgtatttggccccattaggtggttttaactacagcctttctctaagacctgttttttctaaaagtgaacataaaaatgacacttttaaaagtacttaggatattttactattttatttaaaaataaatggttaattaatgccttaagtatgttcaagtttatgcttttagacaatgtactgatttaaagttttaaaatcttaaaatcttagcttaaaacataagattcctatgccctaaaaatgagatggtaaagactgtttattaacatgccttctcactgtttagagagtcagtttctcgcataaactgtaatttagtcctttgaagactttgagaccttctcttgtgttctttaatggtctaattatgaccatgtgggaaacacctagtcaaacaaatgaagtcaggaaattccgggttcctttttagtcagttccaaagacctattgtgcttacatttcttccacggagatgccagaaacatctttccactaagttgtatgaagtgacactgcccctcatggcttcttatgaatttggaaacaatatatttgtgtatcaaaagcaaaatagtaaattatataaaagaatactatttttacctggtttataattttggcctaagtgctgatttcttggattggctgaaatactgaattcaagtacaacattaaaataacataataggaacataaaatgttgatcctctaaagagccatcatagaaaatgataatttgtagagtttacctggatgtagaatattggctgtggggtagcccagaggttcacactgccccaggcttgccccatctctctcagtggaatcttaagtgatccagacccatcccctgcacaggccaggactctggggagctttgtcaggagtgtcaggctcacctccagtggtctcttgtgcctgaaaatctgctgagtcgcacaccgctttgcgaggctaaggagagttgtgcactctaccctggtgaaattcacacacctgcaaatgtcgcgtgcggtctttgggggtttatgggcttcctgcatcccatctgtgggaccaccttcgttcccttcattttatggagagggaagagatagatgtggtctgttgggtttgtattttatacaaagcataaacgaaacccagagctggaactacagccttgctcatagatatcaagctcagttaccttgctcacagcaccaaacctgctgggggtaacttaccatggacttccaaggttgctgaatgtagaattcatatacaaagtgaattttagaactgattatttcacaattaaggtaattcctacccaagaagagagatctttagaatgtttttaaaacccaagcctggatttacttatctgactagaagtaaagcagttgaaaaacccagaggagagcagcgagcgggcagagtgtcaacagaagtatgcctgatgactgaaatacttctgggctctgaggtcatttcagccacttattgttctaaaatcaccagccagagaacccaggctaggttttcttacctgagaacaatagggttggattcatgatgatttggccagcatatctttcttcctcctgctcttttttttttggattgtgttttaatgatgtctttatgctgtttatcacgttgtactcccacacgcactcagggtttgctactggaatg

SEQ ID NO: 48007 - DNA, 1026 bp, Homo sapiens
ccagagcctgaagtgcttttgtatctatctttctaaactagtaattttacagttttattgctaacccatatataatgggcatatcggttgcttcttaacttactatttattcagtaaaattacagacctcctcatcgtaggtttttaaaataggaaattggccaaattccttatcgatcaatgttggtaaactataagtcaacctaattgagaagctcttctggaagggatagagctccttatattcaagaagcttctaatggagttggaggaaggagccatttgcagaggtagctgtaatgcaggacacagtgactcactgctcaaagagaacaaagagaatccaatgtgatgagaacataagtgaatgatgataccttccctgacactgggaaggtgagtgggctggcaggtgagcctcggaggtgaatggagaggatttgggcatatatcttgcatcagaaagacacttggtgtagagagaacatcaaccaagtcatgaacatgagtcagatagaatgggaagaggtgaggggcgatttgggtggagaatgacgagagaggttcatggagctgtgaataacttatgcaggaagctgctgtgaatttttacagcagctggcagttacaagagtctggtcagcatagtgtgagctgagctgtgcttcaggaaatgtgattggatttagagagaccagaagatcagtcatgaggagagcttcctcattttgccagaatttgtctgaaatttataatgtaaacttcaacctatttaaagatagggagtgcagtcaaaatatcagtagtacatgatcagttttgcttcaggatttaaatttaggcattaaattttctattgcatatagtatgataaattacctaccttaaaatggtagaggatttcgggttctttaaatgccatgtgctgttcatgtggagtccacatgttcagcttgcacgttggctgtctgcttgtatagggtggctaggaaggaaaagagcctagtggttgccctcaggtatgtg

SEQ ID NO: 48008 - DNA, 1309 bp, Homo sapiens
ctccacatggagtcaagtaagacttttggaatgcagcatgctcaaagtgaaatctttgtctgcttcactcaccttgcactgctcatcattctgccttcagccttccccatttcagctgatgcttcgagttgctcaggcaagaaacctcacagtcatgcatgacccccttttttctctgttcagaaactctactggcttgacctcctcacaacctgaccaatctctgtgcccccgtgaccagagcctctctccttttcctgccggggtcactgcgagagactggcaggatccctcggtactgtcccccagtcccttcacaggacagccttgacatagcatacagcagtctcacgagaatgtcctcacagccctcctaagtctctcctttcacttagacaggcggtctaagtttgctcgggtctcatctcctcttcacacccttgcccactggccctccagcctgcctgcctgccttctagtgaccctccacatgttgggccgtcgggagggtccctgcctgtctccatggctgaccctcttggcacatgcaggtgtctctcagatgccacctttctgggggggcccacctgcccccactgcttcatatggggggggcccacctgcccatgctgctttgtatcaggggcccactggcctcactgtgtcctgtgtgtttttctgtggacatgctatacacattactcatcattaggcatgtttgtctcttctgggtagcgccacctccatgggaacagtgacctttgtccaagtttctagaagagttctggagtgtggtaggcagtcgagtgagtgggatcggattccaggccaaggtcccaagctctcgaaggtgtgtgaccttcctgactgttagcatctcaagagtaaagctgttactaggttgtttcctattttaatgactgagatggtgtgtaagtcatgttcaaaccaaagtctgacttgctggagggatctccttcagcactagattatgatgaagcccattgtgtcgttagggcttttcctttatatcgcatgggcaaatccaggacacctggaattcgtcaggatgtctgctttctcctggcagagtactctgtcctagccttggaacctgtctctaacttgagtagccggttagttaggaccatggaggtggccgtgactgtggctgcagctttgcctggctgcagcctcgagaagtagctagtccttccacctgatgacaaggtgtgtgattcgtgccttcattgctccaggttgccacataactgcatatattcctctcatttcctcatgacaaagctat

SEQ ID NO: 48009 - DNA, 3696 bp, Homo sapiens
tctcttctggactgtctccagatccccttatctgccaagttttgtctccttcaaacttctgaactcttgggcgtgtgtagcagtgagcctctttgcaaagggttcgtttcctcgggcactcatctttactgaacatggcccagcttgtcattgtgaaggtgacattggttcagtgattgcttaaatggcatgtggaccgtgggaagcagtaggagcgtagtaagacagttggctgccattcaacatttcaaatagatggtttactcaaatcactcacttctggttgatggtaaagagagcagatggcttagaaaacatgatacaggaaaatttagtatgtaatccagtaaatatcctaagttatttattttcatgtgtgtgtgtgtgtttaaatcaagtaacccttttaattgaattttaaaatgacagcgaattttgacattctgagaaatggggattttgagatgtttctctccatatctccctttgtcctgtgtgtgtggccgacgccctctggatgaagaggctgtagccgttgagctccctgtgggggcctgtttcatcccgaggggactgcgtgttgctctgtgtggtttgagagaagctgctcttctctgttacttcccttctatgaaggtagaagctttcagtgttacaacttctgatggcggaaaatttagtttttattaataattccttcttggatagtctagtgaactatattaatagaacagtgtactgttcacagaaaagaacttgtagggagttttttgtagtgatatgctctattaggatacagaacaatctaagagtaagcttgatagacatgatgtgacttcacttaaatggagtagagtgaataatgtaaggacactcacctctgttgaaattggtgatttctgcattttgtagacctttgccctctaagtttatcatcatattatctgttgaatctgaacagcatttgaagtcctctcaaagagtttgagctttcaggattaggttcccctgtgagtctttcacttgtgtaatggtaagtcaacattgatgatctttctaaggaaatcagatttacaaaatgctgagccgcttgatgtctaagtgttggtggtttttgctgttgctttgctgttccatgaaagcgctccctggctgcttggagggctgtgcttttccaggtcagtgccagcttggctgtcccaggccgtgcacagtgcccattgctatagctgggcccagtcctggccacgccggagcctcggcgggggcagctgggttgtcacggcagcacagtgcacatgcagagaggaccaggccatgtttttcctgtgctgagaaactcttgggttatttaatttttccaatgtgttttcataactcatgattatttgaaatacacttgtgttagtaactgcttctataattaagtggtcactgtaaaaaggcgaataacctatttttatatcagaatgtccaaaactcatgggtttgctttgttatagaaaaatgtgccattcatttgttgggtagaataaagttgtcttgtaattgtatctgctcttggtataactaaaagaggatattttgatttcttcctaaaatgttaccaagcaactgttcttcatgttaatactaagattcttgatagttccatttaaaagccacaagaagtcattctggtttattcctcactccaagggaacacttactttgtgtagacaagaagatgagagtctttccttcaggatttctaaacacagagcaagaagattcaatgaaaaattgggctcagggcagtaattggggctggcatttattcttaagagttttctccctcaaaaggtgaaggagtgacattgcgtattcactctgtgtgtgtgtgtgtgtgtgtgtgtgtgtgtgtgtgtgtgtgtgtgtagctctagagggagtagggagaaaatacaggatgaaattgaaaacagggactaacaacttttcactgaatgccagcaagctctctaaaattagttttctttggttgaacaaatttacaattcattgtacttcatttcacagcattaaacatttactcgaggcagtttattctgtttgctctttcatcccccttcttatttacttttttcttgtgctctaaaacttttgtcaatctttaacaaaactgtgctgttaccttttttaatgttaaaagaattttaacactgtcaactgtagtttgtgcagatgtatgtcagaaaaaaatgtacagtatgtgtcaaaatatatttgaatatcttgttgctgttgctgttagttcctggctctctaattttctgtctgttagggagtttcttaagatttgaaatacaagttaagaactatggaaagcatatttgttagattgttactttgggagaatgagtgtttttttttttttcttcatttctggtttcctgttaatctccttcctgataactgaagtaaacagggtggttcactcatgtcctccttgtccaggaaggactgctcttctgcattcatgggggctcagtgaaaaagagtgcaagtttgccttttggaaagtgctggccatagaaagccagtgacagcctatttttagttttgcattatctttaaacacagcagtaacaggtaagttaatatcctgccaaaatcagaagaggagagagagaaggaagtaacaggagcgtggaggaaggaaagaaggaaagcagaggagaattcagtccactgggataatggaaaggcataagtgactgggaagcaggaggctgagaatccattccatgcttctgagcagttttctgtcaaataatccaggatagtattaatgtacttgtaagtctagggagaagactctggattgacctgctgcttctgttacatagtaattgtaactattaaactttgacgtcagtgtgatgatgaggattgttccctttgaaggcccagtgggtcggctgttcccttctcacctctgacctttgcactcttgtctattcccgcccgcagaggcgacaggaagaagggtattacagccgcctggaagccgagaggcgcagacagcacgacgaggcggcgcgcaggttgctggagcccgaggcgcccggtctgtgccgccctccgcttccccgggactacgagcccccgtccccgtcccccgcgcccggcgcccctcctcccccgcctcagcgaaacgcctcctacctcaaaacacaggtcctctcccccgactcgctgttcactgccaagtttgttgcatacaatgaggaggaggaggaggaggactgcagcctagcaggtcaggataagtactccagcacaagaaagtctcatggggaccttcttcctgcccctcttaaaccacggccacccccctgccagccacgcccggcctccgatggcgtctttctctccaactcattccagccaccctcagccaaagccaacagtactgctcacaaaaaaggccagcccctgccccctccaaaaaaatccagctcctaccatcccagccactgcaaaggtagaggtaaaagagtgacaaatcagctctctttgtcttaatgattggaacctcagcatctctctgcacacttgccctgtagtatggtccatggcgatcatacttgccttggaatttggatgtcatgtgatcactggtctcggcatggtgatcctcctctgcctctgatt

SEQ ID NO: 48010 - DNA, 1232 bp, Homo sapiens
atcattgcactccagcctgggcaacaagaatgagactccatctcaaaacaaaaacaaaaacaaacacaaaaccatacaatcagtaaaatgattaccacagtcaatggtaatgactaccaggatggctaaagagtagaaagggggattttatcagtgatatcagtttgcaaactgagaagagacagtctccagctctctctgttaaaaggtgaactccaggacacacagtttgtgcacagtctgtataagctggccgaaaatagctggaggtctgcagctgcttctcaggaaagaattgtgcaaggctgatcctctgcctaatcagggttgcggtggtctgggttgtgaatcagagttagggattttcctgatggctcccgttgttagggagtttagcaagagtgtggtttttcttgtagccacaggaatttaggaagctgtcaggcagccaagccctgaacctctgactcataggtaccttttatttccttaatcttaggatccatcttagttgataaagaagcatctattggtctctcagatcacatttccctgttgtggtcagtcatagcttggatttctgtgggcccacaggccctactgcatcactcttatcttaaatggcctgagagagaacttcatggatttgttgttctttcctttaatagaacattctctttagtttactttatggatttggcctaccttatgaaggaatactgtatggatttggcctaccttatgaaagaatttcttccttgaagccaaaagagattcccataaaaccttttcctgaagcatttcctctgtgttttcttccagtagtttaatcactttgtgtctcacatttaggcctttgatccattttgagttgatttctgtatagtgtaagaggtgggggtctagtttcattcttctgtatatggatttccagttttcctagtaccatttattgaagagaccatcctttcctcaatgagtgttcttgacatctttgttaaaaaatcagttgactatagatatgttggttaatttctgggttctctattctgttccactggtctatgtgtttgtttctatgccagtaccatgctattttggttactatagctttgtaatatattttgagagcaggtagtgtgattcctccagctttgttcttttttctcagcatttctttggccttttggaatcttttgtggttccatacaaattttacaattttttcaatt

SEQ ID NO: 48011 - DNA, 1188 bp, Homo sapiens
tattatttactgaaaaacattttatttgtatatctaaaaccaaataacttgatttttttcccctaaaataatcatatttaaaaatctcactatgaatactcaagaaaattttcatcagtttcacatgtaataaagtagcttcctgaagaaacttccatacacggtgctggtggttcaatggatttaatttgtaagagcaaagccagtcttcacgtgcaaaagctttttctcatgtctgtgcactaaaaacagtatagagaaaaatgatactttttatcagtgtagaaaagaagcaaatttatgagcactttggagtaatagccccatggcttagcttcatcatgtttgtttatgcaaacacttgtggaactttgcttcctcgtgacacacagttttttttacaatccttcactgggctgacctttcttccactattgattttgtcctcttttgatgactcaattatgcaggggaataatcttagtaaaaacctctctcttttttttttttttttttttttttttttttactgtgcttcagagtaatctggtgttgggctaggtaaggagggaaatggggttggcctgactccttccaggagtttataccctagttgagaactaggcttgggatgggaggcttgggagatctttacaatgataagtaatatcaacgttggcagaataaggtgaagcaatcaaaataggtgacataattggccaaggatggagaagaaaggaatgttcggggccgggcacggtggctcacacctgtaatctcagcaccttgggaggccaaggcgggtggatcatctgaggtcaggagttcaagaccagcctggctggctgggcacggtggctcacgcctgtaatcccagcactttgggaggtctaggtgggtggatcacctgaggtcaggagttcgagaccagcctggtcaacatggtgaaacctcatctctactaaaaatacaaaaattagctgggcgtggtggcacacgcctatagtcccagctactcgggaggctgaggcaggagaatcgcatgaacccgggaggcagaggttgcagtgagccgagaatgtgccactgcactccagtctggacgacagagtgagattctgtcttcaaaaaaacgaaaaagaaagaaaggaatgtttggaatggaacagggttaatgagggaagcacc

SEQ ID NO: 48012 - DNA, 770 bp, Homo sapiens
ctcagagctcatgaatagccagtcacacttactccaagcacgaattctggtggttgttccgcagttttcactttgtggatgacagagccaagatttgggactggagctcacggtgcccagagatgcacagcgggattttcccgccacgccatgcattctccacaggccgagagtgtgctgtgaaaccgcaaggctgaaaccaccttcacgctgggagcaaacgaaaggacccgagggcaaggaatctgattggtcccccagtcagatgtcaaaggtcagctcttcagagtgagtcagccgtgagcagcagcggctgatgggcagagtccacgagtgagcccgggtgcttgtcagtccctccaaggcacaggaaatgccctgtttttcaagtgtgcacatacactaagttagtaggacaagttacatattcccacgttgttttccagtggcctgtttagggctgggcttcacgtgttccctgtgctttccgcgtgctgaggaaggcctgcgtttccctccgtggctgtcagccttggatctgattgtggtatgggaggggccggctgcctgtgaggactccacagcatccccagctccatctgcgatgtgataggagcttaggagagctgccgtggggccagagggcgctgggttccagcctgcccagcatgtctagcgattattgacagttttgtgtcctgttttcccatggatccaggacagcagaagacagaaccaggttctcttccagagaggcagattcagccaag

SEQ ID NO: 48013 - DNA, 1209 bp, Homo sapiens
gatgctgagccctaggacgggggctggcatcttccgtctctttaagtcctcacatctgcctggaagtgggcaccatcacccccttttacagaaactgaaaggccaggatcaaatgcttggtagagtcaaagctgagattttaatccatgtctccagattattttaattgttttccttgttctgccatagatgttaaattgctggcagataaaaaagcatggtgatgtgatgggcacgttcttataaaagctttattactaaatttttagtttcaaaatgtcatttatttactgaaactcttgatttatttacggaaacagcttgatttttaaacggatcatgttcttgctattgctcaatggcaccagcttttctttaacgtacagggcagataacagcccgtgaagctgagcaatccgtgcttgtgaatttggcttttagaactttgctttctacctaggcaggatgtgttattaggcagagttttgagtcaatagtgcattgtgcccagaagacccagagggctttagatcacttgaggttgtggcaggtacggttgctggtgccaacacaaatagcccgtgtgtttacccagcacaaagacgtgaagctggccgtgacttcctgacagccatcccaaaggaaaggcaggaagagggcaagagatccacctgcagtatcgtgacggaagttttcacgttgttaaaaaagtattcgactttctattgaattacaatacgaagaacaatatgcacaaaacttttttccctcagaaaactcccagactgaggagaaatttgtctccttccccagatgaactccgcgtaacgtggctgagtgcagcgaccccatctcctcccccgaacaggtgaacgcatccccctgccctgggctggctggcaaccaaacacgtagtaactctggattcagagttcgagattcagaactgagtggactttagacaagcatagagcgatgctgggaactctcccaccgggtttggagccacgtggaggtagcgtggggaggaaaagctgctgcaagaagaaaccacgtggaggtagcgtggggaggaaaagctgcttcaagaagaaaggacgcaggggaggagcagggaggcaagggtctgagtggaatgcggttgcagccaggggctccgtgggcacaggcccaggctggacctgggaatgggccgcatggcctccagtt

SEQ ID NO: 48014 - DNA, 1678 bp, Homo sapiens
taaccatctgttctttctaaaacctgctacctggagcctgcatctgcatgataagaaccttggtctccacaaccccttatcctgacccagacactgccttctattggttctaggtctttggataaactctttcagccaattgccaatcagacaatctttgaatccacctatgacctaaaagccctctctgccctttgagttgtcccacctttctggattgaaccaacgtacacttcatgtgtgctgattgatgtcttctgtctccctaaaatgcatacaaaccaagctttgccccgaccacctttggaatgtgttctcaggacctcctgggctgtgtcacgagctatggtcactcacatttggctcggaataaatctctccaaatattttagagtttggctgttttcattgacactcctaaggcagggctgtggcaactgggctgctgtgagctctgaatctgagggacagtcctggacagaagcaaatggacgactccaaggagtctaaggcagacagtgggagggatgcggctgacacagtgccaggccaggcccatacggggctgtccgagttattcccaccaaactcctggaaaaatgcaaaacattgcaggttacccttgagcccagggcaaaggccctttgaccttcttgggcaatcctgctgcaagtacgatgacgtatcggaaatgaaccattggtgcacagatcataaggcacagttgtaacctaccataaacagaaagtatctgagacaggtctcaatcaatgtagaggtttattttgccaagactgaggatgtgcctgggaaaaaggaacacaaaaccacaggaacatctgagatttctgctttgtccaagcagggtttggggacttcaatatttaaagtggaaagagaaggcagtaggggaaagagggaaaaaaagttgggaggggataggaaaaaggggcaatggctgtattctttcgaggccttgatcagcattcactgaatccacattttacataggaggcagcagaggaatagtcaattacacattgtctcactctgtgaacctgcactaataggcatttgtctcaggtgggcggagggatgactcctggtcccgtctttctcctgtacctgtgaagataaactggtaatttacattgtcggggtgaaattcaacagaactcttttagggtaaagatcgtggggcccacaaggaatttccctgtgaacaaattgtgaaggagaccccccaagggagggatgtggccttttatctttgaaggtacaaaaatgacaggcagttttgtgtggccaaaggtcaaaagcccctgctggctgtggagtcttgcatgtatttttgtttactgttgtcctcatctggactcggcctgtttttatgatggccacaagaggacctcagcactcaggcgaggcttcagagctcagagccaggtggccacctgctgcctcgcccgtgtggacgggggatgccctcctctcagagacgcatatggaccaagttgtctctgctggtatccaaacttcttctccacaggcccgtggggaggcctcaaacccaagacccccacccaacttgggtcaatcaggtaagctaggaatggaagagaactggaatattcaggcaccgttttccttccatagctgacagctgaatactgattta

SEQ ID NO: 48015 - DNA, 1102 bp, Homo sapiens
aaggtattcagagtaagacattccatacagaaagtcctgttactttatattaagattctataattcacggactggagagatgttgcttaagagctgaacattctatggaatttaagagtctttgggaaagttattaatttgtgaaatgcagtgctgttctgaaaagcacagctccagttatatacaccaaattgtgcctattcgctattttttcactgatgaatgaggtgagaatgatcgaaacaagaataacttattagagttgtcgctattacaacttagttttgaagtaaagtgctgatgctagaaaacctgagctctgtttctcacccatcgctggctcataaagactatcttagtgttatttgctcaatgggggatttcctgcactgtttacataacactgcgcttttatgacgagctctgtaattatttttagccaccttaatggctctcagaggagagcaaaatcctggtgttcatgggacagatggagggtgagcgccagggaggtcagcggctctcgcgctgccatttctctgcaagctcaggaaattagttccagggctggactgcatccagggatcgacatcagctctctgggcaccgccctcacgccactgttgccttgcaaagggaggttgtgaggctttgataatgccagagagatggctgctctgtcagggcaataaaggcctgaggcataattgtggaaagggagcttttcaaccctcgctgctggcttcggcttccgcagagccacctgatgccaaggaagagggaattcaggattccccccaccccaccatgtcacgtcactgtggacagccctcatcctggagaaaactggctgccaagcaacccctgctccttgcagatgtgggcatgcacctagcatttccattgctatgtaaatccatatcacaaagtccacagagtatccttggtgtcaaatatgtcaagtttggaaaatgccgttgggtaatgaaatcaataaggtaacaaatagaaataaaaatgtatattgcagcgcttagatcagacatttctagataacaatgtttaaactggaaacctcaaattgttgttaagttagaataag

SEQ ID NO: 48016 - DNA, 1471 bp, Homo sapiens
tttacagagggtcaagctccaggagggaggcaaggggacgctttggaaaataaagttcttccttttactcctgtgggcctgatgtgctctgtgaagttcaaacactgtatcgaccatctcaactctcaggacagcatgtgacacctccatcactgggagcaaactctgtgcaggagcacctgattctgccagggcaggtaaggaggtgacgccccgcagaggcaggtgatgtcccgcggaggcaggtgatacggagctctggggagaccaccagggtgggaggggagagcgccaggaagggctgctgtgttgaagctgctcccatgcgccccgaaagggggacgtccacagacagagaagagtgggatcccctgaccacagaggctgccttgggccgtgtcccttctggacatacaaatgccccatgggctgagccatgtgtatcctacgataccccagatatcccaataaccagagtccctgtgggacagcgagtgaggctgaggatgaacaagctttgaagcctttttgaaaaactactagctctcaaaacacaaagtgcattcaaacaagaagttaatttgttataacttttatgttataaaagtggatttttatgtaagaaaaggtaaggataaacttaaattatcctataattgtggctatttacttgagttcaaacactgaaaagaaaatgagaatttcctctttaaattcccttttcccacgtccttccaggaaattcactctcagaagcatgttccactcaagcggacttggcctgcgctgtgagtcaatgtaaagagggtgtgttggcttcggctggttgaccttcagaagtcggagaaggccaaagtcccactgaataaactgcagatgaaagagactcatgggtcctcagaaggaggcatatggctgctctcgggatcttgacttttgaaatatttgtttaaagcaaacacttgcagtggccgtggaaagcctcccgtttcctctggaccctcagcctctccctcgcagggcaccgggctctctccctcggggacaatgaggcgagagaggcttttgtttattcttcaggagtctctgagagttcacagtcatgttaaaaattaacctggggccaggcgcggtggctcatgcctgtaatcccagcactctgggaggccaaggcacaggcgggtcacctgaggtcaggagttcaagaccagcttggccaacatggagaaaccccatctctactaaaaatacaaaaatgagtcgggtgtagtgatgggtgcctgtagtcccagctactcaggaggctgaggcaggagactcacttgaacccgggaggcggagtttgcagtgaaccgaggtcgtgccaccgtactccagcctgggtgacagagtgagactctgtctcaaaaaaaaaaaaaaaaaaaaattaagaaaaagaaaaaagagaccaagcatggtggctcatgcctgt

SEQ ID NO: 48017 - DNA, 1497 bp, Homo sapiens
tatttttcctacctattcccttgtaatgtttctctttagatgtgaacataattaaatgtaaatttgttttactccatttttattatccaagtgttttttactttgtgattctttaagttccttagatttataattataaagttgttaaattttctgttaaatttataaactatatttgtctggcttggatattaaatattaatacagagaagccgaactaactttcttaagaagaggtgttggggcccttagaactgttaaagtgagaaaaaaactgtaataagcaatatattccccaacattttaaaagtcattaatttaattatgcagacactttaggttagtgctgttgggattctccgaaaggcgcccacgtgaaccagcgcccctcacccgcagcccacttgtcctcagccctttccctccccagtctccaggattttaagttgtaaattacttgaaacgtgtgcattcaccaccaagagaaaacacaaatgttcctccacacttagaatactgtaaaggaggggaaaaaattctaaaaacgtgagggataactgaaaaaaaagtgatgaaacaggccccagaacgcataacgctgtccaaagtacaccgctggcttctggccacgtgactctccccatagcagtcacaaaactgtggggctgactttgttttcctgcgtgttgtctattttgacttactcacagctgttcgtggcacatgcagacggtcggagaagaggcctccgttccttcctcgcctcctaaccaccggtgccctgacagatccgcctccagctcatgaaagggtcaggtgttgggacttgtctttggaaaccatatagcactttccacctcaagtgattttttaaaatctacatgacaggccatgtaaaaaggctcctcatactctgggcagtccctgcccctgtgtgccaagccctgacatgctggttggatgagaggattgctaaacatatttaccgaagtgctgtggaattgaaggcatttgggaagatagcatgcaggaaaactgtctcttcaaacaccgattgattaggggattagggatgggcccacctgagccagataaggagctcgaggtgcccggcccaccccccaggccaagcgactatcctcctgggaggcgctggactgacaccctggctcacatccttcctccaattctccctctgttttaaatcccaaagctttcctgcacctttacactgcattttatgctttattaccttctcagcccctttttcctgaaggcagagaactgtgcttctggaagaatcctcccttcctaacacgaagaccccctgggcatcagcagaccagggctagagacgtcactaggtggccgtctcaaatcagggataggagcttcaggctccgtgttatgggaggggctctggttgcgactgtcccatgtggatcatgaaggatgttgacccgagacaatgctggacatggtgaggaacatgtgggc

SEQ ID NO: 48018 - DNA, 769 bp, Homo sapiens
acggatcccgcacgggagcattctcacccaagcccagagactcccctcccaccctttacaatgcccaggggtggatcaaagagccccctatcgtggcacaagaacaggtcccagccccgccctgcccccaactctgctgctgcctttccccaggacacaaggacaggacagggaaacgaggtggccgtcctcagagagcacctggttgctctccctaagtcagtgcgaggaacaccccatccctgtcccatgtcccagtctggatggacaggatggccaccaggtctctgtcttctcctataaatgtgtccacagctcccacaggacatggtacggctggggcaggtcctgatgggggaagaatgtctcattgtggattgcttttcctctggtctggtttaatgtttaacccacaggactggctaaacgcaatcctgtttaattgactgtttaacttgagaaatcttagtctcgacaagggtctgcattggacaggtctgcaaacacgggcagaaagttaggttctggcacctgaagctgccctttgcacatgcccctcccagggacacatgccccttccctccctgcaatggcctctgcgtggcctctccagcctgaggcctgcaggatagggcagcatttgcacctcagagaccaggggaaagcatgaatcttagcttcccacatcgcttgcaccccaggcaatgggggcgcaggagggagcagtgcagctggaagaggaaaggcaaggccgaggtcgcggatggtt

SEQ ID NO: 48019 - DNA, 789 bp, Homo sapiens
tagagctgtggtgtccccagagcctggcctccaacagggcacagctggggctctgtgtgttcacgggaagcttccctgttgtgagcatctctgcctgcccagcccactcactgcggcaagccctgaataaacaacctttgtttgtccacacccggcggcctttgtttattccacacttcaaagccggcagtggctgttccccttgtcccaggtggaactgggagctatgggatgacccacaagtccacacctggtgactgtccagcttcattcccggctccgggcccgctcttctccctggattgctcctgcactatctctctctcttcttccttccactcgcctgtcttcctctccccactccctccgcctgcctcttccccgacccccatccagctcctcactgcccagcttcaccgccgcttacctctaagcttttacagaggttcactgctttccgtctcctcaggaaggcccagtgtcaggtaggactctgctgtccttgggttattgattagccagcttgtctatcctttcctgggtctggtctcccagcggttggcagcaggggctgagtcagcagctgtggtattacagccatgctctacttccacgagcagagagctaaaactctgctccagctgggcccccaaatgcaatgctgtccccaaatgtgtaaggaatgttgaaccatggtcctcttctcttagccatatttttgggaccatttacccaccactgctcttgctatatacataacctgttttcagagagggctgttttcataat

SEQ ID NO: 48020 - DNA, 508 bp, Homo sapiens
gtggtcgtcaggagcttgttactgggtaaatattgggtcctctgtatcttagattgtgtcatagcattgacttggaggagaaccgtgggaccactgcctgcatgaactgtgtctccttcagagctgtctggggtaaaggatgtaactagctctgttagcgtagcctccagaggaaaggcactgatgcaatctcagtttgagtcctagaatgtgagcttggtcaggaattccagtgattgcatagtcctttgttctgccgttgtcccctgttcagaaggtcacaggcaaaaaaacaggtctggaaaagttagacttggtttatttgtctcaatcgtactctccccttttgtcatataaatttatgttgattgtaggatgtgctggattttttgcactctctctccttttctctctctctctcacacacacaagatgacatgcactatcacaggtgcctctgagaaagagtttgggctcagggaacatttttgaggcctccacaaggagg

SEQ ID NO: 48021 - DNA, 650 bp, Homo sapiens
gcgtagtgttgttgaggtttctcttctcactgcaggcgagggcttcctgctgtccttcctgtttgtaattcggttttacttttcttacagggcttccgaaatcattgaagtgtcaaaacctgaatccaccagaatgtgtccatggaactgaaaactatcagatatttagacagggtgcgttaaagggctcaccgtgcgtccgttttatgccgtaattatgtgcacaaataattgcatggccggcgtcgcgtgagacgcgggaaggaccggggagcggcagaaccagggcttccaattcccgtccgcgtttaaagcgcgccagcgccctctggtgctcaggctgcgcagcgcgccggctccgcgggtgccgccaagggccggggctgcctgggggcctgcccggggttccagacctgctggaccgtgcatggctcatcaggccgggcctgtccaggggtttgagaaccgcagacctgcaggactgtgcatggctcattaggccgggtctgtccagggggtccagacctgcaggaccgtgcatggctcatcaggccgggcctgtccaggggttccagacccgcggggaccttggctccatcaggcgggaaccgccccgcgggattctgaaaggatgaatgcattttcctctt

SEQ ID NO: 48022 - DNA, 790 bp, Homo sapiens
tataaataatatgtatctccattttaacaactgtaatttattcctaaagccatatttaaaaataattacatttttaaatgggaaaagtcgtatgaagaattctgtcccacctcaagataactaaacaatttttcagtagaaaaataaatctaaaaacagaaaaaatattttaaaagtaaataaatcgtacataaaacgaagcgcaatcgagttttgttgcactaatgctttcttcctctttctacaccattttgtttgcagaatcggccttttgaaggttccgggttaccctgcagtgaagctgtcattcaagcacagtcagggcccaggagagggcgcagggagggcgcaggcgcgcagggagggctgggcatgcgctcggcggggcctccggctctcggggacgcgcgcgggcggggctcgccggggctgaaccggctgagcttcccagggacgccccgacccaagccctgcagtccgcgcgcgtcaggggtgtgcgctggaggccggaaagtcgaatatcacttcccatcctgcatttgatgtgctttggggttgaaaaagcccttatgtggtaaaaaaaaaaaaaaaaaaaaagtcagaaaagtggcaaaagtcttcaacggcctgaaaaaggccgagacaggaactgagaagctggcagtaggtcctgctactgctgcaggggcggcgggcgccctgggtgggccacgaggcagggacagccgaggctccgcgctcaccccacccgcaaggggccaagcgcagactcaggggagccagaggggcc

SEQ ID NO: 48023 - DNA, 974 bp, Homo sapiens
aaaatgtttaatcaacatgagaacatgaccactgtcccttcagtactgactcgccctcatcctctcgtcttctgagcccacactttgtcttctggatttaccactgaccttgtgtgaggccgggacagcagaagccatggctcccagggcctctgacacccctgtcactggcaggggcgcctcccccgtgtttaggttttattgtggaagtgcaaagcccgctctgactgcttacctttgtgtcattttatcctatgacactcattttatcccatgtggtcggtctcattgctgtgcttggagtggggacaaggcatttaaagcaggaattcattgcatgatggtgatgaaaagtcttctttccttttcatagcctttcacttcctcatttaaaccgtttatcccctgcaaagctaaaaatcagtaacacgcttctcagtacactccagcttcagtgatcaccctgtgctgtgaaaacattgtgtatcagagggattgcaccccatgagctcattcatatttacacaacatttttagatttagatgccatcctcaggagcaaggtatttgccccagagattgcgtctgggagcgcgggccctgcagaagcatggagagcggaggcctttgtaccaggacatctcacaggcccactctgcctcagtggtgttgacccagagctcacccccagcccccggcaccctgcagcaagaggccatcctggttgtgcaatcagccttgtggaagcgatctcctcactcaggaaatatgatccaatctccctctgctaggtgactcatctccaggctttcatcttcttgacaggcagggttttgtctgtagctgcctcaaaatattctttccatttcatcatagtttaatattttatagacttgtgttcttcaacaagtaattaaaaccatccttagcctctcaggatacaagtccattgagaaaagtctgataagatgctt

SEQ ID NO: 48024 - DNA, 767 bp, Homo sapiens
agttctggtgatggctctcttcctggcttgcggaaggataccttctgactttgtgttcacatggccttcccttggcacatgtggagagaaacatctctctttcttcttcttttataatgtctccaatcttatagaattaggactccactcttatgacctcatgtaaccctaatttcctcctaaaaggcctatatccaaacacagtcatactgggggttgggccttccacatataaattttgaggaaatacaagtgcttcagaatattctgcccttggcccctgtacactcatgttcttcttacatgtaaaatatattcattccatccaaacagacacaaaagtcttaactcattccagcatcaactctaaagtctaaaagtccaaagtctcatctaaatctctatctgttaacctttgaaaacgaaagttatatttttccaaattacaatggtaggacaggcataacatagacattcccatcccaaaagggagaaacaggaaagaaggaaggggtgacaggtcccaaggaagcccaaagcctagcaaggcaaactccatttaattttaaggtttgagaaaaaccctctcagcttcatgccctgccctcaggcccactggggtggcagcagcatctccatgacttggagagtggtccctcccaaggcactgagcagggacattcctgacccactaaagccagacaagctgtaccctgtgaaaccaaatgggaattagcgctgcctgatggggcctgtggtgggagtgg

SEQ ID NO: 48025 - DNA, 1090 bp, Homo sapiens
aggacagctcttgaaacaacataaaaatacttttcagatagctgttggcacttctatttccaaactcttgaaccattaagaaaaagaaaatggcaacaaagaaaaagcaacaaagtccagcagataaacatattaggacttattcacatgaatacactttgaatttggctaggaaccagatctcttaatgtccggtctctgtccatgtaaacagaagatgtgccacttgacccagctctctgtccacatcagctcatccccagaggcaagtgcgcttggagactgaagagtgacaaaagggaaggaggctcagtttcggtttcctgtggaactcaatgaactagtgttgagctttattttatggaaaatggggcaacagaaaacagggaatgagttatttttaaagagatttttaaagacacatagggatgttaggagtctcttgggcaaggtgacaaagtacaacctagaatgagaaaaaaggaaaactctcccaatgtctcttcagtgagaaagaaaaggtgctgtaataatttaaaatgaatgactaactcaatggcaagggacagaaacccaacttgcactagtttagcagaaaggcattttattatatggttattagaatgtctaaaggagctaaagaaaaaaaaaacagatttgggggtttggggaaaaccagagccatagatgcaagaatcaccagtacttcctttcagtttcatcacctgggtctattcactgataggtgttctccttacacttctttctctttggaaaccatgtgtctccagtcctgtaatccacatgggcagagaaaacaaaatgagcaagcaaaacaaacagcaacaaaaagctgggatctcttcagctatcaggtttcacctttggcctctgcttctctgtttcagtttcaaaatttggcccaactggggccaggtgtcagtgatagctgcccccatggttaactgtgtgtggcgaatggaagtttcccagaaaagcagtaggctgaaaggcaagctatgaaggacaggaacaaatcctttcctaaaataaattaggatgtcccccatagagtaaatctgtaaccaca

SEQ ID NO: 48026 - DNA, 1620 bp, Homo sapiens
atagaacatgaatcagataaattatggtgcacccacataaaagaattatatgcaaccatcataactaaggaggtgaaaaatcaggctaaaaaacagtatttgcactagaatctcatttcactatgtgcgtgtgcatatatgtgtgaatagacgcatacacacccacacattcagggagagaatgaagtttacacgctagcacgttaacggtggtgacctctgcggggggggggggcagctaatgctaataagctattgtgttttttcccttcgtttgtttcctttgttttgtctatttatagtttctattttccaaaatatgttgtttctttaaaaagtaagaaaacgtttagaaataatatttctgaagttaaaaaataattacaccaacatactatttttctgtatctgcatcttacatttcccataaaataaatgcatattctacaaagactctactaagaatagagggttttttaaatggccaaactgcactcattaaatcagagttatgcttcactttttaattcaactctagcttgtctttcagtaaataactgaaataaacatattttggacaggctcattcaaatggaccaccatttaaaatatctattagaatactataagcacaaatccttcaaaatttgcataagcttttaaattgtggggttttatatgtagaaaattacattgtatcttttcccttggtattatttagttgtttactttaaggctatttatccttgaatgaaaaaaaaaatagttgccatgtttttgtaattcacaaacttcaatagcactgtgccataactagaaataatagaattagatgtgtaataggaatcctatgtgttgagtataactaaaatgctgcaacctatttaaagattaatttttcaagttgggtttataaatcatttacaaagaaattgagcagaactaaaattacagtccaactgtcacattcctgcgatgtgaccgcagtgtgctcgggctggaagccacagcaatgagtgtttgcagagccgaaagctctgccagaccatcaggaacaaatatcttccactggccagatactggatcaacaaccattaaatataatacgaaccatcttccatggccatagctcaaaagctatgaacacaaacagttgcaaatatgtcactggaaactcaggcaccctcacactgattggtccatgcactgcacaaattgcctccattctagctcaagagaaacccccatgacctttcaaaacagagatgaaaacaagtcctcagtgactaattttagagacctgccttttctcttgtccctcctttgataagtttcttgttctacgtatcaacatttacaaatgctgctctgttttccacaagctgcacacactagggcctccccacctctgctcctcagtatgcatgactgtgtacattttaggaggggatgtaaatggcctcaactgtatgaaagcatgacacaacctttgggatgattctgtggtttcactggctcacccacgttacataggagactgcaacgcatggaggtggccgatgtttatggctggtataacgcagcaccgcccagcagcagctcagccttcttgaggccggt

SEQ ID NO: 48027 - DNA, 2561 bp, Homo sapiens
aatttattattttagtgagattctagtgcacctaacactaggtaagcacttcaggaaaaggcagtgacaagtgattgctaaagataccatagtcttaaagttaagtcagtaaacacaagatagtaatcccagataaactggaagctgtagagttaatactcctttactggtacagagcagtgtgtgtaaattgtagaaaatttagaaatacataaaaagatgaaaactctactactcgaggagtaccactgataaaatcctgtgcatttccgtttttttaatgtacatacgaatatttttaaaaagagaaaattactcccttctgattagaaaagatcgaaatttttctcttttagtgataatcaagtcagaaacttgctgtttggctcgagttaggaaaacctagcctggtagttaccacgcaggttgaaaggccagtggggcataattaacgagccctcagggtccacgctcccgccctcggagctcagaaccgacgggaggtgcaggaggccgggcatttctacagccctggttcgttcctaaactactgaatcttttaaagagatctgagtgctccttatacacagctgctttaattaaaataaccacctgagcccttttcctccgaactccacatgcgctcagttctcaaagcgccgatctcaagcggccgcccggatgctccggcccgacttgtgccccgaattcccctggagaccctcgcactagcacggcgtcaggaggaggcttcgggtgacgagacagcgggcaacggctctggtccagagcgcgcgtgtccgccgttggaagcggtcacggcggaaccctcaaatcgccccctttcctagagacctcagcggagccgcgagcaaccgcgcagcccccgcgctccagccctgcgccctaggcacacgccccagagcagcagctcgggttcggcgccgactccgcgccgagaccagcccgctaggggaggactcacagcacccagctcccaggagggcacgcagaggactaccgagccacactccgccccacgctcgccgctatggttacttgccagccgacccacgcgagccgctatggttactagcccgccgcccctcgcgcccacgcccctttcgctatctcgcgacagctggagaagcctcgcttccggccggctcacttacggacctagcgtcacttccgcctccggcgaggctccggcctcgggtccggatgtataaagcgcggccccctgcggggagtggtggtgagtccgagggtgccacagcggccctgcccctgcccctgcccctgccctgagtgggcgccgcgctacgggggaggggttaacccacccctcctccccggggcctcacgcgggtgggaagggacagtcccagcgacagaccaggcgcctggacgcgccgtggacccgcgtgcggacggcggggacaggctccggtgctgagcgcctccggtgtccccagcagcactgacccacttgcaggccccggagctgagccgccagccatggccgctccccgcgggagggccgcgccctggacgacggccctgctgctgctcctagcctcgcaggtcctgtctccgggaagctgcgcggacgaggaggaggtccccgaggagtgggtgctcctgcacgtcgtccagggccagataggcgccgggaactacagctacctgcggctgaaccacgagggcaagatagtcctcaggatgcgcagcctcaagggagatgcggatctgtacgtctccgccagcagcctgcaccccagcttcgacgactacgagctgcaatcggccacctgcggcccggacgccgtgtccatccccgcgcacttccggcgcccagtgggcatcggcgtctatggacacccctcccacctggagagcgagttcgagatgaaggtgtactacgacggcacggtcgagcagcacccgttcggcgaggccgcctaccccgccgacggcgcagatgccggccagaagcacgctggtgccccggaagacgcctcgcaagaggaggaatctgttctctggacgatattaattagcattttgaaactggtacttgaaattctcttttgagtcgttgaccacactctgggatataaaaccctccatctgtgaagctgattgcagtttgctgtgaaccttgctacttgtacttggttgaagttctaggtacctttagtcaagggatggaaaaataaagccatacgcagttttgttacctcagttaccccaaaaataggaaaagcagcaagcacagtattttaaagatcataattcctataaaaggactgtgcacaaagtgtttagactccattttcattaggcaggttgactaaaaatgattgcagtaacaggtttatataaaatagagcaacctttcatgctgtgacacaaatcaaaaggttgataactttgtaattttactctggagattctaaccgaagttggtgtaagttttcaagagttactaaaatcaagttggaaatgatttacgtacacttccctgagcctggactaaagcctcatgcctgtacccc

SEQ ID NO: 48028 - DNA, 3101 bp, Homo sapiens
taaattactactacaaattctaggcaaaggcattattatataaagtgagcatctgggcagcgggcctttttcttgagggaggtagtaacagcaatattgttcccaatacatgacggaataaggtaagaatttccgtgtaaccgcaatactgatacagaggcccatgttttcaaagactcccaaacatactaaatcagagatgtgccttccagagttacaggtggtttccaactacagatcagatgaatttctatgcatcacatccttcctagggctcaggggtcaagaatgcactcagggggcactggctcagtgccctccaggtgccgggccagacgtcaaatgctggaagtgcaaggatgtgcattcagagtcttacaatctagttacttccattgacgacagcctttgaggaaccttcaaaatgagtctcacagcacggtggacgtgcgcaacgggaaaagctcccaagcaggcgcagcccggctaggctgctacaggacggcttcccctgccaacgcgcacacggcacaccgcgcaccgcacgaaggctggctggctctgcagcattccagttcccaccgccttctaatttcaatccaatttcaagcttccaggcttttaaaacatcattcctcccttccaactttctgtcacaaactgctagcctaactttagaaccaaaacgttttgatgcgtgacactactgctcatctccattttctccacaagcaccaatttcttttcacctcctcaagcagtaaaaagttttaacagacttccgctgaaaacatccggacgcttgcgtattaacttagttattacagtaagttcactgagtgtgttgattttccatatcgttcgccactcggtttttgcagtaagcgttcaaacacttcggcaaactatgcgcggaatgaacgctgagcgaacgcgcgcttctgcaggcccctccgaggccaactctctcggccccgggcgcgttccgtcccacggctggcctaggaggaggcgttttggggacaagcttgtcaagcagggccggctgccaacttcggggaagccgcgccgcgtcccccgcccgcccgcacttgttgctcgctagaggccgcgggctcacctcggggccccgcctcgccgaccacccccggtctcaggcgcggcgcccggcctgggcccacgcccccgagacgctgggcggccgccggtgggactgggcccacgccccggcacccaggcccgggacggggtcagggtcgggtcgcaccggccgcttcctcaccttcggggactgcgctccgggggtggctgggtcgctgtcgcacggccgcggggacagcgcagccccgggcccggccgccgccgccatcagcccgagcgccccgcgccgccgccgccgccgtcgcctccgccttgtcccggccgccgccgccgctgccgccgccgccgccgccgccgccgcgcgggccccccgccgccccggccccgccccctccgcccgcccgcccgggggccggcccctgccgccgcgcgccccgcggcccgccagcgccgccgccaccgccatggccgtcgccagcgcgccgcccgcgcgggagggcgccaaaggctgggagggcgcggggctgcgggccggaatggaggaggcccagcggcggcggcgcttctcacgtcagcccaacccgcccggccgcggccaccgcctcagcaccgttgccccccacagctccgccgctggcctcagcgccgccgcgactcccttcagccccgccactcgctcgcctcagccccgccgctcgctcgcctcagccccgcggccgcctcagccccgccgctcgcctcagccccgccgctcgcctcagccccgccgctcccctcagccccgcggccgcctcagccccgccgccgcctggctccccacggcccggcgttgtactcggccgcggctccccccagcccccggcgcgccccacctcccgcccgccctccggcccgccccggcccggcacgtcgccacttggcgcgctcgcagccgccccctccccgcggcccccggcccggcccctccgcgcgtcaccctcgttccctccctctctccgcgcccccgccgcgcccctccccgcccctcccgggggtccccgccccgccccctctctgccgggggtcgccctgcccggagcagtcgcgcggagactgcgcggcctccgcctctacgcgctcgcggtcgccgctcctctcccgcctttgttctcgggtcgcccctctcgctggtggcgctccgagagagcagcggagccacctgcccaggccacgcttccccgagcatccgcagctgcacccgggggctgtcggcgcccgccccggagcgtgcgggaggcacagcgggaagaagtcgctgagattcggccctcgtggctttgcgtgcccgcgtggttgatgcctccgccgagaacgcggtcggccgggagccggggaggagcgtggacgccggcctggcaggtacccccgcgagaacgtgggagccggtgtatttcagctgcatttattactgatctcgggctgcaccagggcacttgtaggaccgcactaaaaacagcggaaagtgaggagccaagcctgggtccggggcggcccgccgtacagctggcctcacggattccactgcctgcgcctgcagatgacttgttctggagagtagagaatgttctcggatttaaagtacaatccggtttcctttccattcattatagttgcctacactcaacaaacaaaagttgggaaagataaagggattattctagcgcgtcacattgacaaacaccgacgttaacacgctcagtccagcctgactcacttgcctcaggtcagagaggtcaccactgacgacgccgggccctcaagccgatcctaatccagcttggttctctcagcctcagccagaccatccgttcttgcctctgtcccaccacgtgcaggtgtaagcttccgccgcacttcttgtctgaatctgccaagaagaaactgcatctttcagctaaattcttttcactgatcagggtagagtttagcggttttttttttaagaaaaaaaacaaaaacaa

SEQ ID NO: 48029 - DNA, 2371 bp, Homo sapiens
aagagaaaccagtataggccaattggaccgagtactagcatacaggttctggtcccagctctatcattacagctttgtatccttgggcaaactaattttctgttaaagtatcaataaaatatagagtctttaatacattaacggttttcaaagcctaatcatatagaaatacctgttataccaccaataaaactgaataatgaccctttccatcaatatcagtaagttttggacagggtattttcaacttaagtttttttctcctgtacattcttcaaatatccagactgctgatgttttaaaaacccaaaacatggcactattctgcctggtttatcaaattatttttttaatacaacacactcatttttcgctagcaaaactgcttataatggcactaaatacactaacatactgtgttttagtacaaagcaataatactcagagtactctcaggaaatccgcaagctgagtaaatttgaaaagaagatcttgtaaccacccttccaatcgacttatgtagggttctatggccctaattaaaaaacaagaaaactttagcactcaagtccaaaggggactgcccaactcagtctcaggcttcaatttcgcatctggggaaaaaagaaacacaaaagggagatgctgcctccttggctctgggggtggtgacgggagcggggcccactggggagcgatttcacttaaacggtcggacatagccgtctcgggcccctagcagtctccgcactcactgcctccttctcgaacatgctaggcctcctttctttcctaggcgtcaccggagcctgctgaggggtctggttcggggtctggatggggctcgacttcacgcctcggcctcgcttctccatctcgctctgttctccaagacgcccaccgcctccccttcaccgccggcggtcaaacgccctagccagtcccgcgagggcggaagtctcccacctgcgcctcgtacggtaggaagtgcccgccagggctccaaagcgcctggaggaggggcgcgcaggcgcctgcgtcattcacgcgcgccgcagcggggcaccggaagttatggaggtagggcgggtgtagggcccggttcgatcccgagctaggcagggagtcggcgccaggctgggtggtgctcggctacgcggagtgggcgagcgagcacgcgcctgcggtggccggcggtcccgcgctggagggcgctggcgacgtcgcggccctggcctctgtggcggtatcggacgctcggccctgcaagacgcctggcgggccctgccggcctccctgggccaggctcggtttctccgtcgcctcctggccctgagctggaacgcggcggacggtcagggagggctgtgcgcggtggcgcgggggcggaaagccgcaggtcgggctctcacctgaccgtggctcgttcctagaagcgcagtttcctagtcgctgcctgtagggtccacactcggacagtaaatttgtgttcatcgccgggcgtggtggggcctgtggtcccatctactccgtaggctgaggtggaaggatcgctttagcccaggaggtggaggctgcagtgagccgagatcgcgccactgcacccctgtctgggcgacggcgagaccccgtctccaaaatgatgataacgataactaccatttttgagtactatgtgctagatgcttttcatgtgttatctgattactgtagccctaccaggtgcagcctggcaccgttttatttcacttagaactgagattccgataaagtaacttttccaaggcaagaggtagtcagaggctgaggaatgattcaaatttaagtccagctccaaagcaccggcccagtgtagtctgcagagttccagccccatagagccacatggaggatgcgagtgacaatcgccaatcaacaaatagttgatgtagatttctttagtgatgacttaattgttagggcctgctgggattgttcgaaaaccagggctgagagtggaaagtgcaacttctgggtgcaggaggagcaaacagggcaactgatagcagtttccacattaggaagctgcccagagctaattatgactgtcacaacacagcccccccttaactcaacacaccaaaataaagagcttcggttccgctttagatcctgaatttgacttctttgcaggtttatacgatggtcttagtgtcatgtggggtaattgtgaggatttcgattgtatttaattctccatggaaaaccagtacggtttgctactttttacatggcagggaaggctaaactttacctctgcccatcttagttcggagtgacccctttaacaaatgaaaggataacaagaaaaaagtttattcttggacagagt

SEQ ID NO: 48030 - DNA, 2123 bp, Homo sapiens
agcctgggcagcagctgaagatgatgtggggaggggctgctcagctggggctggaaggtgaggacagggctgggctggccgccttgtggagatagcaggacttgttgagggaaagtcaggccagggatgcaaaccaaagcctgaggagaaactgcagggccgtgcatggcctcagctccctttctgaggctccgttgatgtgagtgctttcaacaagccctccagggaatctctgctgcttgcaaccaaaaagtagtgaccactggaagagccagcccctgcgagaggacagaggcatggccgccatcaagaggcaggcaaaccccagagaaggaggccacggacttggcagtggacgaccggtgtgcgatctcagtgccacaggttactggttttgtggcaagatgtgtacctgctgacagcatggcttcctcgtctgcagagtgtgacagtgacattccctgcctcattagacgttaggatacagtgaggcgccgtgctcagccccattctggcacgtagcatcgataaacaccagctcttaccggaccgttcccttatgctgggaggaaagaaacgatttggatttcctctgtctagaagtccagctatctgcatgtgtgttcagaggacgttctcgtatctcaggagtgaaaccaaagcatcctgtacatctttcccccacccccactcatagcctcggattctctgcacagctttagtaaaggagctgatggggaatcggatgcctgaccccgagtcctcactctggggctcgagcttaggataacttcaggttcagctgaggcctctgaactgtgactccgccccgtggccgcatgcgtcggaactcctacctgccctttgcccttctcgaggccggtgcttgactggaggagggctggcagcagaagtgcagctgaccgggttgcgttttcgtacggctgactaaagcggataccggtggcgactcatttctcgttttatttttcaacgatttggcggagaagctcctcttgtgaatggactttggatttcttggagctgcgctgcgggtcccacagtgtggctttcggcccgtgctgtgctggcgcctgcacttcctctggcggggcacggggtggcgctccctggtaaagcagcggccagggggagccgtgagtgaggcgctgcctctcccgctgaagcgggttccaaggccaccgtgagggggaccatccatccaggtaaaacgtgttctttccttgttcctttgcgaatcgatggggatcaggcttccccaggtggtgaagtgaggaacagggaccgcggggctcgcctgaccagtggggtctccatccttgtccgtgctgacaaaagacaagaacagacagcgcctgaaatcttcccgcctccgtgagggaagcctgcgtctgggaacgcgccgcagggaagtgatccctgagtgagggaggaggtgccggggcatcattaatcagacctcaatgccgggaaggttctttgtttaaagaaacactcatgtttaaagagcacttggtgcggacttgctgtggccatcgccctcaacagctcatctttaggaggtgcaggctgaattcacgcctcggtgtcgtccatgtctgcctgccgcgcagaggagacagcgagaggccttcccaccgcacggcttttacgggaagctcttcgcattggctacaggggtgtggtttggtttatagccacaccaagtaattttaatagaactcaataactgtgttgccttgcaggctccgagtgctacaggcagacccgagtccgagtcttcctacggttcattgtccccccctggatttcctagggactccagatacgatggcatcgatgtcagttaacttggcacttcttaaaatagatctatgatcaaatcttaagtttttccgaataagactctggaggaatgcaggaaggtcatttgattactttaaaataagaggattttatgttaaaatattgaaaaagccagtcataaaactaagctctgtaccaatgaatatagttcgcgaagccagcagcacaggcttattattataaatatcaaacaccaccattatgagtaagctcatttattttcaaagcactttgcg

SEQ ID NO: 48031 - DNA, 2321 bp, Homo sapiens
aaccaggaggtggcaacagcaggagagtggacctccttccactgaagctgcggataaacaggaccttggaggccagtgagctccctgccccagtagggacgtggcctgctctaggcagagggcagttgagcaaaggagagaggcatcaaagtagaatgacttcaacttttttaaaggttgaaaaacgctgaataaaggattactgtaaagagtatgggattgtttatatttgctgagtaatcaataccacatattgctttcacgttgtttgctcagctctgttccagggcacatccaagaagcatgggcatgtttctgtgctcttacaaagcctcctttctattaggaagcctgcagcacacacaaaacagccatcagcaagagtgtctgtggccccagtgctgccctaggcagcacacgagagtgatggactttgagtccctttattttctgctctctggaaggaggggttttaatagaatttatctttttatatattctgcctagcattagagaagcagacaattttagtcaatcattcaagaccatcctgcgacctcagcttttgtgctttacaaccttgtaaagaaacacagcaacataattaattacaattacagcactgtgatgtgaaatttcagccaaaaatctaagtcagccaaaaatctaagtcattgcctttggcctgaattcctttagcataatcttaagacagaacacgcatgcctgatccaagggcctgtgcacatcaggtgcacctcccagcaggaaaggctcggaggcgtgggccaggggatcatgcagagttgggctttcattcagcatccccgggaatcaggacattgcactcacacacacgcttgccacacagcctggcaggagccaagacaaggttgcaacactttcatctttaagaaaggagtttgaaaatattcgctgcaaattaacacaacttttctggctggtatgtacccacaaatggatgcagctgcaccccggaccgacctgggctccctgaaagatcagagggaaatgtgagggacaaacccattcagtgcagagctctctttcttcaagcaagggaaaaaagatttccaaatttgaaaatgaccttcgcacctcccctcctttctgttcccctcttcagtggaatgtttgaacaagcactgatgactcgctcccaaatagcccagataaggttttacaagaacaggtgggcctgcttgaaagataaactttttctgaagcaacaagaagacaaatgatccgaaacttgcaatttggttaatgtttctctctctctctctgccttgtgtgtacacagctccttctggccggcagcaggaagagtggccctgtgtgtgccaggccctgcagtctctcctctcagctggtgtctccagtgagggacctgagtcatcgcacacatgagcctgtgctcagcctgcacatctcccgcctcccaccagctgctcctcaactgccagggccagactgtggcaaaatctcactcctctgccgatgctggggtttccctcgtgtctgggaggtggtgtgcttggtggcctgagcactgcagtgaatccatgtttccctcccagcaccctgttctgtcctccaacttggccgacagctctggccagggacgcagcccagctggtgcccaccccgcactctgtccatttcataagagcccttggtttcctcacttccctcagattttgccaagagaatggtcctggtgtggcccagaaaggccagcggggtgcagcctgggactgaaagcagaggcggctctggtggggaaaaagtagctctcccagcctagccctactggtgggcggcacctcctggctccaggccatcttttgtcccagtcctaggtaagaaaaacacaaacaaaagccagtcccatggcactcgagaagcaggaggccgttccctgacagcaacatgctgtgtgcacagacacacgggtggacaggaggcagagctcggggttgctgcggagcgggcaggacactggagcggcaggcagtgcggacccgccgggcagccgtgcacggttgtcgtcctcagcggcaggagccagtttgttgctcagggccttgtctttttacaaagagccccaggccccgggggcttctctgggtgcctctttgctgccatgtctgcacgcgggcggagagcagaccaggctaccgaccctctcgctttgctgtcttcacgtggaaaagccagtgtcgtagccccaaaggaggggaaactgtattgatttggggagcctctatgttgatttcaaaacagattgtctcctgtgt

SEQ ID NO: 48032 - DNA, 1982 bp, Homo sapiens
ctggtagcttccgtggcttctttctcttcccagaccctgacagatgaccacgcgtggcttgctgaagccatagctgtatgaggacactggcagaaacggctgctgttcttcttgcttcccaaagggcagagatacctcgagtcacagaaggatgaggaagcgtcttctcacacccctgacttcatctgctgggagctggtggctgagggcggctggtttgctctaacccttcaacaccgatgagtggaaagggccaaggaagcaacccccgcaaactgcctggttgccaagaggtctcccaggtaggggacagactcgggtcctgccggcagctgcgcagggagggtctccatgacgcaatatctccacaccacggcagggggcgctgttcacgtgcgcgagaacgctccttagtgaccagagcctttgctccagggacaggagctgcctcagagcacaatttgctgctttgaaaagggatttagaacaggaattccctcagacttggtaacagtagatgccgtgtgagcggaagagcatcttcagggaaaacgtgtgagaaatgggggagaggaaacctgactccaaataaaccaagaacacggcagaaattaaggagctcgcaaaagctgtgagagggcagcgagttgccagttcatataaatgaagagatcagcagagtccaccgccgactggttgcgaagaagtctaaaaacagacccaaggattcggaaattcggggccgtcgtagagccactcatttcagtagaacagtaagtgcagaaaccagatttatacacacaggtatatacatggatacacacatctatacacacactagttttctatttgtgttttaaaatttaactttttattttgatgtttaaagagtacatacaaatgtagaaaggactgtgtaatgaactcccatgtaccaagtaccacctgattaataattaagtggcttatgactaataattattgactcacgactcaacttgtttaatcagtttctgcctgtccccactctctatctctctttctctttggattggagtattttctggccatcccaaaagatataattttatgtaactactgtgtctctaatggataagggctttttaagagcagcagagggagagaattgggacagaacccagagccacagggagagctgtgtccttgagcagcacagatccgaggcagcgcctctggttgcccagctagtttagaagcatgatcaaacatgtgacatgagaagcaatatttacccttctaaaatgtggcttcaaggatagattggtttaagccaagcctcctttacttttccaaataagaacagacacacactgataggaaatgaaacaggaaatggcccccctggctaatgtgtgggtagggtgagatgattcctttaacttgctcagcatgagtgccttctcaggatgtgacaggagttcatgtcgggatttaagaacatggacttcttggatctgttggttgtatgttcttgggaaagttacttatgcctcaatttcacctgcaaattggggttaataatgtttaaggtcacaaggttgttccaaggataacacgagagggtgcatgtaaagaggtgggtgtagcacctgccgtgtaagaactgctcagcctacattagctgtaatgacgattggtgaagacacccgcttgttaactgttgtgttctgtgagccccccagaagcaccttgtccgtaattatcacacagaaggccttttcctccactttcaccgtacacagaaataatatgtaaggcccagacttaaaatgtaggctgtcatttttttcctactcgaaaataatagagagaaacatttctttttttctttttatttctagtgcacctatatatgtgtaagaatggtttattactctcgatcttctaagttaattttgggggaaaatagtaactccttcaagactctagagtttccttta

SEQ ID NO: 48033 - DNA, 334 bp, Homo sapiens
cacggcactgtgactgtgcttgcccatctggaaagcctcaggcgtgcaggagcttggctgggctccacatttggacacagaacctgctccatctgagctcgtggctcttggtcagcccaggctcagggagcctctcgacggggtggaattttgggtttcacccacttggctgatgcttcctgccctgtgtaattgaatcaatcctttacgtaaatgctgtttcgtaactgcccgggcttttcagggcctctgggccctggctgaaaacctaactcagctcctgcctgggaggctttgcgcggcaggcctggctggtgggagggtttggtgccag

SEQ ID NO: 48034 - DNA, 1106 bp, Homo sapiens
ccaacccctccggtttccattttcttctcagtaaaatggcaacacagttgcaatgcctcccctagtcccaccagataatcccaccctgtgaggcagcatcagtgaaatggccacgagcacagccacgctctgtgcacaccgtgcaaggacctgggaggtcagggtggctctgcctgtattgcttctcgtggccagaactccacctgcctccttgttcccacacccgcccgcagggcctggaagcatctctgaatgttgcgttctattcatagctgctgtgagcagcccagctgtgcagggtgtgggagcccagtgtgctctaagccagtccccagcatagagccggccagcctggcgcagagccagctgctctggtatggggtgtgggcagcctgccgagagctgtagggcggctcgagcagctcctggtgactgaagtcaccccctccactagactttgccccccgactgcccccagcccaccctttgaagtgtcattgtcgctcctggaaggcaacttggggtccagggtcccaggcctccagcccaggctcaggggcaaaccctgcgccagtgttcacgcacccacactgctcagtccagtatgttgcccttggcgtgggccgggtaggtgacacatgcttggtgacagtccggccctctaggagtcagaagggcatccccggacactgggtcgatggccccagtctgcgaggacacacacctgctgcaggaaacaaatgtaatgcactccaagagctgattgagcaggaaccaccctccacaggcgccgcccaacgtgtcctccctgaatgctcccacgaccctgtgtggggtactccaggcccccggctgcagggagggaagtagagcaggaggatcctgagtcagagagaagccgtgtgcatccaaactaaaaccggagctcctgacccggagacactggttagcaatggctagagcgtttttctgataaaggtgctcactcggctcttgagccacgctgtgccactccacctgagtccgggcacactggggagcccagaccagggagagcgaggccaggctgggctcccgagacccttgggtgggcagggtggccacac

SEQ ID NO: 48035 - DNA, 2128 bp, Homo sapiens
agatgctagcatcatgcttcctgtaaaatgtgaagacttgtgagccaattaaatcattttatttttaaatcacacagtctcaggtatttctttatagcaatgctaggatggcctcatacgggaggtaaatgcaaatatacttcaaaaacccttaatattgttataaagaaaaatgtacaaaatataatgttaaaaaggaaagcaaaaccaaaactctgcttacgaactttgaaaataagtcagggttgatgttcagctatacaagttgttgatggccaatccatttcttttgctggcaccctcttcaggtaagttagtgtccattctgaagcttggtgcctgttctgatggttggtgctggttcttatggttggttcctgttctgatggttggttcctgttctgatcattggtgcccactctaatgcttggtgccctgttctgatgtttggttcctattctgatgcttgatgcccattacaatggttggttcccattctgatgattggtgcctgttctgatggttggtgcctgttctaatggttggtttctgttctgatggttggttcctgttctcatggttggttcctgttctgatggttggtgcctgttctgatggttggtttctgttctgatggttggttcctgttctgatggttggttcctgttctgatggttggttcctgttctgatgattggtgtcctgttctgatggttggttcctgttctgatggttggtgtcctgttctgatggttgattcctattctgatggttggtttctgttctgatggttggttcctgttctgatggttggtaccccctgttctgatggttggtgcctgttctgatgtttggttcccgttcttatgtttgattcctgttctgatggttggtgcttgttctgatgtttggttcccgttcttatgtttgattcctgttctgatggttcatgcccattctactgaactcatgactcattctgattaactgtaggcaagacttactagtgactaaacattttgactctcgcccttgtaattaggtaaatattttgcatcatatgctcaaggacttaatttgtgtaggtaaacttcttgaacagcggtttctggggtgcttttcaatgtttatggcagtaatttctgtatagtttattcaattaatgaagctaaagcatgcaccctggtgactttgggtttgcgagcaaagtgcagcacatttatcaggttttgtaacattgtctcccctgggccttttccaggtaaaccttctgctgtgtcctgagggcagtagctgccccagcgggcgctctgcagcccttccttctgcttgcccaggtcaccaagtggagctggggaggaaggagagagcagggagaggaggggagaccagaactctccttttgaactcctggtccctctggaagcatttggagctcactgggaccctcctcatttttgctgcaggttcccttttgttcatttgttttgtgttgtttttgcacccggccctccctgcctgtgccatagactctgtctgtaacgtttttgatccacatttttgccactcctacattgggtctgataagacaaaagtgactctctcagaaaagaaaacgggcacagtctaagggtggtgctcattttgtgatgaaagccccatcttgtcttttttttcatcaaggtggtctgaccagcctgccctgtactgaccttattgtcattcttttctagacaccaaagccatgggccccagtgtgtgggaggaggactcacatcagccagggacttccttgcagccacaagcgtgggtgcagtggtgataagcacactgcggagggtgaggtgtgtaggagggtgaggtgtgtaggagggtgaggtgtgtaggagggtgaggtgtgtaggagggtgaggtgtgtaggagggtgaggtgtgtaggagggtgaggtgtgtaggagggtgaggtgtgtaggagggtgaggtgtgtaggagggtgaggtgtgtaggagggtgaggtgtgtaggagggtgaggtgtgtaggagggtgaggtgtgtaggagggtgaggtgtgtaggagggtttggtgtgtaggagggtgaggtgtgtaggagggtgaggtgtgtaggagg

SEQ ID NO: 48036 - DNA, 2247 bp, Homo sapiens
caggcacaggctcctggggctctgccccttcactggatgcaggagaaagaattctgggtaggcaggagggtgccgggctctgccagggccatgttggccacgggcagggcagcccaggcctctctgggcctgttttctgtctcgtttcttctctcccaagtgtagcaggattgcagagtggggtcctttccaggtctaaaatcatgtagcctcttgttttcctgctgtgcatgtgtggggagggagattcagatgactgtgcacagcagaggtctgcaaacgagaagacagggtgccttcgtctaggacccatttgggctgccacaggcaaaatgacacatttcctggtaaaggtgactggcacggctaggatcctgtgccctcaggaacccagcgagctggagctggtgttcagtagctgatggcgtggggcttccctggctgggcccatgcaggtttgcttaggccggtacactcgcgtggggtccacactgcctgaggcaggcacccccgcgccccatccttgtaggtttgtaatatgagcgcctcctccaagcagcccggaagccggccaggccctgaatgggttctggagagtcttgcagccccatccagcacatgacccaggacagggccacccagctgtcctccccagccccatccagcacccaaccccaccctgcatcagctgctctccttggaaccaagcttgcggggtggggcaaaggtgaccccagcacgcagcacggtgccaggcatggaactgacacgtgatgcccgtctgtttaacgagtgaacaaaggcaccagaggctttcttcccttgaacaccaatcttccaacctagattagcagccgagcgagaggtggcgtctgaacagcctagattagaggccgagcgagaggcggcgtctgaacagcaccctgggatcaggcagcgcacgcttcccacatgtgtcttgctcgttcactaaacaaatatttgtgcttggcaccagttgatatgttggcattgtgtttcatctgattgtgtgttatttaaaaaactcctattactaaatccattaagcaaccaaactgctagagtcactagattaaaatgcatgacacacaactacaggaaaatgtcaggaaatgcaaatctaggcaggcgtcctcagacatatcagctatgaggaaactctctctaggagatctgtgttttcctcccaaaagaagatcatctttccagaaaaagaggattttacagtcaatttgctaacataatataaatttgtctccttccggggacttatatatgttagtacataattggtgtctttattgatggctgtaagaaccaatacctccaaaataaacagaatttgtacaatagtaaagccatttaaaaaggcatgctccactttatagaatataacttattaatcacattttgaaagaatagaaatgcattcactcttaagattgcaagctgagcatatgctgaagtctttccccatatgcacatcaaactgtgaaatgataggaaaaaatagtaaacatatggagaggcatctggaaaaacaaagaacaggaattctctgagaatcagcagctctcaggaaacccggacaggttccattaaagatgcagctgccgttccaatattcgcccactcctggactggctcatgggagcacacagccactccaggagttccacgccagggaggaaggcaggcaggtgcatcctggagagcacacgggagttccccaggtcccagtagaaggggctggctttccaactgctaccgatccccttacccaggctgggaagctggcagaggggtcaggaccaggcagagcagcaattgggccagggagaggaggccgcgccagagatgtgctggggaggcctgagccagcccagagagcaaggttcagaggtcagaggccactcatctcccactctccctgggataacccagaactcaagccccaaaaggtgacttttctggcaggctgtgtacgggggaataactacctcaaagacgaccccacagtcaaatatagtcagacgtctgaagcatcaacgccatgaagacaagattaccaaagaatttgcacttgagaaaactgagctaatagcaccaccgaaacagaacatttaaagtgtaagcaatagcctcagagagccaaaaggaacatgcagtatctgcgactcaggaatggaaagttatgagtaagaaccaattagaaatacaggaaat

SEQ ID NO: 48037 - DNA, 1359 bp, Homo sapiens
gaattcctgcagtgtgcgaggcagcatgtgcataactctggaattcactttctcatctgcctgtcacagcctgagcccgtgagcccgcagggctcagcacaagtcccatctgctcaccgggcagacgcatggcaggctgtgactcaggagagggaagtccctgggctacagactattaattgtaaacccaggaggccaggtgacaccctattctgaacatcaaataagggaaaatgaatgcatcgcatactaggcgggccagctcccaggtgctcaggcaggacacggccatccctggggttggttctccctgtgcctggcactctcctctccaggtgcaccagagctgactctgcactgccaagtgggcttggggagcactgcaccccacaggaatgctacctgctgggaagggcacaagaagacaggaagccatcagccacacaaagggacagcctccaaaatcaacacgttcggaatcagccacgcaaagggacagcctccaagatcaatacgttcacaagaaaccagcagccgaaaagaagactttacctcgagccattccgggaagcacgagtcactcccacttccaggcacacaccagcatttacctggtttggagctgcccagcccagcccagcactcttgccaaggtaccagagcctggagaaggagaagaggtgcctggccccactgtgctgtgggacgggcagggctgacacacatgtgccactgtgttgcacaaccacagcctagcgggcttcctctgccttcacccaacccgctaaggacattgctgaggtcaaacaggtcttacatgcagttttttggactcctgaactgaatggacttcgtaaacatagtttacttcttaaatttagtcttttatcacgttcttccagatagagaacggctcccttagggacacctagatcatgtttctcccaaccagccattgtttgccggaaaacccagctcatggccaccacctccacagcgcagcataatatccatgtgaaccggttagtgctgttagcattagaaatgccggattcttaatgcttagagctgaaagcgaccgtcctcagggccagcgctgtcacctcacacgggaaaagcacgacgcatcacgtgctctgaggtcagccctgctgtctgtgcagctccacctccagtctcaccatccccacagccctgccccagtaagttcactggacgctggatgctagatgctggcctcgtccgcttgtagccttcacccctgccttccgagtattgtcaagtgagaggcccgctcacgtcagtgaatgcccggtactgcaggaggaatcgtgatctgaacaatcagatttgaatatc

SEQ ID NO: 48038 - DNA, 885 bp, Homo sapiens
gcaacttgtctgaaccatgtaaagtccatacttggcccagagccctagaccaattgacaactttgaagcttcagataaaagattaacaaatcccgaagggataactgggcaagaatggcgtcagtgtctctgttaggacccacagccagtaagaagagcgtaagattcaagtcggacgggtcacggcactgcaggtcacccaccacatcaccaaggaacactttaccctgagtttccagtttctccaacctggagtaaaaaaacccaccagccttttagaatcgttgtgaggagcagagaccgtttacaccaagcgccaactcagtgcctggcacacagtcagcaatgatgtttatcgatccagctttctcacaatgctttggaggcagaataatttttcgagaatttccatgagtcttccaaagttctgagtcctaatgtgaatttgcaaaaatgaaattaattcctggcacctcctccctgccctggggcccagcaagcctccttctcaaagccctcagcagccccaggaaaccctggggcgtctgggcaccttctcactgcaccccagtgagttcaggcagaggatgacgcaggctgcagatggctggagcccatcgaccttcctggaagtggaagtcctgatgggaatccccgcgctgtcatccatcctccttacagaaagggtcagagttcattacccattccatgccctgcagaaaccagggtctttactttgggctggcatgacatcaaatcagatttgcacactggttgaccaactcaacagctccctttggcagttaagtgtgacttccatcaaccaaatggtaaaacattaaagtaaaaataaatgcaggttctatggaaaaaacaattaaaaaa

SEQ ID NO: 48039 - DNA, 906 bp, Homo sapiens
gagctgtcgtctcctgtgataacacggtttctcctggacgcctcccgcaggacctgcctgaggctgctctacagttaacttttttttttaataaatagaaggaacgcactctaaaataatgactaaaagtttggtatagtaaatacgcacccgggaacaaagtttattaacattatctggtcgtgtgtgctgtggacgatcacgtgtgctggacttgtgcccggctggcagcgctgtggacttgttcacgctggcgtcacacaggggcgggagccatgcgttgtgctgtgatgtgacagccaggtgacagccgagggaccagacgctttcagctccatgacaatcttacggcgccaccgccacctgtggggtgtgccgttgacggcaaagtccctgtttggtgccgggctgtatctgagcacctcggctcatccagaaggggtctaaccagtctaaacttccgtctgaaactggcccatttcatcagcgttcttgggaaaatgaggcaaaatagacttggacatttcagagaaaacattcacagtgttagtacgtttatctgacattatttacaatccctccgattacaagcagttagaagaggagaaggaggtcagctggccgtggcagggaacagggcctcctctcctgatctttcccatctcagcaaaatgccccattgtgtggctcaggggaagttgaagtcgaaagcctggcgtggggaagcagctgctgggccattgtttaatctgagctaatgcaatgtcaccacgcccaattatgtggccgcaatttgggttacagttgctttggtcaatatgatcactttcttttttgtttttcaaagaggtcaaaggttgggggctggaggctgaagcagtcaggcagtgaggggattggggaccc

SEQ ID NO: 48040 - DNA, 1848 bp, Homo sapiens
tgtatccacagcagccactggaattcctctgaagcatcctgctccctcactgccattgcctctgcctttcctctctctccttggaattctctcccacccaattccggactagcaaacctgcctgaaacaactttcagctgaagagtagtccagagcaacaatggtgacggtcagaacacccggccgagaagtgctcagcgctgactggggccgcgccgtcccgatacggaggcgagggtcgaacgccaggacgtccccgctccctccccaaacgtggcggggaagcgcgcggcgggtcccctgtgcaggagccccccgctgtccccgtttccggcccaggcgaggctcccggcctcagggccacccgcctgggccgcgctcgcacaacttcggcctgaggccccgggagccgccagtcctcagtgcctccggcaggacaaagaccggcatgcagcgtcaagacaccgtccgggccgcaggacagtgtatgaacaaagaggttcaagggcggcacccgcccgacgccagcgggcagctacctgactgcgcgacccgaggtccgccagcaccagagcagttgctgtggcaacaggccgcggcgtcccacgccgccggcgcctgcgcgccgcgtccgctgtccgcgcctgcgcgcctctctccccgcccaacccacgacgcgggcgctcctcactctcgcaacggtcacgcagaccccgcctctgcgaacccggccaagtcccgagcggaagcgccttgagcggaagcggaagtgaacgaggcggctgtggcggtggctgaggcggctgggcctagggtgcagcgggcgcgtctgcggctggtgttggcgcatctctaggtagggccgggcccgagggcacccgcgggtcttccgggccgctcccggcctgcgtgaccgtccgttacccgcgtccgaccctcgcgcgcgtcagcccctcggcttctgcccggtcccgatgccttcctggccgtgcctctgtccttgtcaccgcggctgcgacatcatgggatcctcgcgtccccgctgccgagcccgtcgtcatccctgtccctgcgcagaaccctcctgccgagccctggtccgcgtcattgcgtgctccccgacctcgcgaccgtcgccttgcctgccccatcttgaggtcacctctgacccctactccctcccttaagatgtgtgtttggctcctatatgtcatttttgggtcagagctgttatccttcgtagctgcacgacttttctggtcgtctctagaagagagaggcatcctctgatctcttcacttttctcccatcatctgtgggctatccctgaatcagggccccagctcttgggggaaagacagacagaaagacagggttccctgccagcaaggagtttgcagacccgtgggataacactgagcgtcaagcagatcccacaatgtagaaagaaaagggtccctcgagggtgatttgcccaggagggtccaggaaatttccataaaggttggatttgagcagagttttaagtaggagttgggagatgaacgagagttgagagcctattcctggcagtaagaacataaatgtttaagacatgaaggtttcagagtcttgacatatttggggaactaggagttgagcatttgtgagacaagaaatgttggttagggatggggaatggcaggaaggaagctaaagagaatgtggggcaaggaagtgatgtgatcagatcttagcgttaaagagattcagtctggcagatataggggtggggatgagggtgactgcagacagacaaaaaggcttttgtcgtcgttcagggactggaaaccccgaaatggtagtgga

SEQ ID NO: 48041 - DNA, 600 bp, Homo sapiens
tgttcatttctaccccctcttcaaatctcagctcaagtctcttcctcacaatgtctctgccctgcagcagcagtcctctgccctacgctttgtagttggacacgagtgtatttggttagtttcagtgtgctccactgattgtaaatgttccccgggggcagacagtgagtcatttccctgtgtcagcacctcctgtggtgcctggcatgtgattggttggatgcttgggtagaggtcaggaaggctggaaggcttttatcactgtccattgttgcctcctttcaatcccagaataagttttgtttataagtgtcctttatccagcaaagtccagcccaatgttcccaccagtctcttccatgaaaatttattaatgccctgccccaatttgtttgttactctctttgaccttcagaactctaacaggctgggcacggtgactcatgcctataatcccagctctttgggaggcctaggtgggaggaccacttgaggccaggtgttcaagaccagcctgggcaacatagcaagacactgtctccaaaaaaagggaaagaactcctgtcataaaaccttcgcactcttgtaatatttgcacag

SEQ ID NO: 48042 - DNA, 3188 bp, Homo sapiens
cccagccaatattttctgttttaagaaccatcggttcgttcaaattgcgtgtgtatattttaatgtacaaggcttgattggtaactataaccactgtttcaatttacagctcttccctgtcaagagtcttaaacagagcatctttctataaccctaaatctctggcgtgccaccacggaaaattatactactcaagataaagctggtaattaaaataaaaaccaaaacttgaacataacatacaagaacacacatactaaaaggtccatcttctgagtattttgttttcctgaacttaagctaaacgttaaaaaaaaaaagcacttatctatgaaactaagtttgctcagccaatcccaccttctatttgaaataaaacaaaatgattaaactgctacaattagaaataacagaaatcaggcggctacaattagacatctcggctaccaacccagctatgcatctaacaacacagaccaaacaaccctaacttttaagtttcagacgctaaccctctaccctcgccggctggcataagaaacgtgtacatgaggtccagttttaatggtcttccacagagcagaggctatgtttcaatttctactttactgtcttacagcagcaaggagcacggagtggcggtccacataaaaactcaaatgacatgactgtaatgggaaaccctaaaaaccaaggctgtatcgcaatcaccaagtaaacttgagcaaagcgagcctgaagagggaaacacagggcatgagaggacggcagggagaccggccttgtgcggaccccctcagctcagggttctgaggcctgcaggagcccggggcagcgccatcacggcggtgactcctaaataggcttcagcagatgggggaagggcgaaagtgaaagccgcagctctctggggtttttaccctccgttgaaaacgtagggcgaaaatcgcagctgcaaagggcccgcggctctgtgcggttccatccccaagtctctgccaggagccgaatacatggctgtagaggacaacatcgcacggctgcgcctgcggatccgacacttgctgtctcacggcgagatggctgccttgaccggacgttacgccacttccggcttctcctgaagttcgctcccggcctctctatctcacgctagtcgttgctcctggagggctgcacggcggcttgtccctttggtagttgaatcccgcccattccaaaaagcgctgacagggatgtaaagggttttttttgtttgttttttgtttttttccccctcgaagaaaacattggaattcaccccaatggacaaaaatttaagtctgaccatacaaaaaaattgtcagaactatggcgcaacggcaactcgaataacggtgggaacgttaattgtcctggctaataaaaaatgtatataacatttcctatccttaaagagctcacaacctcactgataataaaaagtacaaagaaaacaagcagtataacatatgattacgccacaatgaactacagaagggaaaatcaaggcgtgctgaagtcccactaagaaacaactgcggaaagagccatgtgacaacagtgcatgaactgggagtggcagaactgaatataaatgcatgtgtaaacacaagctgtttgttttgcttagtgttccttgtcattctacacgcttgaagatcagctagcgttcttgctgacaggtaaggaggacgcgcttactgagtgccaagcactgctcaggcactgattctgtcaatctctgtcaatctcccgacagcccaagggtaagcactgttatcattattcaattttacagaaaaaaaatgcgggggagaggtcaggtaacttgtcgaaggtaacgccgctagttgctttaaacaacaacaacaacaacaacaaaacacactcacacatatacacacacacgccatttaaaaatcgatctttcctacgtccagcaagggccaattagagatggctgtggcacggcggccccgccccggaactcctcaagagcttcgcccctccttacctatggaaacacaggaagtgacctatgctcacacttctcatggcctcggccctagtgggagcaactcgctgaagccgagggcagaactggcggaagtgacattatcaacgcgcgccaggggttcagtgaggtcgggcaggttcgctgtggcgggcgcctgggccgccggctgtttaacttcgcttccgctggcccatagtgatctttgcagtgacccaggtaacagattgtactcttttctgacggttcgggcgaaggccaccactgcactgaggcctgggggcaatggtggggaagagactaggaattggcgcgcgtgcaggcccctcgggggacgttcctccctttcgtgctgccgccgttccggcctgtaacggccactcggccgccactcccgcctggtgccctactctgctgtgtttcgcaggcagcttcccatcgtacgattgtggggctcagggtactactggctggctgggcggcggcaggcgggacaggacagtcccttgcatcgaagaccctaagtttaccctgccctgtcctgccatccgcttcttctccatgttagaagcagattcacccagatctgtgcccgcctgttttgctgccaacattgagacttaaatattttgtcagaagcctgagacagcgggcacggtagcgcttaagatataatacacaccactttatttgcagggtctcccgtctctcggttcaggccatcatggttttccaaatctctaggtagacttttctgtgaaaagactgtgcttcatttagttatacagacactagaaggctatgcagaattaatttgattgcctccaaaaaatatcggatttgatgtttcaatttccaggagatgaagatacccagcaaacaactcttttctgaggataaattagtgcagtaatcactgtgcggtttcttctgtagacttacttgcaaaaagtggcctgaagccaccgaaggtcctggataaatctctaatcatacttataatggctttaaatcctgccgtcattatctcttgcctcaaccttagattcctgaaacgaaacttccgtcctccagttttactcctctcaaattcatctagtcttgccaaattagatctgttcatactgcacttccgaaattccataactgttat

SEQ ID NO: 48043 - DNA, 1795 bp, Homo sapiens
gtaaaaatcgtttttcctgggtagttgattcctaaaaactaaaaaagaatacagagaaaagttttatcttcaaacaaaacagcaattcacatattttatcctctgcacgtaaaactgaaaataacaacaacaaaaaagaaatgaaagtttttgctttcaggaataagcttttaaaatccagaaactagatttcgtccggtacacgcaactgagttgcctcctagaggtggtttgagttaatcaaattaataagactgatcgttaagaacgactgccaaaaatacgaaaaagctactgggatccatctttccaagacaatttctattatctgaattaacaccatacctggtacccactgattaaaagctgggggttaccaatgcgcgtgggcacagttagaagcttatgtagcaaaaatgagcacatcctggaagggcccgggagaaggtgctcctggggcagcgcggagagggagctctgaggctggggcggcagcggtgcttgccgccgtccccctggtcgctcccggaattaacgccgcgcacgcgtcggaggcatggccccgtcccgaccccgtttggcggctcacctcgcaggccggcacagcacggctgctcgcggcagcagaagaggaagatgcagcggtggaaggcgtccgggcggccaggcagcggcgcatacacctgcagcaggaaggagagcgggcggccgcacagctcgcaggccagggcctggggccccggcagcccggccgcgcccagccatgccggccgcccgcccaccttgctggggaactgctcgctgcgcagtcgccacgccggcgccgactcggcgaagcccagctccacaggcctggccccggcggcagccatgcggggcgcgggctggcgtggggcgcagcccacagctgggtcggaaggcggaaatcgggcgccgggccggaaggcaagaggcgggcacctttccggaggacaggaggcggaaacgcgtctgacgggagcggttgcaggaccaatgcgagggaacggggcagaggaaacctctcggcatcagccccgcccctggcgcctctgcctccgagccgctttcctggtgcctccgggtgctctgggatggttctggtctttgggagagtggcagctggtgacggcgctccgctcacctctgcacatgtcttgctgtgggcctgcgggtggccgccagggaggcagagccctcccgcaaaccttccctgctggtgtccacctcagggtgtgggaaacctgtgcgctggccgagtgctaaccaagagtaggcagtgaaagacaaatgaaggttgaacaggtaaagtgaggaccctacagcggaaaccaagaatcctgtgtgcctgagagtaatgaagaagcctctgcagaagagtcttttctgtcagtcttaaggtctctgttttaatgttagtgctggcttgctgtacctgaattccaagggaggagtgtataatgaggcatggccaacccccacttcccatcattgcctgaactagtttttcaggttaacttcagaatgcccttgggcaagcagagggtccatcagtcggttggagggtttagaattttactgttggtttgcaaaggtctgaaagaaacatgtaccacctgttctctttaaggagttctacttaggaggtttcatttacataacaagaccgtggttgtcagccaggtctccacccgcataacctgttatgccacaatccaaacccccattctgtaacctcaagatggtatataagtttctgaaccccatttggggcttc

SEQ ID NO: 48044 - DNA, 1615 bp, Homo sapiens
ctgtcgggggtgagccttccccgttggaagtgggtttctgaggttgtgttcctgtcgggggcgagccttccccattggaagtgtgtttctgagattgtgttcctgtcggggatgagccttccccattggacgtgggtttctgaggttgtcttcctgttgggggtgagccttccccattggaagtgggtttctgaggttgtgttcctgtcgggggcgagccttccctgttggaagtgggtttctgaagtttgctgttggaagcagagcttgcgtccatgctcacagcagcaccagccgcaatcagtcactgaggtctgtgctgggtgtggaagatgagagtggtaccacatgttcctcaatctggactagaggtttgtctgtgattagcggagactggcctgccaagagccaagggcgctgtgtttgcatgtacagcaggcgtctgatacggttctggggcagacgccagccaggccgagcaggcagcctccactgctccgtgcatggggtcagagtccacagcatgggacctggtccctgggcaggcctgacagacatctgtgaaccaggaatgggcatattccaggaggtctggcacaaagcaaagtcattgtagactttggcaattgcatttgttccagataatacattttcttaggacctaaggcctcagaacttaaaatgaatgttgtaaagtttgaagccaaaacaaaatgcagacaggctgtacccagcaattcctgactctgcaatctgggcctaattcaagtactcatctccatggcctgccaaaaccctcccaccggagctcaccctgtggtccagtgctcagcaccattcatacctatgttcggggacagaagccactctggggactaggaagaaaacacgtaaaggaattgagcttaaaataaaaagaaattcggtatatttcatacccactagcaatatgcctttagaaagagacaggctggcaactgcacgttgggaaggacgcacagtgactagaactctcgttccctactgctgggagtgcaaaacggaacagccactctcccgactgcccagcgaccacactcccgggtgtttacccaagagaaataaaaatcgtgtctgtaaaagaatgtctatcagccttattgataacgtctccaaaccctgattacatcaagtgtccgaccgcaggaggacggacgagaacgggtggcccttcacagaacaggctaattctcagcatgtgggagcactcgtgcgtggaaggccaggcgtgtgacacgtgtgagcatagcgtgggcaggacgcacgtgagggcagtggcggcttcaagcacaaatcctagggactgggtgggtccttggagcagcaggcctgggtgagccttagtggactcctctgtggcctgtaggggggtctctgccctcatcacacccaaggagaccaggagacccgcacagatgcaggttctcctcagttgtctagtggaggacttcagattggaaagaaactctcagcctggcagcctcacagtactgaggaggccacaggcccaggaagggcctcactattgggccccacgctgccggctcctggtgacctgcgtcccagtacctggtct

SEQ ID NO: 48045 - DNA, 3600 bp, Homo sapiens
cacacacatgcgcacacacacgcacacgcctgcactcacacacccccgtcggccccaagcaggaaggcgcccccggcacaccagcccctctcagcgcccccagcgggcccggcgcctggagggttaaggcgggcgcgtcccgcgggtgggcggggggggggggacgggaccggtgccgggagctccgctgccctggcgtcccctgggtccaggcccagtcgctccttgggcctctctcgcggggccgcctccgcctcctccttgccgagacgggcgtggggcacggggtcgccgcccggcggggagctcatccggcggcgcagacgccccgcggctccggggagggacttggcctgggccccggccccgcgctcctctggggaggagccgagaggctgcagctggcggcggcggccccgggcgggagggggtcccaggaagcggccaggccggagccccccactcggccgcagctgctggcctggccagaaccgagcgcgccctcccggtctccgccgcttccctctgcaaaccgcgggcaggaggagccctctccttagcgggcccggagctcagaggcgtcgcggggcgcggccgaggggaggaggaaggagagcgggagcgcagccggcccgggcccagccgtgactcgtggggcggcggctccgccaatctgtgggcgctgacgcggggggcggctccgcggcgctcgatatctgcccgcccgggacgcggggcgccgagaggctcggccaggcgggagctgcgctcggggcggccgctgcacctgcccgggaccccgccggccgctccccgcgcccaccccttccgcccttcgccccccccttccccccagccccggtctcccgggcgcggcgtgagagcagagcccggcccggaggagccgccccttccccgcccgcccgcccggcgcctggagaggagcgcgctgaggatcgggacgcctgcggccgccgccaccgcccaggcccgtcgcgccccggccgggatggacccacacgcccgatgagccccgcgccggcggctgcgagcgccgagcctccccctgctgcggccccagccgccccccgcgcgcccggctccgcggaccaggacccctgggctccccggctgagggcgcggccgctccggagaggccgagcggggacgggcccgagatggcgcggggacccagcgctccggcggcgggcgccctgcacgcggcccgggcccggggacagccccggagctggtagccgcccggcaccgatggaccttgacccgcgaggcggcgccgcgctcgtgcccagctgcagctagaggggcgcgcgggcagaacgcgctccaggcccgggccggcccgcgcggccatgaagatgatgctggtgcgccggttccgcgtgctcatcctgatggtgttcctggtggcctgcgcgctgcacatcgccctggacctgctgcccaggctggagcgacgcggcgcgcggccctcgggggagcccggctgttcgtgcgcgcagcccgccgccgaggtggccgcgcccggctgggcccaggttcggggccgccccggggagcccccggccgcctcctccgccgccggcgacgcgggctggcccaacaagcacacgctccgcatcctgcaggacttcagctccgacccctcctccaacctctcgtcccactcgctggagaaactgccgcccgcggccgagccggccgagcgcgccttgcgggggcgggatcccggcgccctaagaccccacgaccccgcgcaccggccgctgctgcgagaccccggcccgcgtcggtccgagtcgccccccggccccggcggagacgcctccctcctggccaggctgttcgagcacccgctttaccgggtggcggttccgccgctcacggaggaggacgtcctgttcaatgtgaacagcgacaccaggctcagccccaaagcggcggagaacccggactggtgagtgggggctggcaggtgcccacccccaagggagccgtgagcccaaggcatggtgtagagaggttcaggggccccagagggccgccccccatggaagaggccgggcagggagtgtggtgcgggaggaggcagccgcctacctcagggcgctgcctttgtctccagaataacctcctccttgggaggggctgccggctggtccgggagctgtgccctgtggctgctggtgaggaagccagaccccgcgccctttagaagcgagtcctgaccagccgtggtcaccagcttgggaaatggggtcaggcaatgaatgaatgagttggtgagggaaggagccaggctgccgctgggctttcagacacttggcgagggtgctctgggtgggcaccttggagaaggtctggatgtgcctattgagtcttttaaacccagtggctggagcagaattatcagaggggcttgctggcagccgtgaggtgcaacaaggcggcccagccagcaagggcggtgggtgtgctggctgcaaagagatgatggctcgataaagggcgagaagccacggcaggaacctctctttaaactgtcctggctaagccctttccccaccccccggcccctccctccgccacacagatcaaaacaagcagatgctacaccgaagcagtggaacattaaccacgacaaggccagaataagtaactacctgccgaaggttaccccagcagcagagggggagaccagccttccaaaagatctggttgaaagtcccttcttccctgaaatgtccaggcccagtgtcttctgtctaaacacactggctgtttggaagcctctgagccttgcctgctggtcaggttcaaggaaatgcttggaaatttgagaaccagagcattggcctgggctgtggctctcggcagggagagacggccgcccagagcagcgagtggccaggaagtgtatcctagccccccaccccgcccccgtgtccaccgcaggacagagcttcggcagaaagcacctcagctttaggtgaattcgagctaggacaagttccgcgtttccctccagcccagcaggcagacggagggtctgtccctcctccagaacggtcccttgaccccagagatgtgaggacaggctgcgtgggcggcgggtcctccatgggagcctgggctggagagagtgctgcctccttcctctctccccacccaaggctgctctcattaaaatcaaatttagcctcttgcatcattgtgcccctggttgttggaacaaaagcagagagctggggaaggttcctgacagactgggcgtgtctgtgagtttcatgcagcctgtggtcaatggtaggttctcccctctactccaggggagggccacagcccctcgcaccctcagctgaggtcatggttgggccatttcggtgaccctgggacagacgtggcggggatggcagggcagcgctgacgtcctggaattagttttgctgtagttagagctgtctgtggtgtctccagagggtgagtaagaattacaggcctttcaccgtgttattagttggcagccgagcggccacagaagaaagcgcagacgttgcagggccctctttaagcagaggcgcc

SEQ ID NO: 48046 - DNA, 1028 bp, Homo sapiens
ctgaggcaggagaatcgcttgaacccgggaggcggaggttgcagtgagccgagatcacgccaccgcactccagcctgggcaataagagtgaaactcggtctcaaaaaaaaaaaaatctttacatgttctaaatacaagacctttaccacatatgtggtatcatgtgaaggacaagcttaattttaggacgtccaatttagttacttttgttattctcgtgcttttggtgtaattacgtttgaatgctgaaagcacgtgtgttaggcgaagagtggtgcgggaggcggtacctgcacttggcacggtcagcggaacggtgcggctttaggaaacaccacgtagccacagagcgacgggcctggcgtagccactgttgctgtttgacctgactgagtgccctcacctcctggaactcagcgtacccatctgtcaacaagggcgttggaagaagaggtctcaggcgcttgcagggctgaacccttttgacctggcctaggagacccggcactggctttccagcttggagaagtgggggactgagcatgggtttgagtccggtggacgcacccagcaggctgttggctacaaattccatcttgcgtcttggaaagaagcttccaggcatgcggcggctgcccatgacactggctgtgaccacctccaggtagaaatattcatttagtcattccacaaactcggagtgccgggcctggcctcccgccaggcactgggaacacagatgtgactcagactcgaagcctgaaggtggtctgacctctggacgtggggaggcccagccacaggtgctgcctaaacactcctcgtcactacactctcctatgctccacgggagacaggcagctacgtgtgtccagtctcccaaagtggcccaggaggacagggcgtggttaacagtgggagttatgtacagagtgaaagagaaatgtacaaaagaggcggagtgagcgagtgagcaccgtaccacagagtttagaggctccagctgggggggggagcagggcccctgg

SEQ ID NO: 48047 - DNA, 540 bp, Homo sapiens
ggacgtgccctccttccacaagagggtggggatgaacgttctttaataacagttttatccacctcacctgcctcccttcaaccccaaaccccaaaggcagctgccctgagcaccagcgtgtgccctctgcacactcgtttctctgcagacgcagacctcgcattctagtttttgtcacacagattggatcccgctctgtgtaccattctgccttttcctcaccagtaatccctcccaggtattcgagtcaatatttgccgagctctatttccccagctctgtgcttgtgatcttgccaaaaagggtcaggcgtagcctctgatctctggaaacgtgcacccagcatgcgtctctctgcttgtctgagctggcttccctgagagaatctgagaacattttgggataacagcaccctcctgtttattgcctgataccacatgagctctcagtcagcctgggaggtcaatcccacaggttagccctatttttggcgagggcacatggatgctagagaagtggccaagatcacagagcagctga

SEQ ID NO: 48048 - DNA, 834 bp, Homo sapiens
ttcctgtcattagttaacgagagcccctaggttctctctacacagcagctcgaatgtaattaccagctgggagtgctgggcacacaggccttgtgtcctgtgttttgcaaaattccctgaaatgcacttcatgattctggaagcttcagtcggcttgcaattacaagtagcccttattaaaaatccatgcagcctcccacatcaaacaaaattaatcagtaacaagctgtaaggctattaggtcatttcccaacacagagcaactcaggagtggccctatctgattggcccatgcacggaggcaggaattctcccatgtttctctgaatgccgtgagcctgacatgagatgtttgtctttgcttgaattacgtttgggtgttattctgctgaatctattcccattggcctggcaggctcactttgcagcgcacacaccaccaagatggtcatctcattttggccaagagcatgaggaaacatgtggtccctgttaggggaggacctcaggtgtggccctcctcacctcagccagggggccgagcaggagctgtgagacagggtcctgcccagtctccccgcacccaccttgccctttgcatgcagctctggcgcacaggcagccaggatgagtcctttcagcaggcgctttgaatctcatagccactgtccttcccgtccacctggcccatcccggcccgccaggcacctgcactgtcgggtctctgccggcctctatgcctggctcttcactctgcccactggctgccccatggtggccacagcgacatctcccagcccagccaggggctcttcttatgagagactgatagga

SEQ ID NO: 48049 - DNA, 1077 bp, Homo sapiens
tgacctggaatgatcatttcctggtgtggtgtggccgtcccgtggatgctgacagccccaggggcaggggtgagcgggctgggggctctgccggcaggtgccagggcaggggtgggcgggctgggccctcccaccgggcgccggggtctccctggtccacacaccctcgcctagcctcagaccgccagggctggaactgtgcaggctgcggactccaacaagaacacccagtggagggcctggggagaggcttggaggcgctgaacccagtcccgtgcccccaccccaggagagggctccttcgtctccacgtggcctcgggccctgcaggtcccccgagggcgcagccgccagcagggggcgcctttctctaacctcccggggaagcgcaggtgccgcccgcacctcagacagcgctgccgcccgcgcccgccctgcgccgttccgtttgctccggtgtcccccagcttgggagcggggccccccagccctggtttgaggcatgacgttggtaggaagagccccttccgtggagcgcggggcccgccggggaggcggccctggagccccctcctcccacccgcccaggattgacagtccctgcctcgggcgccctctgacccccgcgctcaccgagagaggacgaggccccagacaggttgggccgcgatgcaggtggccctgggctcaggtcccagcaccggggttcctgctgaacgagctccgcccttgcccagggaggggccggcggggggggaccctgcggagggcattgtcctgagggcaccacggcccggccgccccgcccagcgccgcctgccctctgaaaggcctttcatcccggagccggcagcgccactggccgcatcaaagagcgtctatggaaagtcatatttttccccaaaccagaaaagttcaggctgggagcacagacattcagctcattatttagaaataacaagtcctctgggccctggtatcagatcaaagctcggaaattaaattctccagaaaagggggcggcccgggatcagcagatttgtgtttgcttattttttttcattcagcagctaaaaa

SEQ ID NO: 48050 - DNA, 1239 bp, Homo sapiens
acggacaaattctcccccggcatccacgcttgtcccccggcatccacgcctgaccctagtggtcttcatctggtccagagctgcccgaggagacaggacagaatgcagcagtaaggacgacatttccttctgctcacgggtccacaccaggcatgtttctgacagcaagggtccccagcagccctcaacactccagagatactgggatccggtgtgtaggttcccactacccctgctcacttcaatgactccaaactttttctgaccatcaagcatgtttttctagaaaccctgtcttgccggggcaggtgttatcagccacgtcctggtctgtcctgcaaaaggaggaaatggccacgcgccacctcctagttcacctgcacctgtgtgggcaggtcccgtgcaccctgactgctgccacacctgctggggcgtgaggactttctcgggcccctcgatgtggctgtgtgtccagctcccaggcactcagcgccctgtcccttgtcccctgtctcccgcccccttgtttaccagtggggaagacaggcctggccggtgggggtgtgagtctgtccctggccccagctgtggagcagctgagctcattggaaaccaggctgcgggcctgaatgcagcccttgtctcctggcccctgttaatagcctctataactgcccagcatttctattgactcaagataagttccgggggccggagaacagctcactgtttggcacatgtctgctggccaggcctggccagaccgggatggcagggtttggtgagtcctgcaggccaggccccagcggttggtgctggcagctcagcaaacagcctgcccgggccacatgttgccctccttatccctcgggccccggccagtaaccttgcggcgattacactatcagcctcccttggcagtgccagcgtgtgacacacgtcacatgttctcgaaactctgtccagaaacaggtgttcgaggtgacatcatatctgaccagagatcactaagtcttccgacttctatcaatatttgcatttccagctccacggagaatctaatcagacttctgatgacacctgccgtgtttctgacccactgtgctcctggctgtgggtatcgagcccccgtctccactcattttggatttttaccctcctgagggcctagtgagctgacaggaagggcctctggggtggccagatgaggggagcagagccagggggtcaggaaggagg

SEQ ID NO: 48051 - DNA, 721 bp, Homo sapiens
gacctttcccacgaattagccatgtgatattttttgaagacatgaattgtcatactgccagattcttcatccataaagtggatcgtgcccttagctggctcacgagttgtgtttgttgagatgggtaactctagctgctctaatagagcctcatactccccagcttgacacagtagagtttatttctcggtcaggggaaggccaacctggattgttcccagatggtgggcagcagtccacatggtcatgcagggatccaggctccacttgactcagctctgctgtgctgcctttggcccctccaaattctccactcagacagagaaagagggcgaggatcatggtggggcaggagtagggccaggcttggaaatcccccgaatcccactggctggagcccagggacatggctgcaccggaggccaaaggtcaggcagccaggaagcgcactcaggcaggcaggatgtgtgttaggagggggtgggggtggatcaaggttggcctcacaagcgtgggattttgctgattgggctgtgagggtcttggcctcccaacacacccaagcccccggccatgcacgtggagcatgcgtggggggcaggaggagctgggttccccctcagacgtggagcctccctctctctctctggaatgggcactcatgtgcttctgtccagggatttgaatcttgagggacagatgaaggcgctgggacacttta

SEQ ID NO: 48052 - DNA, 1891 bp, Homo sapiens
gtgaatgaggagacctcagcccaaggccagatgcccccagcccagtggccctgcctcccaggcagtcaggagggtgaaggagggaggaggggaatgtttcccaaccttcttggggggaaggggggactccagactctggagactgggcatcagcagggcccccagggagaaggtcagctctgcaccctgggaccaggcaggctccgaaggtaagccggtccctaaggcgctggggaccaggcttgtccgaggctgagttaatggttaacccacagtgcaaagggtgcctgcaggcgtgtgaagtggtctgggctgcctggggcgtgagcagacagccaagtatgagctcaacagttgcagggcgtggggcgcctggggtcaggagccagctcagaaacaggacctggcctgggaggtttcgctacgtcacaaagcgtgagagaaagcggccaggacactgccgcttcctacatggggctccgttccactcgggaggcctcagatcagcctccacactcccgcggcaatctgcccctttccccaggacagaatcctccagagagaggcctccgcaggccgtgcacacacttccacctcccatctgtaaaacggagaccaatcacacccacccaggagttgaggaataaatgaggctgcacatgcagaaggccccagaaacgaggacaaagccagccttcaagagtgggctgccactggcgtggattctaatccagagccccaaaaccaacccaccccctggtccccaagctcagcacagtaccaccacccacccaccacaggcagagagtgggtctagagccaccctcctgttgagggcctggggtcggagaggcccggcccgaggatgaactgcagcaaagccccaagaggagcagcagggccacctgggacctcagccacccccagccctgcaagcatgtcctcagccctccctgagtcaagaactgcccaggtagtaagtaactagggatcccagtgcgcaaaaccaggcccagccccctcctgcctcagcagggaccgagttccttcctcccctcccctggaggccctggacacaggtcccagcaggaggaacagcaccagcctcacaccctgccatctcccaggctcgaagcacccatactctgctgctcccacccacccccagcctctgcaggggtggccaagtgaggcatggggcaggtgggctctgaaatctgggttcgtggggatgggctcgggcagggcgccctgttctgctcccggccctgaccctccggatggcacagcctctttggtcaacaagcagcctcacctagttccctcggcagggcagataccagggcctggctcggcagagaccgcaggcccgtctggccagacaccagacgcccaggcgaggggcaggctcgctctcaaccactcgagatggccggccaccgcgggcgcgtgggctcccaggacacaacagaaatgccacccctctgggcaccgtgcgaaaggcacatggcacggccgctcgtctgggaacccactgcctcctcagacaagcccgtttttatcaaacaaaaacaaacagcgatgattgcacctgtttctgagtatgccaggattccgggccgttccgccacctctgtctggccaggaaatagctacatttttctcccaagaacacaaaatgaatattggattctcacaaaaacctcctccataaaagaaggccaagtccaaagaacagactacaatgtcctcaggacccccacggggggtaccccggcccccaggccccaagccgaagcccaagtgatggggggggtccccatgtccctcccctttttccgtcccagagatgtgggctgcaccttatcacaccagacattccgattcccca

SEQ ID NO: 48053 - DNA, 1876 bp, Homo sapiens
agagtcctttgcagggagagaagaatcttcatgtcacgtaacttcttccaattctgctgcctttagttactctttttaacaagttcatcgcagagcccctttttaaaccaggttaaggctccgactggagttcccaggccgagtgctcattttgaaaagagcgccacgcacgcctggaagagagacctcgccttctaggaaggggctctctagccctgagcgggcgggcggccaccctacaccctcgcccctcccacccacccgtggtccaccggggtcccccggggtgagaggcccctttaacccttgccaacccgcagcaaaactctgtgcttgcaaacaagctgtgttctctagtggcccggccccagggcccgagggtgagccgcaaaaatagcccccaggcagcagatgcgtccaaggcttttcattgggtcgtgaaaacagaaagacaccggcttctgcagccacagaggcccagccctgcggcaagaacgcggcaccagctcgcagggattacagagggggccgggccctgacccgggggccgcctccgcccgcccgcccgtcggaccgggagccgcgcctgcccttggggcctcgctccgcgggctgcccgcccggcgcacgggccagggctctgcgcccagggtctgggccggatcctgccgctcccccggcccgagggcaggcgcggggcccgcacacctggcggaggccgcggctgaactttgtgtgacacacgcggcgttttccttaaaggcgaaaacaatcccggggcgagcgagcagccctcggccgccgctgggagagaaagtggagactggaagagaaactcctgactcatccgcccgggcgcttatggctggggattggattctgacctttcggtgcgctcctgcgcggcgccccgcccggccccagctcggggcgcacaggccgcccgcccgcgccctccccgcgcgcggagggaaggggcgcgatttacctacggagtctatctccaggagtcgctggaggtcccggatgctgtggatctgactgcgggccagcctctcgatcacctcgcgggggatctcggcttcctgcaagcagaggccacacggtcagcgcccgcggccccgaccccgccggcacgcgcccccggccgccaggagcgccgccgccccgggcccgaggagaccccgcgagcgccggccgcagtccccgccccagcccccgcggagccctcgccccggccctggaaccagaagccgggggtggggctggaagagaccccaaattctccacccgcatccatgttccgccctttgcaaaatcaaagcccccccccctttatattttcagacaaaagcccccgcactccggcccctccacccggggtgtcagttacagaaggtctagggggcagcgagggggccgaaagtttctgatttaatagtgagatcaacatctagaaagatcaagttaaaatgcgtcacgggtcggcgagagtcacggcagccctaacactttaatccaggcagggcttaaatttcacgccccggaatcccgggccgaacccgtggagaggtctctccgtctcacaaacacacgcacgcgcgcgcagacacacacacgcgcacacacatctcactcacacactcgccccaccccgggctccggcccagccgcggccctagcgccgactaagacgcccaaatccagccggcggccgggagaagaagcctccagggaaagcgagggttaaacttccacctcgcgcagctctccgtgccctgcggagaccaccctcacctctggcctcccccactcccctccccgatttttaaggagagtcgggggtcgctggggagcctgaagcactaagttccca

SEQ ID NO: 48054 - DNA, 1311 bp, Homo sapiens
cgccgcggtgggagggtgcggacgcctggcccagccccagctcgcctcgctcagccacctgtaagcaggcccgggcgggcgggactgcgccggccctgagccccgccgggcttggggactgggaaccgagggctgcagcttggcgctgcccaccctgcccggccaggggcttccgcagcagccgcccctacctatttatccgccgcccttctctcctccccaggctccgccggctcacacacacccccttccccgctccccgcaccccgctgctgcagcgcccgctgcgccccagctccccttccccggagaggacactgcgccccccgaagtttctgcccactcgtccacctcgctgctccccggtccccccgaggcagagcgaccgacgcaacacgctggaaactccccacacacacttaggcatggcagaaaatagaacccagttgggaaaatctaaacatcgaccaccctggcaggaaccaaaacgctctctgcagagcccgtggcgccccagccggcggggggtgtgcgccggaggagccggcgcagggacggggcgcgggggcggcaccaacctcggccagaacatgggcgaggtatccgcagccgaggagcagcaggcaagccaaggtcctcatcgcgtcccgaggcgctggctgctcggaggagaggcgaggccgcggggcgggcgctccagccggtctcctgtggcggcgaaattcagtaccatcccttagggagcgcggcccggaggagggtggcgcggggagcacggagctggcggagcgcgcccggcgcgagcagtgagtgcggagaggcaggcagcgccagccaggaggaggagaaacagggagtgcgcgcccgcagcgcggggagcctcctgggccgccgggtagggggtggggacggaaggggcggagggcgggggctgggcttcttcctcggtgcgttcccggtgctggccgccgccgcgctcgctccccgcgctggcttcaggagcgacccggccggtaattctgcatatttgcggacatcagccccaagaagaactccggagggagtctggggccgccgccgccgccgccgccacaccgatcacctgcctggacgcctggcccggccccggctgcgagctgcgagccgccctgcgcgcccaccgccggccccgcgctcgcctccggcctcctcttgcagccgccgcccggccgggcacagcgcggcccagcaccccctccgcggcgcgccctcggctccggcgccgcgctccgccctccgctcgccggggccgggcagcgcccgcggccgagc

SEQ ID NO: 48055 - DNA, 2249 bp, Homo sapiens
gcaagagaatcaactttgactctccatggtttcatctccaacccgaccaataagcactgccctctccctggccccctacctgcctaattatccttagatgacccatctcaggattttcagaacctggtttgagcaataaagctccagtgtcctttagccagtttctgcatgcagccagtttctgcatgcagccagtttctgcatgcattaaactctctattgcaattcccctgtcttgataaattggctctacctgggcagcgagtaaggcgaacctattgggcggctacgcctgagatctaatgacaggctgcacgtgaagcccagaccaggcacctgtcttacaccacagggggatccagtccacagaaccagcgtccttccctcctggaacggaccttcccaaagccagaggggctctaggcggctcaaacaggggcttcccggctaccctggtcccaggcgggaccactcaggttccttctccaagccccctaggctgcagggcaggcttccctaggggcaggcccaggcctatagcccgggacccgcatcccgggcgagctgcaccctcccgagaccttccccatctgtacaatggggacaggacaaggcccagcaggcaggctggcgggggttccggcgacagagggggacagcgggcgagcacgacaagagcacaggcccacgtgcgcaccggcggggaggaagtagcccggcgccccgcccgcagcgcggaccggaagtgctgccgtaatctgcgctgagagtcgcgaaagcgctgttccccttagtgaccggcgacgcgggcaagatggcggcgctgggggtggcggaggccgtggcggccccacacccggctgagggggccgagacggctgaggcggtggagctgagccgcgccctgagccgcctgctgccggggctggaggccgacagcaagccgggccggcggcgcgccttggaggccctgcggcgcgcgctggaggagccaggccctgccgccgaccccaccgctttccagggcccctgggcgcgcctactgctgccgcgcttgctgcgctgcctgagcgaccccgccgagggctgccgcgcgctggcagtgcacctgctggatctgggcctgcgccgcgccgcgcggccccgcgatgccctgccgcgcctgctgcccgcgctcgccgcgcgcttggccggccccgtgcccgcgcgccgcccgcccgaggcctgtgaggagctgcgcctggcgcttgtgcagctgctgggcctggccgtggacctgtgcggcgccgcgctcgcgccccacctggacgacgctctgcgcgcgctgcgctgctccctgctcgaccccttcgccgccgtgcgccgcgagagctgcagctgcgccgccgccctggcgcaggccacgcccggtgagcaccccgggccccgctcccacacgccaccccacactctcacccccacctccacctccgcggcccctctcacaacccccgcggctcggccccgcccccctccacgcccgcaccccccaacatcccggaccccccatgcgccgcttcccccacccgcctgccccaaagcaccccgcccggccccctcctcccaccaccactgcttcccctgcctcacgtcccgccaccaacgcgcccttcagctgctcccttgtcctctacccccatgtacctgtttcctgcgctgccacgtgctccttgccccgtgacccctgttcctgcttggccctcactcacctcactcccctgtccccttgctccccgcctccaccctccacgccccaagccccgccccccacctgcctgctccctgtgccccctccacctgcctatcctgtgccatcctcctccttgcacgccgccctcccgcgaccctcacctcccaccctcctccctgcctgagccccctccaccccacccgggcccacgagccagcgcttctgtccagatacctggaaaccaccgcagaaattcctgttaggcggtttggggtggggtgtgccctgatagctgccccctttccttccctcgggggcttgcaggacttgcacctggttgagggcacgcgctttgagactctgctctggtcatttcactttctgtcccattcatcctactcccctgcctttccgctctggcttggaccactgtcctaagtggaaggaggccgcttctcccctccactttataacgttccccatcttttttagagctctgatctgatccggtcgttccctt

SEQ ID NO: 48056 - DNA, 841 bp, Homo sapiens
caggtgagcctcagagcaaggtcaggacacaggcggtctagccgccctggagccttaggccccgggatggtgtctgaagttgtggaaagggggtgtcccagtgcggcaggggctaatgcatctccccacgctcacatgactgcagctccgagcccaggacactgaccacacccagaaccccggcgaggcaggcaggacggacgtatggccgtgcagttgtgaagcaggccttgaacaaactgccctgtgccgccctcaggtgggtgactcatggacttcgccctgcaggggtgccctggttgtcgccaggcctgcagtcggcagctgctcagctttgctgcagttttcctgctcgatgtgtgctgctggtgaggccaccaggcctgttcttgtcaagagagaccttccgggagcaacagatgttacaggagagactggggatgcatggacagcttttcagagatgagtgtttgtcacgttcctgccaagtacctgtttgccatttgtatgccttcttttgagaaatgtctattcagatctgtccatttttaaatcgcgttattagatttttttctattgagtttgagctccttatggattctggttgtcagtcccttgtcagatgggtatttgtgcagctgtttgctcccatcctgtgggttgtctcctcactattgattgttttatttgctgtgcagaagctttttaacttgatgtgatcccatttgcccaggccatgtcccagagagtttccccaatgttttcttttagtggtttcatagtttgaggtcttagattgaggtctttaatctattttgatttgatttttgtacatggtgag

SEQ ID NO: 48057 - DNA, 1817 bp, Homo sapiens
gccaaggggggaggatcgcttcagcctaggagtttcagaccagactgggcaacatggcaagaccctatctctacaaaaagttaataaaattagctgggcatggtggtgggtacctgtagtcccagctactcgagaggctgaggcaagagaatcacttgagtccaggagtttgaggttaccatgagccgtgactgtgccactgcattccagcctgggtgacagagcaaggctctctctcaaaactaagcaagcaaataaatacatacataagtaaatgaaacgctcttcagggcccagcatgcatgtctgcagtctacagtgagttcaaaccctctgtcaatgctgggagcatctgtgtatggattttggattctgtgtattgggaaatctggctgagttcaaactctgtcaatactgggagtgtctgtgcatggattttggattctgtgtattgggaaatctgcctgaaatctgttacagctctccggcaagttcctttcaccactccccacagtctcacacactgaaaccacagcaggggccgccctcactcaccgcaggggacaaccacccaccaaaaaccatttcctctgcggatgcttcccgcccaaagaaggaaccagaagcaggcaggatggggaagcagctggtggagaagccaaattgtttccttaagagaaagggatttacgggaggtggaggttgcagtgagccaagatcgcaccactgcactccagcctgggcgacaagagcaaaactctgtctcaaaaaaaaaaaaaaaaaagagagagagatacggatttcctgagcctccaggaggtcggctgggtaattttccttcgtccgactctctccctggccattgcgtagccacctcatccagatggcacgaagcctccgggctcgggtttctgactcgtctcccaggagccggtttctgtttaccgctgaaaggcacgcctgctgccaaatttgaggtgtgagctcaccgagaaaaaagcactgtgctcccccgggagctttgcaaaacgggccgctgctgccctccgttctgcagcagagatggtggccttgaagacagcgagcctgcctacggggtcgctgcgtccggtctcactccagccaggctgccggcctggcccctgcctccgtttcccttgctttgaaatgtcagtggctgcactacctgctccgtcctgctctgcagtgctgggaagatgggaaaagccttaggaactgaagcccagcctgttgtccaatgtcctcttctgaaatgaggacagttggccaggccaaagaaaacagacccaagctgtgtttcgggagacacagaagccccccagactctcctacctgcttgttcttgttcctcccttaacccactccacggaccggggccttacggggaggccgtactggccccagggtgggcagggtggaggccagcctttttgggggcacgatcctagtatttgaatgtccatcttctctagtgacagacccaggcggtgggttctggcacggccatctgccaaaatctttcccccaaacagatgtgtctgtttaaaaaggagatctaatgcaggcttttagcagcaatgtaaggtccatcagagttaatgcttggtttaaaaaaaaaaaaagtagtcagatgtggtagagggtgcggggggacgctgaggcagaggatcgtttcagaccaagagctcaagaccagcctgggaagccgggcgcggtggctcacgcctgtaatcccagcactttgggaggccgaggcgggcggatcacgaggtcaggagatcgagaccatcctggct

SEQ ID NO: 48058 - DNA, 1836 bp, Homo sapiens
cccctccccaacgtagaccgcgtatctgaggggcagagccctccgcgatgcagacccctcccccaggtgcagacccctcccccaggtgcagacccctcccccaggtgcagatccctcccccagatgcgggcccctcccccagatgcaaaccccccccagcaggtgcagacccctcccctaaatgcggagccctccctcagatgcaggcctttcccccgaatgcagtccccctcctccaggtgcagcccccataccgggacgtggcctcgcccgtcccaccccgtgacgcatccaggcccctccccctccctccctctccccctccccttcccccgcctggagtcctcctcgcccctccgcccgcggcccgtagccgcctcgtcattggccagaacgcttcgggtggcgcgctcgggactggtgaaggcctgcgttgctcccgccctcggcccggggcgcggcccgcgattggctggcgtgggcagagcgtcttctcgggcctgggcggcgcagacgaggcctgaggcggcggcgcgaggcaggtgagctcccggcgggccgggccaagggcaccccggggcgggcgccgggctgcggggacgcgaggcgggggcccgggggccggggggacgcggggtcgcggcctgggcgccctcagcgcgggctgcgccagggcctcctgggccaacggctgccgcccccgcccgtcccgcgccccgcagctaccccggcccgcgcaggtgaagacgcccggagaccctggcggtcgtggcgcaggggtcctgctcctccccggggtgtcgccagccggctcgtggcgcggggtcgggggcggagcggggagaggcgcgggaggccgcggcgggcggcccgggctgggcgtggaggagcgtcctccccgcgttctcaggcctcggcccgggctgcccgcctggaccccgttgcggggtcccagcccctggaagtagcggcggggccgtgggtggggtggtgggaagacggttttatttaagagggggggtctcgctgtgtttcccaggctggtctcgacctcctgagcgcgagctatcctcccgcctccgcctcccgaagcgctcggatcacaggcgtgagccaccgcgcccggctgatagtcgtattttttgtagggttgtggtctctccatgctgcccaggtcggactcctaggctcaagcgatcccctcgccccagcctgcctggaggcgcgcgcgtggtctccgcgccctgttgcgccttcaaagtgcccagaatggtgtctggtgcaaaataagcagcggcggggaacaccttgccactgtcaccgtcatggggaggatttctcccggctccccagggctccccaggacaggtgggcggtgcggtccgaggtctctgctctcgctttgcagcttgtggttgctgcgtctggctctgattccgggtgggaagctgcccataattgtgtcttctaagcttcagtcatagtattgcccatgaagtgcttgcggctctaattgctaaagctttgtatgaaggcttttgtgtgtaatctgtttttactccctacatctccactgtggagaaacaccgtgtgttttggtttatctcatctgttgttggacacttgatagttttttgaagcctttagttttctcaaattatttctctaataatttccttttctttgtttaccctttttttctgactgttctggaaatactactgtttgggctggaaggcttgggctggctttataattttcttgtctttctcccatttaatgtttgttctactttctagatttcctctttttcttccagtatatctatttagcatt

SEQ ID NO: 48059 - DNA, 682 bp, Homo sapiens
aagaacgctgatatttaatggggtgtgttgtcaggtcataaccattgtttcctggtcctgaatttatgatgatcgaatggtctcctagtctgctttatagtgtctccagattctgaaaataaatccaattcaaatctgcttacagtaaatgccagggagtgtttttttgtgggagaagtagtgatgggatgaaagcatccttcagcgttcaacccttgcccttaccgcagcgtttcagggtgaggtgagagtcctggaattacctctcctggaggctgttgaattgcatgtcataacgcccactggtgattccagttaagcggtcctgaacacagcgggaaagggagttcccacatcggggttcatcaggcagattggaaacaggactatctaggcagtaggcccagtgtcgtcggcctcacctttccctgtgcgtatttggtggggtggttgtgcttgtgttgccctgccagagggttgcagtgttgtttcattgattgaaagcctgccctcgttttcttcttccccttgcttcctaaatgtggagctcgttgctattttggactgctcacccacttgatttatagatagaggagaccaggcctgctacatcacatttgaagcagtttgcttccactgggataaaataaactaggaagtgtcagatgaaaatacagaaaat

SEQ ID NO: 48060 - DNA, 572 bp, Homo sapiens
tgtggagacctccatggagtgagacttggggctgacgctggtgctcagcgtggtgctgctgcggatggcacaggccagcacggctcagcttcatgtgtgcctctgccgtgtccctgtccttcacgtttagaacacactctggaggtgtgacagggagctgactcccaacccgggtgctggttacaggagctgcatgttctgagcccgccaggccgttctcatgtgatttgtgctcctttctgcgcacacgtaatgaaggttactttgaaatgttcaatgaacacttcctacctgccacccacaggcagatctggactttgaattaaagggggtattccagataaatcaatggagttttaagtatgtggttttatgaaaagttaatatataacttatgtgtttcagtagactatttctcatactttttaggccatccagaaggaactagaacagaccaagcaaaaaacaatcaggtaggaggatttggaaaacattcacttttgtcttcggtgtgtgtgtgtggttatgtggagcggcagcagagtgatgaatgggggacccggggccggcct

SEQ ID NO: 48061 - DNA, 1097 bp, Homo sapiens
gaacgaggagcaaagtcgtgtcttatatggcagcagacaagagagtgtatgcgagggaactccctttataaaaccatcagatctcccgagactatcacgagaacagcacgggagaaacccccaccatgactcagtttcccccacccgctccctgccacaatgtgggaattatgggagctgcaattcaagatgagatctggttgggacacagccaagccctatcactcagtaatacctaaattcccagaatttcctgtgttccaggcttgaatgctcatccttgctttattcgtgttttatggcatctgggggatttttctggttcaaagattgatggtggccatggctgagacctgggggaagaggcctcgtgccctcccatctccatctgatggccttggcagtcgggcgcaggactggagtgtggagttgacttctgccatgcctaggaaccctacatagtttccgttgagaagatgctctaatgtaagtgtctggtcctcatccatggcactaaaacccacgtctctcctctcctgttctggtgtttggtcttccgtccctcgtgtctgtccagcaagcacgtgccatcgtgaacagcgccttgaagctgtattcccaagataagaccgggatggtggactttgctctggaatctggtggtgagtaaatagacgttctgattactaagttagatgatcacctgttagcaggggtgtgcacttgagaggctgttgcctaccccacttccagcagtaaggactcctaacttttaaacatctgagaaagggagcatgattctgggcatgaccctggtgttctttcttcctggccagttgtgtttggggggcacaagttctcccctggaagggctgggggtgcatgcttgtggctaagtcgaggttcacagcacagaaagtgtgctcgactgttcactctctcctgtgctgtgatcggggattgttcagtgccttcaggagagactcagcagtgaccacacagctctccccgagggcgtccactcagcagcaagacagaccgagagcagaagcaggctaagcagatggaatgatgggggctgtgtttcaggacctcag

SEQ ID NO: 48062 - DNA, 2028 bp, Homo sapiens
tccacagctccatggaacttcgtaagatgaacacgtctgtggaactggtaccacaagaagtggcagcgttcccacaccgaggagtccccggtgtccccgtgtagcctccacgctacacatctgttggcttgggtttagcgtcacacagatgggaccgtgtggcacatgctggtcctgtcagccttcctccctccctcttttgggtgttccagccatggtgttgtgagtggcagctgttcctgctcgggccgtgggtcttccgtcacgagagtggcagctgtgctttctcaggtgttgagagacaataggtggggaggccctagctgtctggcctcggcatgggccttcacccccccatccctccggcctttgccccccgtctccccgggccttctcccccactgtctccccaccatctccccgtaccttcgcccccactgtctccccaccatctccccgggccttcgcccccactgtctccccaccatctccccgggccttcgcccccactgtctccccaccatctccccgggccttcgcccccactgtctccccaccatctccgtgggccttcgccccccccccgccccccgtcccaccgggccttcacccccaccgtctccctgggccttcgcccacccctccccgcccccttctccctgggccttcagtccccgtctcctggaccttctgctgtggtcctcgttgtgcactgcttttctgtggcttcatttaatactttatactattggctgtacaagtttaaagcactaaaggatggagaatttaaatagatttattttgcctcaatactcaaatcctgcctcatattcatgacatgttttgaagaaaaatccaataattacttgtatgtggaacaacgccaagacggctttcactaggaaaacacaagtccagcctgaaagaattcatgaagtgcctgtgacctgacgttgaggatcacatgggactgtcgtcatcatgatctcgtccccaggctgccccggcggaactgtccggtcagcgtgactgtttggctttctgcagccatcagcaccgcacgggctcaccagcactttgctcctgagggcacagccggagcccctcctcactgcaggcagacgcagcctctgctgccacgaagccacacagccctgcgcttggcatgcggctgctttttctgtgccagctcacgagtgccaccggcacagtctgtgtcacctggcagggccaacaggttttctgcacagggttgccacagtgttcctgcatggcggtcctgctcctggccataacatccttctcacagggcttggtgatcctgaccctcccagaggagctcactggcctgcagtgttgtcagtgtgatgctggtggggatctggtggtgagagcacagcatggcttcagtgtcttagagactgagggagagggtggagctcagccctcccctggcacagttctctctcagaaggaagtgcacggtcactggaggggcagacttcatataaatcaccaatcactgtgctgggactggactgagaaactgtcggctcctgggaagtaaagagaatgtttacagaacatagggatagcagatataagggaccagctcccaccccaggaccaaggtggagcctcgccagagcgtctctccagaccgttgggcggagggtgtggcccagctcactgaacgtcagggaggttgctgtggtgccacacggtggaatgtaccagcatgctgggaaagcctgtgcacaacagggtgactcaccgggcgtttggctgcaacacccccaagaggggtaccagggaacctcagtgtccacccagcaccctgagctggcaagggctaggctttgggctggcaaagggagagcagttcaaggctcagctccgtcttcacagcgcggtagaagacggcttgggggctgaggggcagtaaatccacagctggcatagaggagaagccggcgggtacgtgcccatcgttcaccatctcttctaaacacgaatgaaatgcgtgtg

SEQ ID NO: 48063 - DNA, 2866 bp, Homo sapiens
aactctgactggggtttggaccccgtttccgcagcctgacagggctggaagctctaggccgacccagttcccccttccagcaggacccgatcctggaggagtgagccgtccacccaggcacagccgcaggtccccagccacggccagggaaggaccgcaggtggcctttcaaagaggaggaacgcccctcagcgatcctaagaggttgtttctgtttgtttggagacacagtctggctctgttacccaggctggagggcagtggtgggatcccggctcactgcaacctccaccttctgggttcaagcagttctcctgcctcagcctcccgagtagctggaattagaggcgcctgccaccacgcccagctcattttagtatttttagtagagacggggtttcgccatgttggccaggctggtctcgaacccctgacatcaggtgatccgcccacctcggccttccaaagtgctgggtttacaagcgtgagccgcggcgcccggccctataaaagtatttttaatttataagcattttacacattgaactgtatagctcaatggctgctgttacaccgcgcgcgtggggagggtcccaccccgggacgcttcctgctcggggtcagccgccgccgcagcctgtttacgcgcagcgccccgccaggcagtttcgtgccacccgccattgtggcgcgagccagtcccggccccgggtcacgtgccgctcccgggcccgccctgggccacgtgttgcctgcggacccgcctctgggccacgtgttgcctgcggacccgcctctgggtcacgtgttgcctgcggacccgcctctgggtcacgtgttgcctgcgggcccgcccctgggtcacgtgttgcctgcggacccgcccctgggtcacgtgttgcctgcggacccgcccctgggtcacgtgttgcctgcggacccgccccaggtcacgtgcagctagccggcgcgcccgcccccgactgcgcgcgactcctcgcgggccaccgtagaagggcgtcgggcggccgtcgggacggaagccgggaggcgctgccgaccgcgcctgcgacagcgtcagccctgcgcggagcgccggcccgatggcggcggcggcggcgatggccgagcaggagagcgcccggaacggcggccgcaaccgcggcggcgtccagcgtgtggagggcaagctgcgcgccagcgtcgagaagggcgactactacgaggcgcaccagatgtaccggaccctgttcttcaggtacccgcgcccggccctcgccgcagcccagcgcccgcccccgccgcctcccattggccgcgccgcctcgccccgcgcccccattgggccgcgccgctgcccgtcgcgggggcgagctggacccaggggccgcgggtcgcccggcggagggtctgggccgcgtctccggggtctggccctgtgtggcccggcgcccccgttccctcggcctctgactcccgcctcggcttccttcccctctcctgcgttcctcctcggccttcccctactcccagcctccacctgttccctcctccgtccccacacgcccctcggccttcctctgtctcctcggccgcctcccgcctcgtccttcggtctctgtctctctccggccgcctcccccgccccaccttggtctcgctctctctctctctctctctggccttctccttcttcctttgcgtctctctccccggcctctcccggcccctcgtctctctgtcctcggcctctccttgccccccgcctcgctctccctggcctccccctgcccctcgtctctctctcgccgtcctccccctgcccctcgtctctttcttccagcctccccctgctccctccgtctctctctccccggcctccccctgccctcactcccgtctctctaccctgcctccctctgccccccgcctctctccctgtcctccctctgcccaccccccgtctctctctcttcctgctgcccccaaccccggctctctccccagcctaccactgtcctcgtccctttcggcttccctctcctagcctccacctcccctggacctcccccacctctcccgtagtctccccaactccgcttccttccgccgggccttcacctgctccccaccccatatctccctgtcccagatctccctgcccggcctccccctccctgttctccggctccaccgcccctcccccacctccctccacctctcccttggcccccacctgttcccctccccgtggccttcccagatcttcaccttcccccccggccccccgcctttctctctcaggcctccctgcccggcctccccctccccttcctctgtctccacccctccgggcctgccccttgcctcccccaccttcccccctggcctccacctgttccgcattcccccacctccctgcctccctcctcctggccttcaggttctccagccgggccctacaccgggctccgtaggaagtcgctggcgttcctctcaccgagggtccaggctgagggtgaaaccgcttctctgttgacgccgcccggcctgccgaaccgagtcagccgcctctggacctaggctcggtgacacctgcacggccggtgtagcctggagggcgagcgcgagcagagctggctatgctgggttaactgcacgcccctcgggactgtgaccgcttggaagttccaggctgctgcgtggcttggttgattgtcttcaggactgctctgttccagtatttttgctgtcatacagttactgcagaatgttcagttgttctgtgtgtggcattctgtaaattatgcatatcagattatctcttatggttcaggtcagggaacagtctggccagtcactagga

SEQ ID NO: 48064 - DNA, 1822 bp, Homo sapiens
gaaactccatctttaaaataaaaaataaaaaaacaataataattagctgggtgtggtgttgcacacctatagtcccagctactctagaggctgagacaggagaatcgcttgaacccgggaggaggaggttgcagtgagtcgagatcacaccactgcactccagcctgggcgacacagtgagagtccatttcaaaaataaataaataaataatccagcctgggcaacatggggaaaccccatctctaaaaaaaaaaaaaaaaaaaaaattagctgggtgtggcgctgcacacctatagtcccagctactctagaggatgagacgggagactcccctgagtccagaaaggaaggaggccgaggcttcagtgagctatgattgcaccactgcactccagcctaagcaacagagtgagaccgtgtctcaaaacaaaaacaatcaaacccaaacttgtttccttcataaacatgctgaaaacaacaatggaaaaaacccacaacgaggtaaagtcagcccagtacgaggttaaggtgcaatgtaggtgatggtcacaggagagttcagggtaaaaattctttcatttttgctatttgaaaatgtcacaataaaatgttgggaaagaaacagtaattcacagatcgtttttcttttcttttctttctttttttttttgagacgttgtctcactctgtcgcccaagctgcagtgcagtggcccgatctcggctcactgcaacctccgtctcccggttcaagcgattctcctgcctcagcctcccgagtagctgggactacaggcgagccacatcacacccaactaatttttgtatttttagtagagacggggtttccccatgttgggcaggctggtctcgaactcctgatcttaaatgatccgcccacctcggcctcccaaagggctgggatcacaggcatgagccaccgcgcccggcccacagatcctttttcgaagccttcatgtccacggaggcaaccccaccggaatacggccagaagcactgggagatcagcagcacttttgagctttgcagcagacatcgctaggcaccgtctaagcctcggctgcagctgcgggcttcgtggccgccgaatgccccgctctgcaaacccggggcacagacagcccgccgggtgagtcagggcggagccggagacccggaagcctgacgcaaggagtcggtgtcgctgccctcgtcacgggggccacggtcctgccagctcccacctgcagggtccatgccgcagcagtgacccagggctgggtggggcggaggggcgggccgccgtgcctcagtttccccgcctgcaccgcgctagatgccggcaccccatagggctccgcgctgggccgcgacccagaccccccatcgcagacccctgcccgccgaccttccgccgctcacctaagtgatccagcgggaagctgcccttgtccgggggccgcggctggaagctcttggtcccgaaattcatggcggtcgacatgttggcgactccggagtctgcgagcgccttgcgagcgtacgcagggcggccggcggagcgccgagcaggcaccccgggagcgccgagcacgtcgagcaggccccgtccccgccccttgcccaggcccggccccaccccttgcccaggcccggccccaccccctcggagtcagcaagctcctgagccccggtgggcgctgcccgggctttcccgtcccctgggaccctcacagcagtcggtagcagaatcagcttttggaattggtgagaaaccgaggcccagaaaggttcagcgaattgcccgaggacacatagcggt

SEQ ID NO: 48065 - DNA, 889 bp, Homo sapiens
aggcttcagagggcagtgggacttggacagctcagcctagcgcccagctgtctctccgggcaggtctcacaaatgccccgaggcaggcccatcgctggccaaattccccacccctcctgcctggactcagtcccttgtgaaatctaagcaaagtcctagggtgtctgaggtcagagtgcatcgggtagctcctgctgcataacaagcgggggagggggtggcccatggctctggactgctgggccacaggggtgatgaggtgaggcttggaggagtctgtaggatcctaactttgatgactattcagggtttgaggctgcactcagctttatcgcctgtgaaacccacgcagccagcaggggtacgagtgcttctgaggtcccagtgggcggggggtggcctgacccagacagggcagggggacggcagctggagcgcgtggagagagcgcccgttccctgggagccactggagggcgcatggcacacggcgcccggccagggcctgactgtgactggagcaagagccgagggactggacggacggcaggtggcgccacctgatctgtgcagggacaggcagggacaggcaggcagagaaagagcccagctggaggctgccagcgctccagggagaggagtggggagcggacagcgccggcccgggctggaaggtcagcttgaggctctgggatgtgaacactgggcaccgagtcatccagaaataaatcccaggcacggtgggaggccggggtgggaggatcgcttgagcccaggagtttgggaccagcctgggcaacacagtgaggccccccgcttctacaaaaaatacaacaattagccgggtgtagtggtagcaactgtgttcccagctactcaggaggctgagg

SEQ ID NO: 48066 - DNA, 1662 bp, Homo sapiens
gcagagcctcttgaaggagctgccggcctgctccgccgtcctcaggaaggctcccgagtgaagctatcccaattgttttcatcatgagtctttgctttagttgacacagcttcgcactagcacccaccgcgccagtgggggccgccttgcctcaggcaagaaagcccctggcttccgagcgcccgacggggtcctctaccccggcacagggaggggcgaggcggcgctgcgggcgacacaggccctctcaagggtcacgcggcggccgacgactccagcccacccagggtcctcagagctcgtgtctcccccgggggctgctgcatcgcggctgggggcccggtccgcccccacagcgcaggggagcctggccggttgcggggccgctcgagggctcgcagtgcctgcagggcctggacccccaccctgccacccgcggcccggccctgcgcccccaggagagtaagtgggaggagggcgcgggaccgtccagggcctgctcggggaccggcgcgcagcggagccccgagaagcgcggctcggccggcccggggtctgcagggcggagcggggcccgcagcagcgtctggacgccacggcctcccacgggagcgcccacctgtcgccgcggggcggggctggggcagggcccctcccatcccctccctgcagcccgaatgcgggccctggccccgcgcactgacctctgacccggctgtcaggtcccgcgggcacggacggcgccggggcagggatgcgcccgcagtgcgcaccgcccggcccgcgcctccagcagcctcagcgcctccacactgcgcatgcccggccggcccggcgcggctggaaccagatccagccggctggaccgtgacgccagcgcgcctgcggggactggacctcggcgcgggggtgggagagccggggcggggcctcggcgctgagaaggcgggggtggaccctgctgcagcccccactgctcctccgacgaggctctctggccgcccgggtctccggtccacctgcgcgaactgcggggagggcgcacccccgcccgcgcagggcccctgccagctgcacgtacttgcctctgaccgcccccacccagcccctatcgtccccctacttccctcatctcccccatctgcctccattatcctctcatctcccccaatctgcccccatagacccatctcccccagtctgtccccatctcccctagtctgccgccatctgtccctatcgctcccccaatctgactccatggcccccatctcctccagtctacccccatcttcccagtctgccatctccccaatctgccccatctctccccagtctgactccatgtccccccatctcccccagtctgcccccatctcccctgcccaggccctgcaggcagaggcctagccctcccatggcatccacgtgtccagcaaaggggaggtgctcaataccggctggctgaatacgtggatgagtcacgcagccttttcctcaccacacagagggcgtctagatctcttctggcttgtgagttccctgccctgggactaagactgcagatcagtttttttgcttgtttgtttttggagatagggtcttgctctgtcgcccaggccagagtgcagtggcaccattgtagctcactgcagccttaac

SEQ ID NO: 48067 - DNA, 2484 bp, Homo sapiens
aaaaaaaaaaaatattaaaatgcacatggtgacctatctcattgacgctaaggcgtactctcactttatcatctctaatgtgaggctgcgccttaaaatcagcagtatgtcggaatgcagtgggcagagggccttctttttagtaatccataaagtaatggcatagctaacactaatcaatcgtgtcttaggtttgatgaaatacggacgtatctacctcaaaacaatggttgaggctcagaacagaacctgacacagaatacgccctcaggtatcggtgttggctgcttgtgactgactttggcaagtaagatcagtacccggcacctctgggcacacagggcccgggctgcatccactgtgccagggacctggtgccgggctgggcagcaagtcagtatcacatcagcaggcgtgggccgtggtgagcctctccctgccctcccgctggaatagaaagctgatcccgacgtcccactccgacccacggtcaggaagccgtcctgtccaggaaggtggctgaggtacatccctgaacacagtaggccacagcatcatgcagcggagggccagtggccgctattcttcctgctggtgttccactcggcccgcagctcacagcaagtctatgcggaactgtgcaacccacatgctttgattttcagaaatgttcttagatcctgaaccagaatgtgctgcaggggggactgtttcacctcaaaaattacagcaaagtaaatgtccttgtttcaacttttccaatgtttaacttgtaacaatagctacaaaagtaatcaggcagcaatgtgtttctttaaacggctttcctgtgagtgttccgtttacaaagaaaatcctaaaaccaggaagtaattggtgactttggaaacagcaagcaaacttcggtgaagaaagaggggcaggtgtacctggaaggactaacttgcagccactcatttcctttggagggcggtggggcctgcaccctgcagattagggtatattctgactcagcaaaataggcaccagcgcctgtaaaaagaaaccgcgctgggcactaagagaattctcaaaaactcccagagccctgggtgtgtgtcctcccacagggaatctcgcacgagttcgtcaaatggctggtctcaggttacacaaccagcactgcctccaccgccaccgccccccaacctcactggtccgagcggttccccgcggtctagccgcgagggcggggccggggggcggaggccagggcgggaccaaggctgggggcggggccaggcatggctgccgctcgccggccgggggcggggccgacggtcacgtgtgtacacagggcccgggcggcgtgcgcgccgtgagccccgccgcctccgccagcccgagctgcccgcccggcggcgactgcgccggccgccgcccagcaagccggtgagtggggcccgggagcctgggtcgggtcggtggggcacaccccagtctccgcctggggagggagccagccccaagctgctgtggctcccacggcgggcgctgcgcttactgggacccgggtcctctggccgctgcccactgcggggctccgtgcccttgccaggaggggaccgctgtcctccggccgcgctccgagctgagccccgggggcgggctttcggtcattaacctggtgatggcagctgaatctgctgctggcgtaggcggcacagcgccgccaccggctctcccatgtccgacagggcaccactgatcctgctctcctgggccactatggtgactgctttcggccccttctgtgattagtattttaaagtgagttttggatctgtgtctacatggaggtgtcggatctgctgtcagttgtcttggacagttggcagggcatgggacggctctttcaaagcttcactggaaggcagtgctctccagccgccaaaccaccactaccagcagcagaaaacccactattaagttagtattacaaacctggcaagtcagttctctaaattaggcataagtctatgaatcttgatgtgactggtcacagtggcttatctctgcatgcatgctacgtggtggaccagaggataattctgtattcgtcgtccacagcctttgatctcttccctgcccatgaagatgtacttgagtcctccattccactttaaatagccagctcctgtccacacggaacagcacgacatcttttatcttttgctacctgcagcacctagcagaggccagcattcaataacagagggccaagaggcttgctttaaaggcctctgcaaacttgtatgagtaaaatggttctgaccatgttcccaggctcctcacgcatagtggtgatgagatagtctaccgtcctaactggggcaccgttgagagtgaacggaggcactgttaataattagacgaagtgcacactcacagtacccatgacctgctgtgcagctccttcaagaactactgtaaggcctggctccc

SEQ ID NO: 48068 - DNA, 2932 bp, Homo sapiens
tagagttgtcaactttctactgctggaagaaaactccacgttagtatttttccattaaaaaattaacacagcattctgtttaggaaatgtgtgtatatttcctaaaatacacatctgaaagactttaaattgctattgcacagatgccttgagccccagcaggtcccgaggggccgagtgcccctggaggcccagcaccccactcttgcacctgcaccagctctcctggcggggagcaggtcccgaggggccgagtgcacctggaggcccagcaccccagtcctctgcctgcaccagctctcctgggggggagggggaaggggggagcccacgcaggtctctgaaccacgcctcaggctgcagcagccgcattactcatactcagcggacaaaggatcactcagcattcaatctcaccacttcaaaacattacagagggaaaacgacacctagaagtaggagtgagattcgctgaagttcccttctgaggaagacccacccctccgcctggagagccggggctggcggtgcctgaggaccccttcggcctggacagcccacgcgggcttggggggcctcgctctgccctcatggggcggccatcggttcccgaagcggcgagtgaaaattcaaatggccagtagggggcgcactcggaagtggccgccccgcatgaggcagttcagcggccccgagagtccggggagggaggtttattctccgcctgcacgagactgtgaaatccgcaaccatgagcaggagaggcggccctggtggggaagaggccaccaacatctggacggcaggtaagttccgacgcttctgcagcgagcgcgggaggagggacctgaggcaccgctaacactcagagaaaactaccggctgagggtccctggtctgaatgcttgggaccggaagagtttcggagttcagatttttgcagattttggaatatctgcaggtacagaatgagaaagctaaatacgaaattcatttgtgtttcatacacaccttatacacactgcctgaaggcaactttataaaaacacttttaacaatttcatgcataaaacaaactttgaactgcctggactgcagcccgccacacgaggtcaggtgtggaattttccacttgtgtcacgacgctccaacagtgtcggactgtggggcactctggatttcagatttccagatgcttaaccagtactcagattcctaagttacttgtcagaaatgcctatttcttgggattacacttctctctgcaaatgtctgtgaaattcctgttaaattctttatggatcatgcacatgctactaagttaattatgaaatttagtgtttaacgcaggtcagttgcaaaaacaagaatattgcttgcttcaacccaggaggacaggttattgcctaaaagatacacaacacctagtatgatgccttcaaacttaaagaaaggtttgtatctgtgggtgaagaaaagcagttaaaccagaaacttccacaaaaacaagtctagtagaactgagctgattgccaaagtgtgggagaaaaagggccagcaaaaaaatggttaacactagccttctgaggaggccgcccagagcctggccagagaggagccagagaggagcggggcggagggggcctataaagccctgtgccaaggggcagactcactggctcagagggaggacgcacccgccagccagccgggaaccttccctcgcgggctcccagggcgggtctcttcctctctctagccctgctcaggcattcggcaggtccagcagaggtacacctcctgcagcgggttccaagtgcacctccagcctgatgggcctgaccaaggaggcttccaggagcacagaaggggctgcaacccaggtaggactcagcctcggcctggcggtgccataccactgactaggggagcgggtgggtggtgccacccaggccgctgtcctgttatgggaacagctgaacacagaccagacacctcaccccctggtgagagcagcacccagcttcccaaactcaaggcacagacccctctcccccggagctccggtggtctcagcgtgaccgcagcaggggctttgcctggacggcctttctaactcgtgctgaaagcaggacccagtattccgtcacgttctgtcccagcaagaacgtgtctcacttcaagaaaatgagggtgcccactctgccctgccctgcggtgccccagtcactctcaccaaccctgaagccctgggagggccacacgccttttgacagatgcagacttaatacagctgactaaagtgtggctttatttctctatgacaagcagaggaaatctgaaatgaggtattgcactgtttataactccatggccacctccagtgaggacgtggggccagtggtgaatggcacactaggttcctctcacccaggaccacatcagacactaggacacatcagacaccaggtcccgtatcttctcggtgtctggcaacgatcaaaagactcaatttacatgggaaagaaatgaatgactcgtttttaaactatttttcccttggagttcatttaacaaaattaggaaagaaaataaacgttaagttgagggttctgcccacctttaaacttcctgccacgccacggtctaatacgttccaaaatttctacatttaaagagcaaaacaagtcctctgtgccgtttttaagaaattaaatacagaggcgaaatgcggagtctttcaaccttcccgacagagcctgagagcagaggcatttatgctgttcaatggtattatctactaaagatgaatcaagagtgcaaaataaccaaaatcaaattcaccagccccagctaagtgaaggttattcagtacttttagaataactgacacagaggcagtgattcatcttgtcttccccacccgcctgtt

SEQ ID NO: 48069 - DNA, 2030 bp, Homo sapiens
ccgccgtgcacctgcagcacaccgacgaggcctgcttctgtttcgcggatgtccgggaggtgcagtggctcgaggtcacgctgggcttcatcgtgcccttcgccatcatcggcctgtgctactccctcattgtccgggtgctggtcagggcgcaccggcaccgtgggctgcggccccggcggcagaaggcgctccgcatgatcctcgcggtggtgctggtcttcttcgtctgctggctgccggagaacgtcttcatcagcgtgcacctcctgcagcggacgcagcctggggccgctccctgcaagcagtctttccgccatgcccaccccctcacgggccacattgtcaacctcgccgccttctccaacagctgcctaaaccccctcatctacagctttctcggggagaccttcagggacaagctgaggctgtacattgagcagaaaacaaatttgccggccctgaaccgcttctgtcacgctgccctgaaggccgtcattccagacagcaccgagcagtcggatgtgaggttcagcagtgccgtgtagacagccttggccgcataggcccagccagggtgtgactcgggagctgcacacacctgggtggacacaaggcacggccacgtcatgtctctaaactgcggtcagatgtggcttctggctcctcggggcctcgcgagggtcacgcttgcctggtcaccctggggctgcttaggaaacctcacgactggtcaccttgcactcctcacacagaattgctacaatcccaaagcgctcgccccgcagggtccaaaggccagcggtgaccagcctgtcacccagctcctccccgccaaccctgcctgccgctgcacctgcctgccgctgcaggaaacatttctgacaccgtcgaccaggaaagccacacggagaggccactgtgggtgaagcgcctcagttacacaggaaccctaaagcaaatctgccaccgtgggggaactgacgctggagatgcaaggtgctggtgggtctgagctggacgtcgcggtgtgtcctctgtgcccacggtctgagctagctagcgcaccgccgagttaaagaggagaaggaaaacatgctgctctggtgcacgcctgagcgtcctccatcttccaggatggcagcaatggcgctgtgcggcctcaccaggcccacgaggagcagcagcgctcggcccggagcagcaggaaggcccctctgtggagcgcccgccgtctgctccggggtggttcagtcactgcttgttgacatcaacatggcaattgcactcatgtggactgggaccgtgcgagctgccgtgtgggttagtcgggtgccaggacaatgaaatactccagcacctgtggctgacgaatttgtttctacagaaataacagctggggacaactgcggtgatgatgtaaaaaccttcccataaaatgtaagaaaagctgatgaggctggtgacgttcagcctttgtcaataaacctgtcatgtgcggatccttccggaggctctgtcttgggggtctgccaagtggggtgggacgtggggtgggcatggggcactcgggagaatccctcccccctcacagaaaacacagccctcccctgccaccctgaaaactctcacaaggccagcctctgagtccggccagccggacctaacctggcatttccaggctgtccaaaatgccgtgggggcacttctgtgtcatgcttgggtgccatgacaagcttcccatgaatgtaggaggcagggctcagccttgtccagcagcctgtgcgacctaagctgcctttctagaaggctctcggccgcgtgcgaggcccaagagctctgcggcacccaagcgctcctggagcagccggccgggaaggttcctgctccttctcccatcaccggggctggatcctggcgctgctcccctcctttcccgcctcacccacctggcagcagctgtccctgatgttaacaaggtgcacctgaaccagtgcctgcttctccgtcttcacagaaacctgcgcagg

SEQ ID NO: 48070 - DNA, 1570 bp, Homo sapiens
agagacccagcatttctgacttccagttctgacgagctgacgtggggagacccacacggaacgtggtctggtccccacccctcacagcagccccgtggggtaagcgctgtccccaccacaccaaggaggcactagaagggtcagtcactgctcgaagccttaaatggtgggtgacacagccaggaattcagccacgctctcctggctcaaagcccacaagctctgtagcactcggcaacccctggcgtctaactggcaaaagcacgccatgcagaaatcatacagggctgggggccatgggcatcgaggggtcacccaaggtcaccagcccaacctcctctaaagcctgctgtgcgggaagtgcagggacggcagcagcggcagcggggagggctcccttaaggtgatctgggtgggaactgcgtctgaacagagccccaggcatcaatcagggacgggactcaactcattcctccacgtcaacccaccacagggaacagtgctgactgtggcgtccttccctccctgccacagacgcggcttccatcctgcccgcaccagacaccgctgttgagtgcgtggaagcgtcacgccgccccactacgccgctcctctccgccaggtctcttctggggacttgcccaaggctctgggcagacagagctgacacgccgccatctagccgccggaagcagactcttgacctgtgaagctggcggcggcactgctctgaggccagtcacacgagcgacaggcacccagcagccaagccaccgggctgcggtaagggcaggtgcaacactgaggtccccacgcagtagagccagccttggaccctgggccctggagtccctgaccctgagatcccagagctgggagctgtaggacagagaccagcaggccgggcagggactccgtgggtgccgccggcgcagccacacacgcccttctcaagcgcttgcctgggagccagggcaaatgtaattgtttttggcaggcccacggtgagataaaatcaaggcgtcttaactgctctgctgtctcctggtaacccaactctcctacatgagtgctttttaaacccagaaagagctcaaaagtacatagctgcaagcatgggaaaaacccccgtgttagcactgaacgtgacctcctcgttctttgtgcttaacaattaactcttgacctcacgagagtgacacggcttacccgcccttcccaggccccgcacctcccactcagtgagaagcggcagcggtgggctcactaatgctcacgcgcccactcacctgcagtcttggggggcagggtgggggagagaactacaaagaaaccttcttaggagggtgtttctgtggcggggtgggaagccattccaaagccgtcctagacaccccgtgaactgggcacatgaggcaatgtgaggaggctcctgaagccggggctctcccagcagaggcgggagacagggcaggcgaggggagcccatgggaacgggtcagggctgaggacaaggcttaacccagacattgaaagtaagaagcagcacacagactacgcgagtacgttt

SEQ ID NO: 48071 - DNA, 1169 bp, Homo sapiens
ccttacacagagccccttccttcctgctcccgccccttccccggctattcctgaacaacttctagagctctgcaccttcagcctcctgtctgattctcgccgggatcagcctccgcgcagccgcccaggttccttgcagggtggaccgtcccgtgtcccagcaccgggccctgcccacggcgtgcctcctgagagggcccactcagcacggccacggcagcctgaactcccagccttggtatccacgcagcccgcagctctctgcaatgaggggccggccgcaggcccagggagatgtcagctgccccaggcaatcacaagcaaggaggtgcgcgtcgcggacacagcacgaagccctgctcggcctccagaaaacgaggctcgctcctgagtcttggctcgctgggccaccgtcaccctgctctctggttcaagaggcagcggccaggccagccgagccaggaacaagctgcagtgccttggcagcgtgtgaaatgcagaaggtcttgcccatagaagtcatcacagcagagcgctctccccacaggggctgggcagcatgtccgctgaccacagacctggctttggggcacgtgcaccacccacgttaaccatccagagctacaggcaacagcccagtgccaagtgcagccagccagaaaagaaaaacacacaaaaaaacggcaaaacacaaactccgtccaaagtccacccacgagcaaagccaaccgcattattcagagctgcgtgcccagcacacggctctagagagaagcgaggagctgggcccagcggcagtggcagttcccttctccaccgcgcagtcccactaaagctgcgggcagctcttgatttgtgtatcttacaagaagaagaggagggggagaagaagggaaaagtcggcgtctgcagccacactcaagttcttccgctcatccacgactgtgaagctcacagctccggccacgctggcgttcaacaccaggtcactgtcacttccacaggggacggtcttgcttctttggtaaaaccaaaggagtgtttcaaaccatgcccaccttccattcacctgtttttaaaatttttttttttttcagagcaggagcggacgtttattaaaaagctttaagagagaaaggaaggtgcactcggaagagaacccagcgggc

SEQ ID NO: 48072 - DNA, 1087 bp, Homo sapiens
ctgtaatcccagcactttgggaggccgaggcaggaggatccatcgcttgagcccaagaattcgagaccagcctgggtaacatggtgagaccccatttctacaaaaaacatttttaaaaattatccgggtgtggtggcgcgcgcatgtggtcccagctacttgggaggatgaggcgggaggacggcttgagcccaggaggtggaggctgcagtgagctatgatcacgccattgcactccagcctgggtggcacagcgagacactgcctcaaaaattgaaaaagagaaagtgggagctgaaagcctcggagggcaatcagggcgtcttcagagaaagacaatgaaaccagagccactgcaagccctgacggcctgaaacctaggagccagctgagtcccttccactcgcccgcgctgagttaacccagaggcgggtgcgggtgtcggagcccgcgccgggacgcaccggccgcaccggccgcaccagcctccccagcaccgcggaccccagggccgccgcccggtcgcgccgcgccgggcctccgcgcacccacgtggagggggcggagccccgcgggagcccgccccggggctctgggtctcctggcgccctgacccgccggccaccccgccgccgccccacgcgcctacctgcgcccacctgcgcccacgtcgcccacctaagcgtgaacagctgcgtcgcggacgccgccttccggcagggacccgcgccccaggtaagcgttagtcccgccttcaggagtgcggagcctcccattggacgaggtctgcgtccgtctctccgccggctaatggcaagcggcggcagcacggggggcggttccaggaccgggcgcgggctactgacgccatctctagaggcctagagttgcttggagaggagctggttgccaaggcaacccgccctgcccagaacaagtgcagatgactaggtttgggccccgcagggcttgggggtctggggtgcaagctgccccggccgggctggcgtcccggggtggggcctccgccgagggtccagggtatggagctcggctcggagtcgaaatggatgagctacggctattg

SEQ ID NO: 48073 - DNA, 5879 bp, Homo sapiens
aactgactcttcccaaggaaaaaccaggcttcccagatgaaggaactgaggcgggctctgtccttaccttctctttcttcttcccagggtgagagtcacagtctctgtcaatgtgatcaccaaccaccacgtctggtatctggcccttttttactgggatgggggtattacagagtgggcatactgggacgtgaacatcctaaaaataacaaaggtaagatggcatctgagactcatgcaacttaaactcacagaagttttaaacgagtactcctgtgcggcacacttaaacacaaagagaggacaaaaaccggtctcccgagccctccgagaacaaagcatcactgggtcatggattagcggcagccatctctagaatgtgggcatcagctgccctgaggagtctagtgaagtttcaacgaatggacttcagccgactgcagaaaccagctggggccatctcaggctggcaccgcccaggtgagaacagagcctgcccagacacctccacagggaggagatggagggaaacatggaccacaaagaccctccagctcccctcagtcgccaacggcctgatccctttgcggtttccccagtggcttctacgtacacagagagttgcttgcgcccagatgaggccacgtgtacctagggtgagctcccaggtactaacgaccgtcactggctgcaggccaaggttgtgagggctccaaaggggtggaccgcccagcaaggctaaaaacctgagctgggggctccgaaggggtggactgcccagcagctgaaggcccagcaaggctaaaaacctgagctgggggctccgaaggggtggaccgcccagcagctgaaggcccagcaaggctaaaaacctgagctgggggctccgaaggggtggaccgcccagcagctgaaggcccagcaaggctaaaaacctgagctgggggctccgaaggggtggaccgcccagcagctgaaggcccagcaaggctaaaaacctgagctgggggctccgaaggggtggaccgcccagcagctgaaggcccagcaaggctaaaaacctgagctgggggctccgaaggggtggaccgcccagcagctgaaggcccagcaaggctaaaaacctgagctgggggctccgaaggggtggaccgcccagcagctgaaggcccagcaaggctaaaaacctgagctgggggctccgaaggggtggaccgcccagcagctaacgcccagcatggctaaaaacctgagccagggcaggaattgatggaaaggtcaatgagaaaaccgaggtggcaaccgacatggaacgggtggcaggtgctcacggaattatgagcacacccgtctacagcccgagctgggagagtcacaggtggtggtgcttcctcatttggtcaaatgaaataaagtattagtaaacggtctccagccagaccccaccccatgctggggcaggaaggggcagtgggaagacaagctgggcagtctggcttagtcatccgtgcctagtaaacgcagggaatgtgagtcaccctccccacccaccgtgatggcctaaaaatggctggagggtcagaccctggccaacactggtcaaagcacagaatgctgggccacccacattaccactgccaccacggtcaagtggcagagttcactaaaatgacctgtgacccatccagagacaaagtaaacacgggctgggaaccatctgaaaagtcaacaacaagtctcaaacctctggactcggggcaagctcatttccttaggtcctctttcagtttctgctgtgtactctgggagtcacctaaatactatgtcaaggctgcagttattcaaatcaataagcgtatttactgccttcctgattggcttccaagtcaaatattaaaatctttcttgcatctggtgaagacacagctatggtgtaacagctatggtgtaacagatcaaaggaaccaagtatttgaacatctaaagtaagcttggaacataaggttacaactaagtgactccatgagtccctgaaaataagatctcagttgtctgagagtcatccaacagaatgtcctgtgagggcagacacgctcctctgtactgcctaacagcaggcacctgaaacgaggctagtgggactgaaaaactggattttaaaatttaattttcaatgagttagccatacgtcgctagtccctaccataccagcaagacagtgcagcttcagacggtgaagatgagaatcttttgaacaaaggatcaattaccttctggaatgcaaacggacacttatgtgcagcgtatggaaaatgatctttacagaaatcttgtttacatgcatcacattttactggaagaaaatctaaaaaacaaaaaacagggaagtgttttaacgactggaacaaaatacttccagatagtactatcaaagtgtttacctacactaagtgttttaggcctatgagatggacaggtcctcgagggccacacatgtgaaaacaatcccagggtcaggctgtcttctagagaccccctatggcatcgcaagtattccagcagccccctggatccacctggccctgctagccagcctgcactcctgcacccagcctctggtggatgctaagtgtcaaacagaacctgcaccagcacagttcccaatactgaggagccaggaaggccaagacacaattatcagctaattaacagaacagccagctttcccccaacaaaataccattttctattaagtctcttaaaagtactcacctagctgcttgcaagtcttttctgaacaatgcttccccaaatcaggaaactccattatgagaacagtgctcaaaacgcagatggcggagttaagtgtcacctacaagagaatcagaatagttaggaggaaagctggactgcccttcagtcaccaggatttacaatgtaattacagctaatgaaagtcaacaaacgcactgtgtggggagcattccatggagttttagtacaaataccaggtgtccgccattcgtagtcaaccccattaagagacacggactccttcacaggccttttaattcctagtctatgaagcactccttgaactcgggtttctatttaaactcacactgagggggcgagagctaattcacacagctgccagtgatgattacgactttggtgaattttaagtcacaattttatccatggaatatacttgttcacataaacaaaactctgttactaggtgctaaatcacatcagttgactccattatccagagaagatttaactctgtccctcgcctctctcttcaactcccttaggcattgaatcttactgtgaacttattcctcgatgacatcaacctggagttgatcagggagaagcgcaagctgttaagtcactatggaaaacaggcagacagctggtgaaactaccgcactcgagagagaatcaaggggctcacgaggtcccctccatgatctagtacccaccagccctcccggggccttttcctggggctcacgaggtcccgtcatctagtactcaccagcccctcccggggccttttcctgaccttcccatcagctctctccccactcctggaggcctcctagactgtcgcctaagactggaacactctcgcccatggcaaacgtctagttatcccctcccgcctcagtttaaagccattcccaccctccccagttccctctatgttacacgcccgctacttaaggtgcccattagtcctttcccagccctccttcgcccacagcttccaactacagatccgctgctttactattagctcccggtgcccgacacacagcaggcgttccgaaattgttttgttcaaggaattcacaagagtttgatgtgaatccccaaatgattttgttctggacgcacagcacccgtcctaggaaaccaacaccctaccctggcgggccgggcccgcagcaagaaaacacacatctacgtggctgtcactcggctggcgggttaacgaccccgtgcgacccggtactacggccccgatggcaggcccggcccccagcagacagccggactcccagcagacaggccggacccccagcagccagaccccggcaggcccggtccccagcagacagccggacccccaacagccagaccccggcaggcccggtccccagcagacaggccggacccccaacagccagaccccggcaggcccggtccccagcagacaggccggacccccagcagccagaccccggcaggcccggtccccagcagacaggccggacccccagcagccagaccccggcaggcccggtccccagcagacagccggacccccaacagccagaccccggcaggcccggtccccagcagacaggccggacccccagcagccagaccccggcaggcccggtccccagcagacaggccggacccccagcagcctgacctccagcaagcagccggactttcagcagccgcactcctagcagacaggccgaacccccgagcaacctgacctcaaggcaggcccgacccccggcagaccctgtctgcgcaatcccggccccgtacctggctctcgtcggggacccaggcagctgaggtgagcagcagatggaagagacgtaaactcaggtgtcctcctccgtagtcggctccgggtagctaagcagaaagaacctcgacactggcaccgagacgccgtcggaggcacacccacacccacaccggaacgcaacatctcgctgcccgcggcctacggggatttatccgcagcccccggatctgagagccgtctgggccttggggtttccgggcgcgccccgacaacgtcacccgcagaccggccaatcccgccaggccgcggcccagtggcgccggcgcacaccgaagacgacaccagccatccggccaatcccgccccgccgcgccccgcaggcccgcccactcctcgcttctccacttcccttctcgaagtgtccggtcgcttctcgcaggcggcgcgcttgctgggtcacagtgaggcggctccgcgcaggcgcagccgggcgggcgaggagcggggaagctgactcagggctgcggccggggtcctgcggggtaggagcgcgaggccggcctgagggaggaggcctagcgacccatccggcgcctcccgccccgggcacccgcccgcggccgcgcatcctgcgggccccaggaggcctccatctcaaaacaacgtgtttttaggtaatttcaaacttagggaaaagcttcaagaataataccgaaaatgtcagtgtccccagcacctagatcccccagttaaatccttttccatttcaccgcgctgccccccgccccctggacggttatgtggccgcgtggggttggctctgcccagggccgcggtcactgcacagaacgccctgcacgtaaggggctccgcctgggtaagaccccgcccagctgggcaggaggagggcgtgggcccaggacatggagaccagcctgggcaacatagcgagaccccatctctgcagaaataaaatattagccggacggtgcacggtggctcaggcctgtaatcccggcactttgggaggccgaggtgggaggatggcctgaggttagtgtctcacatgtctgtgtgaagagaccaccaaacaggctttgtgtgagcaacaaggctgtttatttcacccgggtgcagcccggctgagtcggaaaagagagtcagcaaagggcgatgggattatcattagttcttacaggttttgggatagacggtggagttaggagcaatgttttgcaggcaggtggtggatctcataaggtacattctcaagggtggggagaattacaaagaaccttcttaagggtagaggaga

SEQ ID NO: 48074 - DNA, 1602 bp, Homo sapiens
agccaccacgcccggccgggacaaaattttaaacgcatgcttttgtccttccgtgtgaacaggaactgcttctgatctccgtactgacagggatgggaaaaggccctttccagctcagcggccaacgtcgcatccctgaggccgtgtgcctgctccggggaagacgccgtgcctgtagccgtttcgggctttgacttggtgaggtctgcaccatcctcggtcgtatttcatgactggtcttgcttttttgcaggggccagaataattatttaaacgggcatgggatggggacctctggatctttacagctggctcaaagccctgcccgtctcccaggaacacatcattgctttgatttcttatcttgcaaggggagccggggcagcaggggctgcagtttcagaggcttctgcgtggccgtgtccgccaggacagcttccgggacaccgagaaacccatgtgggcgttttccaggtaccacgcgcgccctccagtggtggttgcgggaatgacggctggtcgggaccagaagacccactgggcaccatgagcgtttcctccctaagcattaacggcagcgtagacccccgtccagccgtccctgaagtgtccggcatctccttcgagggaggctgtagggtcctctcgtgcaaggcccaggcgcatcgtgacagcttgcacgcgctgtggttcggggaggtcttcctgcaggcactgagtcacaggtcaaaggctggctcaggtcaggaagccaagcaaagcaccgagacgttgccttgcagtggcttcccgccgccctctggtatccattgttgacttctcttggttcgatctttaagtaatattcttgttggctgtctgtctgtcccctaggaataccacgttttatgaaccatcttcatagccgtctgcagctcccgcttccccgtcaccactcagcctgctgccctcgcaaggattccacccacctggcttctgatgagtcagcactaccacctgaccccaattattctggggtcccatgattttcattgctactagggaaacctttctagaaccacgtcttgtatcgtctgctctggcttacagaggacagacactcctgagccccttgacagcaccggtgcccccggccagcccattccttgttgataccaggttgcattcccctgggccctcctgtgcaacgtggttggctggcgttttggttttattgtgttttcccgctgtatgtggtatctccctgttaactgcccacttctcggagccttctttttttaaattttttcttatggtagagacaggatcttgctctgttgcccaggctggagtgcagtggcatcattacagctcgtcacaccgaggaacccatgtgggcgttttccagttaccacgcgcgccctccagcggtgtttgcgggaatgacggctggtcgggaccagaagacctaccgggcacgaggaagctttcctccctgagcatcaaccgcagcctagacgcccgtccagccgtccctgaagtgtccagcatccctttccagctttatgtggtatctccctgttagatgcccacttcctggagccttcttttttaaaattttaa

SEQ ID NO: 48075 - DNA, 1584 bp, Homo sapiens
gggactggcaggacagtgtccaggggcacaggggaggagccccggatctgcgcaacgggctggggctgtgtgacctgagcaaggacccctcctcttagcctcggttctctggtctgcacagctgcggcctgacagaggccccaggtgctgcctgtggctcctcccaaccccgagaccttcccaccaaaaacacactcaggagaacgctttgcccagaaggtgcctgggctgcaggtggccgttgagggccccccttcctgagcgtctggcccccagccccgacacacagatctctgtcccagcaagcctggtcccagtcatttagccaaagagcgtttgctgagtgaataaacaatggagcaggtccaggctcgggccaagattcagcaacgggcagggccagctgcccagctacacacgccaagaccctcctggggagagacagcctagtcctcaacccctgccacctcctgctgctcccagagatgggggctgttctccatctcgggccctatcacccggggcctcagaggcccggctggcagcagcacctggggtctgggggcttcctgccctgcactggccgctcccccacagtggccctggccacatccccccaggggcctgaacaggctgggggagggtcagtgcccatacgagggctatccagggaccccatctggtggccaggcccctgggcagtgagagcctcggagggcccaaagaggcagctctgctggcctttcccagggacacagagggggactggactgaagccagggcccaggagccgccctgagtcacgtctgactcagccggcgggcgggggatgccatggctctggcccagctgcattcggtgtccgggcacactgaggccactgaggacagcctcggggggctgcacggtgggctgtgcctgcccagtcccacgcctcggctccccatcccccagccgcccgggcctcagtttccccgcccgtgtcagcgcgcagccgaacagcagaagaatcaaagggcgccaggcaggacttacatgaggtcgggccggtggcggtgcaggatggcgcagaaagccaggccgtcgcggaacgacgtggtcatgttgcagatattcacgtcgcggtagccctcgcactgctgccggcaccactgttgcagcgccctgatggccgccatgtgggcggcgcgcccgccgcgcggcggaaccgccctccgacaccttcccgcggctgtgccgcgaccgcccggccggcgggacagacgctgggaccgctacggaaccgccagacccacggcgcccagccccagctgagccggactgagggcgacgagtgccgggtccctaagagaagccgagcccggccccgcccccgccggccccgcctccttgtaggccccgcccccagccgccaagtcctgcctccggataggccccgtcctcacacctcccagccccggcataggctcccgcccaggcaggccccacctcccgacaggccccgcccccagccgccgggtcctgcctcctgataggccccgttcccacgcctcctggccccggcacaggctcccgctccaggca

SEQ ID NO: 48076 - DNA, 2537 bp, Homo sapiens
gccgcccggccccagtacgggctcgcgccctaggcacgtcccgcctcctggtaagtcccgcccccacgctgtcaggtcccgcccgacaggccccgccccacgccgcctggcccctccccaggccccgccccgccgctgagggccgagacccccaaccggtgaaggggcgcggtctgcttgggggtcctgccattctggacccctgcggagacctggaattttctttttcgccgccccacctcccaccaccatctcaccccaccgccatggagaagaggcaggaaaggccgttgacaaacggggacactgaggctcgaacaccctgccctgtctagggcctcagccctcggcagcccggcctcccggggagcaggaggcgccttgtgtttcagggtttcaaaggacgtccgcatctggtttctctttccaggccgctacatgccagcgggggttccaggcaaggcagaggtgaggcctgggcattgccagaggagaaactgaggccaggaagggggccgtggagccggagttgcacagctggcctgtgcttttcttctgggggcctgtgggcaggatctgttcctggggcaggagattcctcaggctgacttgcagggtagttccaattttccactttgagctgtgacagaagaaataaggaaagtccctctgctggggccctaaattatcccagactggcccctggccccgttatccttggggaaccttgtctgtggccacgggggctggacgagggcggaatcactgacaccagccatgtgaggggggcctaccctcctggctgtggggccagggcttgtctgggcagggcctgcaggaaggaaggtgttttcccgcagtagcccctggcagggagtcagggcagcttctctgtgccccttgggaggaggagaaactgaggtcttccaaccccagccaatggtgctgttccagatcttttctgaggctggtccctggtgagacaccgtagtgttcatggccagctgcctaagtgtcagtgaggcctgtgtgtaggtggtgagctccccgtcaccaggggcatgcaagcagctgctaggcagggagcccttgtggcctgggaatgtggctggccctaaccgctgctccgccacagtccctgacctgcggatgtcaggggatatcgtgccagcacagccggagccggtcctggcaccgggttttcttgactcccagggcaacggttaggagaaccggaagagctggaaaagaagggagagatcaagaagcagaagcagcggggcagtgggcggggggaattagtgggggatgggggacacaggggtggacaggcgttagggcccagctcccttaaaaggagtggtgtgggaggtggcctgggtttcacttttatcgtgaacttttaccactgcacacttaaaaagccatctcactggtcaccccgtggcccatcctgcgcggcccccctctggcaccagtgagctgggaggcagcatttgtgacgtttgcccaccagcacctcacacaccatgtccctccagggtccccgaagccaggagccaggacacccccaaacaaatggtcctttctccccactgcccacggctgccaccctcccatccagacgacctgtccccccgcctctgcccacagggctgcctcctgcccctccagccaccacagtccaccctccccagcagcccgagggatctttctagaaggcctgaccaagcccttcccctgccgggagcctcccaggctgtccttcgaataaagtccaggttgcttatcagactttccgcaggcttatcacgctgcatctccccggccgcaccctgccacgctgaccccagagctttgcgcccgcaccggcccccagcacccgcccctcctcctcatcctccaagacccccaccctgaagccccttggagccaccgaaggctcccagggtccccatctgtgctccccagggctgccatgtggactctgcacacgcctcccccgtccaacacagagcctccacccggggaacccgctgccttctggcctcactgggaaactgccttctctcgggctcagtttcctcatctgcaaagtgacatcatggtccccttccaccaagggctaccccacggccaggcacgcagtaaatgcagcatgatgtacccacccaggcacgcaataaatgcagcatgatgtacccaggggtggggaacaggtaagagcggtgtgagctcaacaggccccaggatggggactcagatgggggcccagacttcaggccctttagaaatgatgatgacctcagcctgggactaacagagagagagaaaaaggggagaaagagacagagagagaaagagaggggagaaagaaagaggagaagagagggagacagaagatagagcaagaacctccctaggaaggaccacgagaactgagacctggaggctaagctaagtaggaatcactttgttggagaggaaggggaaagggcaaagggaacaggagttgtaaaggccctgcggcaggaagg

SEQ ID NO: 48077 - DNA, 582 bp, Homo sapiens
ctgaggaagggagctgggggaggcccaggccccccaagcagctcctgccctgcaccctacctgccacatgacctcgggccactgtctgggcttcccggggtgaatgggggagacacctcatggggagacctgcactcctgctgccgagggcgctcaggccccaggtgcccacactcagcctgtggctgccaccgtctggcctgtttgaaggtcagggtccatccccagccagagctgaaaatgaaacccagaagcacttgttttgagactgaagcagcaagtgagcttgtcactatggcatcccccggccccgccccgtccccgcctggagaaggcagcccgggactgccgggaaccactgggaggggctgggaccctgcctggcctggctcagacatactcctgggcctccctccactcctgaaaggaagggaactgtggagtctgggctggaccctctgagtcctgggctctagtggtcaccctgggcgaggggctcacagccacagccacacaggaaggtgctgatcccagatcctccactgttccagaacagacggcccgggacctgccagcagccac

SEQ ID NO: 48078 - DNA, 1602 bp, Homo sapiens
agactgactctaacctcctgttatgtcagaggggattaaacaagggtcagaggaggcaaggaagaagccagagctcactcagcagcctacagcagagctgggaccagcaggatacgcacaggtgatggtggacagtcacgtagcgctaaccacaaaccaggccatctctggtctatccaaattagtgtgcttagtaacccccgccccgagtttccgcaataggtgctattactctaactttacaagagagaaagggacacagagaggttaagcgacgtgcccagcgtcacacagcaggcgagtggcaaagtccggaggatctgagccgacagttcagccgcagaccccgtgctacgctacactgtgctgcctcccgcctcctggctggggagaccttccgctactgtcggccgccttgcagctcagcctgaaacgagatcaccggggtcccgaaggaagtcgccactgtcccaagcctcccagggactctcagagccgctgaggaccgagagcagtgtttccagaccgaattcctggaaacagccgcggctgcggaacaaccaagcccaacgcaggatccgcggcagctgagatccccaaagacccccaaagacccccaaagacccccgggctgcagagcgaggagggagacgcacctgagggtttggccgcggcgctgggccggcgcaccgtggtgggcttggcccggttcatcctgccccgtccctcgcggctcccggcggctgcggcgtcacctgcggaggagccagcgtgcggtcattccttcactcattcgctcgttcgctcgctcattcgctcccttgccgcacggggcttgggcctgggacccggggacagtggtcccgcgcccgcccggcggggcgatgctgcaggagctgcagggaccccgcctcccagccgcccgggagcggctcagtcgggcggcagcaggcgacgcggacgccgggctggaggcggcagaaccagaagggacggcccagaggccgggagcggtagccgggagaaccaggcgctcgcccggcaatgaggaagcgcccaggccgcggctcacttacctctggcccatcgcgaccggagcgccgccgccgccacccggccaccccggaatcggaaaccgatctcaccgccctcgaggacccgacttccggaacaaccggaaggaaaacagtgcggcgggaagcgggcccagaaggaggcgcgagaggcccgcggcgccggcctgatgcctgcagcgccccatggcggcgggaggcgggctggccggcgccgcgcgcatgtggtccggtccaggtgggtcggcggcgcggggcaggcgctggcctctccattcacaggtggtgctggcgttgcgaagggacgcactccaggacgcacggcggggaggagtggcgtcagggatccgcggatgagtcaagtggcaggttctgcacgtcccggagagcgggggcggccggggcgcaggcactggcgagggggcgcagcccggggggctcccggggagagaccctgtctcaaataataataataataataataatagctttattgagatagaactcgtgttccacaaagttcaccctt

SEQ ID NO: 48079 - DNA, 567 bp, Homo sapiens
caggagtcaaccttgaccacctcctcctccctcttctctttctcctccgtctccttcccctcttcctcttcctccccctcctctacctctttgccttcctcctccctctccccgcctctttttgaaaacagcttttttgagttatgattgacgtctgataaactgcaggtgtgtaaagggtgtaaagggtgcacactgatgcgtgttgacattcacacgtacctgtggccccatcccccatccctttcaaccctgtaacgaacattcccaaaccacccctgacttgtccccaggccgccagggcgccactttctgtccctggagaggcgctgtttgctcttctggagtctgtgtgaatgaaagcacacagtgcacgctccctggccagctgctcggcgtcattattctttttttttttttgagatggaatctcgttctgtcacccaggctggagtgcagtggcgcgatctccgttcactgcaacctctgcctcctgggttcacgccattctcctgcctcagcctcccgagtagctgggactacaggcgctggccaccacgcccggct

SEQ ID NO: 48080 - DNA, 457 bp, Homo sapiens
tttctttcactgagtcgtgccacaacaaactcacaccagatcatgcgtcctgacttttggctcagacattacagtcagggacagagcttcccaggttgggttggtgcagtgtgacattcccgggctggggaaccaccagcatagggagaagagggtggactctccaggagtcctgactccaagtgcaaatcagcatttgtcatcctgagggttatttacagtggccattcgccatgacctctcacggttccggcttgactgggtgagcagagggatcttacccgggggcttctgtcctgcaggtgcagacgacacggctggggctggtgcatctcaccggcttcccgcctcagccttcctgcttaatgccggctacaggctgggacctgacaaggagggtctacagatggcatgaatgtccttaccacatggtgctcttgcttccaaggggaagagg

SEQ ID NO: 48081 - DNA, 1148 bp, Homo sapiens
gtcttgaactcctgacttcaagtgatctgcctgtgtcagcctcccaaatgctgggattacaggcgtgagccaccgcgcccagccattttttgatacttttttagagatggggtctcattatgttgcccagcttggtcttgacctcccaggctcaagctgtccttctgcctcagcctcccaaagtgctgggattacaggccctagccactgcacctggcctaaaacattctttcttggggtgtccatgagggtgtctctggaagagatcaacagtagatcagtggacccagtgaagaggcgccccccgtccccagtgagagcaggtaacatccgatccacggagggtccaactggaacagaaggtggaggaaggctgacttctctctctctccttctcctgcccttggtcatgagagctgctggttcttgggcttctggatctgggactttccccagttcccccttgggccttcatcctcagactaggatttccaccatcacctcccctggctctcaggcctttgtgcgcaggggagtttcatcagcagcgttctgggatctccgggttgcggacggactgcatgaagcgattcctcataatacgtctccccacatccctctctctgcgtcctcttgcgtctgtttttctggagacctctgactcatgcagttggtgttttgaaaaaacaaacaattgcctttcatggacccaaccctggacgtcccatgacatcaccgtcattgtcccctgctggccaaggctgtcgtaagtcggcccaggttcacggggtgagggccctactcggcctcttgctggaagagtggtgaggtcaccgtaatgagaacgtgaggacaggagagattgctacagccctctctggaaaatgccatgtgtgacatcatgaaaggtgacgtggctgttgcccaggctgtggaccgcaaatgtccgggaatgaggcatgtctcccgggtggtggactcctgggcggtttcagtctggggcgattatgaacaaggctaggacaagcctgatttcacctgcacgcacgtctatgggccacggtcctggctctctggtcctcctgggagaccacaatgctgttgtattagtttgttctcatgctgctgaaaaagacataccctggttg

SEQ ID NO: 48082 - DNA, 4646 bp, Homo sapiens
tgtccaggctggtctggaactcctgggctcaagcgatcctcctgctttggcctcccaaagtgctgggattacaggcatgagccaccgttcccagctggccttaatgttttttatgtttatagagacagagaatgggggaagggaggtttcgctatgttgcccaggctggtcttgaactcccggcctccagagatcttcccgcagggcctcccaaagcgcggggattgcaggtgcgcgcggggccagcggccccccgggcgggagaggagggcgtggccggggggcgtggccgcggggcggggagggggcgtggcccggggggcagggcggtgtgacgcgcgcgccgcggatcccggaagcggtgtcagatgctggggagccgggcgggcgggtgcggtggcggcgggcggcgcgggggcacttgttgttcttcgcgaagtcggagcccgagcgccaggcggcggcggcggccgaggggagcgcgacagtgagcgccggcgcgaggacagcgcgtgcccgcgaggagccgccgcgcgcccgcgccctccgcgcgacgccaggtgaggggcggtggggcagcggggcccgggccgcggcggggacggggaccggggcgcggggccggggctacctggccgctgagtcacggccgcctgggggcgcgggccgagggtggcggggttgggtgcgcggggcccgagaccctcatgcggcccgcggcgcggcccgggcacctgcccaggtgggccccgccccgcaggcccgggggcttccccgggacgcgaggctctctcccctgcacgtgccgcccgggccatgcttgccgcgccgggggccccagggcgcggaccccagacctgggaggacgaggatccacgcgggtcggcggcgcgcatcgggcccgcgccttcacacctgcggggggcggggcggggcgggcgccacgtgcgggcggtgcggggagggcgcgggcgcgtggattctccgcggcttccgccccagcgtggcttccgcgtgcggccccggactgccccccgcgcttcctcccggtgacgggcggcgctctggcccagtggctggggtcacgcgtgcccgggaacggggtgggggtaaccgggtctccccacaggcgggatcctgggactggtgtcgctctcagccgcccacctgccagggttgctggaaggaaggccgtggggaggcgggaggggggcaggtgacagtggccccaaggctcgtccctttgctcacgtgtggggcaggggctccggcctcttcccgctcccactgcgtgagttcttctgtgcctctgtcaagttcaggaaactgtgtatgtgcccgtgactgtgtgtgtctgcgtctgcacagcctctagatcctggggggtgggaccaggcgccaccgagaaacccagaaagccaggaccccgcctggccttggcccttgacctgggtccgcctgggacacagcagtggccctgcactgcattctcgcgctcacaccgtgtgtgtccgtgttcgcggggcctcccgtgtccctctcctggtgtcctgcgtccctgagcatgctgttttcttgcttcttaagtagctcttgtagctgaggcagaaattagatccactcaccattcattcaccaggtgacccacaggcagccagccaatctctggccaggtgcctggccttgggaagatcctgagactcaaaacgccccccaccgccccccatcgtggtctaggggatatctgtgtggttcggctctggcagcgcccttcccacccctctgattctccagggtgggctgccaggtctctttactggcactgaggtttcaccgtcacggtgtgttgttgtaaggggttctccaacacagagtggggtgccctatgcagcttctccaaacccaatgtcttcagggacatggagcattaaaagagccgtgggcggggtctggagaacataggtgggctgtgcaggtgtctgggacacacctacaccctatttgggcgtccagtgccatttatgagaacatctccctttcttaggtaacccagtaggaatgtctgagtttgaccttgggagagggagtctgcttttaaaactagacctctcattattccaaaataagacatttattaaagcagaaaaaccaggcttctcctgccttttatccttgaaccgagccagggctttgaggggctggttgcccgcagcgtcgactccccaggtgctggtaaacccgggagccagcgtttaccgagggtcagggttgtcggggcgccagcctttgtgtgcacccgggaggctgctgttaagggagaccgtcttccgggccacttcgctgtctacaaggcgtgtgctttcacccacggggctcagcgatggctgcgtttgtttacagtctctggcaaagctgtttgccacccagacggagaagaagttgtgcctgttcttgtcccagctgtttctgagtctaaaggtttctggagtggactttctgggtttcgggtccagtccacacgggaaatggaaatctggccagctgagagagggctccgtgtggccgcctttcaacagtaaacagtgactcaccgctccgtccccaccctccctgctctccgcgaatggaagatgcctttccccgctatttatttttgctttttataagtcacagactcgtcatgtttccgctttcctacagtttcaggaaactgggagtgtcgtcttaaaatcatagagttttagagcaggtacaagcgaacttgagtggccacatgccccaccccccgaccagctgctgtagatgaggaagcccaggccatgaggtctgctggcctgtcccacaggccggtggggtctggtgtagagccttcctgcttctccgcactgtgcgtcgggtgtcctggggaaggtattggggtggagactgccctctccctgccctcccatgcggggccggctcatctcgtacagcgggggctagtgtggggtgtagggaagaccttctccctgcttgcaaggagctcaccatgccttggggaggccccctgtccccagaaggatctagaaccaggccttggtagagggtgcttgcctacgcgaggaggagagcagtggggagtgtttctggaagaagcagggcagggaaccacgtgctctctgcagatggtgatcagaaacctgaaacggcattggggtgggggagtcggggtttgggaggaacccccaagacttttgactgcctgtggggctgtgtggggggcaccaggatcagggtgagggcatcccatttggcaaagctgtggtccagacaggagacgctggaggccggagcctgggcaggtgctgtgggttcaggcgggtgatgcttgagggctgggatcaagcctggttggcgcgtggatgaggaaaagagagaggggcaggggcaactccggtgaatgatgcggttgggggctggggggcatctgggccccccggaatgcccctgactggacttagaggctgggagcggattgaagccccagggcggccgggggagaacaggatgctgatggggagctggaggccgaggacaggaggatggtgtggtgggagccagggcggggactggagggggtgtggtgtgttctgcagtctgctctctgctgctgcagctgcctgagtcacctctggatgtagcggaatgacacagcttcctcagactgcaaatgcaaggtgaccagacgtcctccaagccgggccgacagtcatggcttgctggagggcagccagccagggccaggctgctggctggtatgggccgggctgcggggtgccaagtggggtgcctcccgcatgcttagtggggctgtgtccgggacagccggacagtgggggccctcgcagtgtaggacctcatcctcagtaggaagggtgtctggctggtctctgggaccagctgggctgcaattagtcggttgacacctgtttgacaggcacccactgggtaccagtgccacagcggccccacctacccttgcggcccagtgtggagggcacccggcttggggtctctggcagaaaggctcctgggagaggcgggtacaccttgggtggcctctggttttgtggattgcacctgccgtgggagtcactggtcggggggcgggagggcgcttgctgctgtgctgctgggtttctgaacccgtgtctctcgcacagagctcccgtcctccgttcctggtcttcctcctgcccctcctccctctcccgcatcccacatcctcggagacccgcggagaatagaagtggaagggccactccgtcttggtcagactggctgggcagctgagggggtggggcatggagtctgtgtcatcattcaccccttgggcaagaacaagtgacccatccagagcccccatgctggcctcgtagagcgagcggcagccccgatgcgtcctctcatctgggaagaatcagagccccaaagctgaaatccccgtttctctatgggcatccacagccgggaccgttcagaggggtcatccagccgtcagctgctcaactcacttttgcactctctctttttttttttcctaaaagataaggtcttgccctgtcactcaggctgctggagtgcagtggtgtgatcacagctcactg

SEQ ID NO: 48083 - DNA, 1939 bp, Homo sapiens
tctctgcgaccccaggcacgctttccccctggatgacaccctaaggctgcgtctctggccctggggtgggagcgctttctacatgtgctctggcggccctggaggccatgtgaggtcggacagttcacaaaaccccatttagggcagtcgtcatttttagatcagttgctttacaaactttttttgtgcatacaaaactcttctctgaatgtccttccaaaagcaagctgtcatctttcttgcctctgatgtttaaagcgacattaggttaaggctacttggatttattctgtgcatggtggggagagggaggcgccagcaccatcccatcccgtgctgggttcctgagagaagctttgctgcttggctgggccgtcccgctgcgtcgtctctccaggcgcgtggctggtccaggcttcctcggcagagcagagtcgtgacctgcccaaggaggtggggggcaggcttgcgagcacagcgtgggggccgcctgggagccctgcgtccgccaggtcctcattcttcagagggccccagtgcaggtgtgcctcgaagtactggggttggagcggggcacaggcgtgcttcagtagccctggcaaccttgacctcctggaagtagtcagccacccctcctggggcgcccccggctaccgtgtgcctccgcagtgtcacagggcatcgcggaggcatctttttagtggaaagatccccacgctgaactctgcccctggcatctggccgagccccacacgtcaccgtgggtctggccagacggtcctgtcccccggaccttccttttccgcccggctgtgctgccacggcgggcagtgggcccgggggcccaggagcgggtccttgctgggtgggaggcccgggtgtgtgggaatgcgcgcggctctgtaaacatctggtgactcaccgcatagctatgtcgtggccggcctgtgcactgacgtgctcgcagtggagctggaagcggtgcccgcggcccctccctctgacatggaaaagtttctcatggtgctcccagccgccggcatttgcaggtccccacggtggcggaggcagctgggccccagcctctccactgtcaccctcaccccaggacgtggtgcgaaggagcctggagcccacctggccgtccccgggaccggctggtgccatcctgtgccatctacgtcagcgccctgagatcagctggccttggcaggggcagcggactcggcagcctggcgcaggaccctgtctcacctgtgcggccctcttgttgtgggggtttgtgggttgcgggggtggggcccccatcggaggcagggctggagggtggagggatttgggcccgagggctccctggcccagggtgtggggagggtcctgggctggcagggaggacgggatgcggtcacccgcccccatgatgcccatgtccagtggaggtgctgaccaaggacaccccccaccgccgtgtgctgctctgatgttcctgtgggaacctgtgtctggtatttggggtatgggagtgggtgctgtgaacccctgtcccgcgagctgcccggcgccttctgcccgcccgtcccggccgccgggtgcaaatgggtttgttgactgcctgccggcctcgtgatgtctgtgcaacctgacctgaagtcaggatcgcgtttgggcttctcggtttccatgacaaccgtgggggctggctcggtcccaaggtcgccatggcaactatcggagggctcatgccggggatgctttggctgggtttttcatgaatgattagaatgtgtgacacaatgcagacgtgaggacggcgggggcggcggcggggacgactcccgccagacggtcaaatgctcggcagggcggcggctcccccacctccctggtctctggctgcggcccccggacctgccgcccctcaggaaccccacaccccctt

SEQ ID NO: 48084 - DNA, 1437 bp, Homo sapiens
cataaggaccagggggatatttaaagagagaaacagaaaatatatagagatataaaattatattcacagtttatctacagatttttcgtaacaatctttcttttccagtttgatactgtaaatctatcagagcagagccgggggcacgggcacaggtgggagttgggagcaaagcggaggcccgggctgcccgccgtcccccttcatctccccacggactgtaccaggcagctgggccccgcaggacaggccgcagcgggtggccggttctgtcccgtcttggggttcttggtgtccacgtcttgtgggccgtgggcttctacctgcccttggcctgcagtgctttgctggagaagggactccctggtccccagggtggacggagccgctgtcaccgcccagagctgggccggggaagcacggtgtgttctgcttttcttttcagattgttgaaatttcattgtcatgatttaatatatggatttttttatttaagaaaaagacgagggactctttgtcacgtgggtttgttttctgtctccgtgcctccggcttcccaaagagatccaggtctttgcgtttccagggcgtggggaccccggccccctatgccgccacgccgccacaccgcctcaccctggcttctgtgctacttggcagttccatttcattatttattttttgtgctgctttttatcatgatataaattattgaaaacagatcacatgtgggcccgtgtctggccgccgccgccctgccccgtccctgcggccaccacctaatttattgccgtgcgtcctgctgctgtgactgcttttgtacctttgcaataaagaattttctggtttcagaccctttcgttgcgtagctggtgctttcagctggggctttcttgggccaagaaccacaccccccccccaatcccaggggaccctgcctgtccctcaccggggtcaggatccgggcactacgtgtaagtggctttcccggactgctgggccgtgaccgtgaggctgggacagccacgggggaggtgctggtcaggtgaccacgtcctgggctcagtctctgagggtcaggccgcagtcctgagtgtccccatctgccccacccggagccccctgtccatgcagcctctcccttccagtggaaggagcagagagcagcacggctgtcagtgttccccttccctgggagacatctcgcccagctttgctggactctcagaggagcctgcaggaagctgtgagcaagacagggtctgtctgggagcagagagcaaagcgcccctgcacagtggccggaagcccgtggactcctccgaaaagccacgggcctgcccgcatgccgtccccaccccgcccggccttccccgtttttggggctgagctgaccgaggtgtgaacgctgttcagtgctggaccacgcagggtgaa

SEQ ID NO: 48085 - DNA, 2429 bp, Homo sapiens
agcaccccctgaaagccacctcaccgcactggggtcaagggctctggacaaatccctgcagccgtgtggccctcgcgggcctacacacgcactcccaccccacccctgcgcacaccgccctggcctctctgtgtatctgagtctctcaggagggtcctgtccctgactccctgccctctctgcccagcccctgccctcgggcaccacttcctccttgcccctgcctggcccttccttgccacagcgcctggccgcttctctacctgggggctgttctgttcccacctggggactgctccgggtcgggggctgtgtgtggcttcgggcttggggaagttgcttctcgcccatctcctgcacaggagtcccggtccctctaacaagctgtgacctttgctccccagctccctacagagcaaagtccaaccccctgccaacctcccaccagccttctccagggtgtcacgcctctggaaggagaaggccccttcccctttccagctatgtgagcctgggaaagacctctggtctctctgagactcagtcttcttgtctgtgaaatgggaccacactgcagacctcagtgagccgagtgacgagcctgtgaaatagccaggggtgcccggtgggcgctctgccctcagcctggcagagatctccccattttcaggcccagctcccacatgccacatcctggggaagctcatcccctcccccgtgccctggccgatcccacttctgacagcgtctatagcagcggcacccagggggaccgggctgagccacggccacgtcctgtggagaccaaggtcctgaaggaggctcgggggcggaagggcttacctggtggcaggtgagcaccagggcagtccacacgaagatccccgagacgcctcgggccagtgcggaggtgaggaagagccagggggccccctgggagctgttccccatgtggtccatctgcggcccagctggcacagccggtggggggctgggctgcggccagttcgctgacaccagggggacgccggctgtctccaggatccctgagacattactcatctgcagagggagggaggacacacaccgggaggagtgagggcaaaggtactggctcccggcagcaggaagcagcgggggagggaggagacagtgagacgggagctgaggctgagccacccaccaggccgcaccccccacacggacaccagcgccaggcccggctccctccctgctccgagctcagccatcgaagctcacccatcaaccacctgcgacctgagggtcccacctcaattcccccttgtaaaaccagcttccaactccgagtctcaggcttgcagggagcctgcttcttaggggacaaagaccgtcttccagtggggcagaagagggggaacccctgccgccctgcctgcccgggagggctggggagcgggcgcagaccagcactgcctgccccggcaggagggggtgtgcagccaccctcatgggaggagccggccctcactggctctgggacctgtccacccacctgggagcccggctttgctggggttcttggcagccctgggtgcctgttccatctcccactaacctgctggggccctgagtccaccctctcccacactcgcagcccagtccagcctcctcctctccctctggtctgcggtcacagggcccagctctacctttgctggcaggaagcacctggcccagtccagggaggcctggcctccagggaagcctagctggtcattctcatggccacgtggccccaactggaggccccactgtgggtgcggcaaggccaggatctgaagggctgtgccaggctggggcggggcggccagtgcctcacgtccccagtggcccacctgggccccaggctgcaggcccgtcccctcctgtcccctcccacggctgacaccctatcctcccggttgtttgctgggtggcagctggctcccaggaacctgctggccgcctggcgccctcacctgcctatgccagacggccaggcagctgccacctggtggggacacgtgggagaggtctgcggcaggccaaggagggccgggctgcaggaggaggggtggagagctaatggtacagggtttctctggggggtgacaggagtcctgaaatgaggtagaggcggcaggcacacagcactgtggatatacttaccgccaccgaatcgttcacttaaacctgggtaaattgatgttatgtgaatttcatctgaattaaaaaaaaaatccacgccccaagagatgagttgaaaacatttgttttctgggccgggcgtggtggctcacgcctgtcatccccacactttgggaggccaaggtgggtggatcacttgaggtcaggagttcgagaccagcctggccaacatggtgaaacgccgtctctacgaaatacgc

SEQ ID NO: 48086 - DNA, 1874 bp, Homo sapiens
gtggggaccccgcacaccacctccgtcttctgcttcgatatcaccaacggcgtgtcttccatggcggggctctgcagtggcagctttaatttaggttaaaaagaaaggggaaaaaaaggagtcaatcaaacagtacagccttggggctcccaaaaaagtagcacggggcattgaaacggaaacgcaaggaggcccattcaaaagaaggggccaggcgcggtggctcatgcctgtcatcccggcactttgggaggccgagacaggacgatcgttgaggccaggaattcgagaccagcctggccaacatagcgagacccccatctctaccaaaaaaaaaaaaaaaaaaaaccagcagggcgcgcctgtggtcccagttactcaggaggctgaggcgggaagatcgcttcagcccgggaggtcgaggctgcggtgagccgtgatcacaccattgcattacaacccgggcggtagagcgagaccctgtccgtaaaaaaataaaacagaagcaggagcggggccgcccatagagaccgcgcctggggctttctgggttaggggatcgacttgcacgttcacactgccaggccgggcagtggcttcccgcccctcggcctcgccgccgccccggccctgcagccgcggcccgggacccccacgacacgcggtgccgaggccggccgggctactggggacgcagccgcccggggaagcccgcgggtacccgcgctcaccaagccggcgccgcgcccggaagtggctctgcgtgcgccacgcgggcccgccccgtccgcgggttccgtccaccttccggaagtcagggccgcggcgcttctggtcccggagacttggggctcccgggcttctgagcggctcgggttccgcgctgccggcagggcttgggggcgccttagagccgaaccccgttttttcaggaaagggcgctgcgaccacccccgtcccgggcctcagcccctctgctgcagaccctcgggatcgtcgctggtaggagctctgtcccccgtgtctgtgtccaggacccccgaagcgccgcgcctaggaaccccctagcgctgggagcccggccctgctcgaccacgggctttgggctggaggcgtcatcgtcgccacagcgaacgcttatttggcaccgagtgtccgccaggcatcgctctaagcgctttatacccataactcacttcatctcagccacccggttccgtagaagcgtttcatccgcgttttacagacgtgtgcaggtgcagagagctcggccaggctcaggcggcgggcgggctggggtgggctccgaccgtccctcgggcgctccgtgacacgaagccccggccaaggccaagaagggggccagccccaccctgaagcgggatgagttctggttcctcccagggaccccctcactccctactgctcactctcagtttctccaagctggaaggttttttgttttgttttgtttgagacggagtcttgctgtgtcacccaggctggagtgcagtggcgcgatctcggctcactgcagcctccgcctccctggttcaagcaattctcctgcctcagcctcctgtgtagctgggattacaggcgtgcgccaccaggcccggctaactttttaaatttttagtagagatggggtttcaccatgtcggtcaggctggtcttgaactcctgacctcaggtgatctgccttcctcggcctcccaaagtgctgggattacaggcgtgagccaccgcgccccgctgctggaagttttattggtagggtcggacatcttggtagcagaggctgaaagtgattggagcctccagagccttcctcggggtggggcgtttaacatcccttcagaaccccaccctcg

SEQ ID NO: 48087 - DNA, 1225 bp, Homo sapiens
agtgtggtagaggctcggggtcggagggcgggcggccgtcccgcgggctggacggagtttctgggctgcggagaggccgttggacccacgtccggacaggagccccgcgcgcccatccccggcccggccatcctcggggcgcgctgtctgcggcctcccgcgccacccccacccctgtcccgggacctcctccgggaaagacacccggggagcagccccctcccctccagtagtcccctcccctcccctctccctgccctcttgacggtgtggggctccccggccggaggggcgcggcgctggcagcggggtccagagtgtcgcgcccagcgcgcgctgggggtcccgggctccgcagctccgcacgcggccggtttgtgaagcggcgcgcgggggcttagccgggcgagggcgctcttgagcctggtttggaatttttagcccacacgaaagccgcaggctggggaaggggcgggtgggagcgggagacgccctgggaagccgtgagaccgctcggcgagggctcgggaccaccagggagcgacgggggacccctcggctcagagcccgagggcgcgatttcggatccgctgggattccggaggcacatgaagggagagggaaatccgctaaaccgaaccttccgggaatcggaaggcgccgggccgctcccacgcctccccctcctcccggccgaaaggcggggggcgacgcgcaacggggagggaagggagggaggggtcggcgaccttaggggagggcgagtctctggggacgcggggccgccaggggcccgacgaccctctcgctccacctccccgcccccaagtgccccgctctccccccgccccgcaaacgcgcgtcctgcgggctgtgctttggccctcgcggacgcgcgcgctcacagagggtctgacttggggtcaacttccacgaggttgccgggcgcctgtgagcacagccgtgtccccacccaggggcccacctcccagcgccaccagggtcccgacccccagaccttcggacgcttctcttccaaaccgaagcctgggagcctctgggtggcctggggcgggggcagggggcgagcggggcgggccaggaggagggggcgaggccgccactcggcttcccacgccgcccccgcggctggctccaacttcccctccggagcccccctccggccaccccccagcccaccgacgtgcgggcagcgaccccgccc

SEQ ID NO: 48088 - DNA, 512 bp, Homo sapiens
acatgaaaccttccatcacgctcagaaagaatgtgctacaacctcggcgctgccgcggccgccaccactgcgcccgcgcccgagcccgagtcggagccggagccgccgctcccccgcctgcccggccagccccgggctccgagcgcgcggtccccgccgccgccgccccgcgctcgccccgcgcttgacgcagtgagcgccgcagcctggctcccgccggctccgctgggctccgggtcgcaggccgagtccagccgggcgggctccgggaggggccggcagggcgggagggggaggagggctgtctggagccagcgagcccggaggaggaagaggaggaggaaggaggggaagccgccgccgccgccgccgcgctcggggaaccggggtgcgcgcgctctgctcgcccgcgacagtgcctccagcccggggcccgcaccccggcccaggtaagaaggggcctgaggggcagggggctgtccggggccgggggacccctctgtcgccgctgc

SEQ ID NO: 48089 - DNA, 1765 bp, Homo sapiens
acccacggcgagcgcaacacattcgcccgcccctgcggccccatctgagggcggggagaggtcgctgggggcagcttcgggggttgtggagggcaggggggacccgcgaagctcctggagcgtttagggatgcagctcgggcggcgtgtgcagggaggaagcagcgtcccggcgtccccccttcagcgtcgccttcgcgcgcctcgagggcccaggagggttcggtctcccccaccccacctggacactcaggtctgagcctgagtggatttgaggatctgggggacggggaatacggagtccttcttcctgcctcggtgtctgcagagcccagccctcaggcagcgtggggatctttgtccccagggccagcgccggccccgccccccgccccgttaactccgggactccgccgccctccaggttccaacctcccagcttcaccgccgcgtcctctccccggttctgggtctgggggaggggcagggggcgtggagcgcggcgttgggccccggacagatgtcctcgcggcggcggcgccggcgtccgggtaacagcaggccgccaatcggcgcggccacgggggaggggcgacccggccgggactccggggactcggtcgcagccggacggcgcagcctccgctcggggtggggggggggggcggccgcgaggactcgacccctgccgtgcagcccggcctccagtcctctgccgtcccctcccccagctccaggtttcgctctctgctggggtcctggctcctcaggttgcgggatctcgcctcccacggccccgcgcgcgtacccctacccgcccctcaagttgacctctgaggttctccgtggatctcagaccccgagtgaccgcagaactgacctctggggtcaggcagtaccggtcaagggcgctctgaagaggccctcggcctcagtttgcaccccgaggaaatggactcatcatgcctgctcctgggaagtagcaggacgtcctggcgcggctcctccgggcaggcgcccagcacagcgcagggcacacgggggacacctgcgaaggcaaaggaggctcattccagagcttcggctgcacttggccagcacaggcctgggggaacctgctggaaatggggatccagtacctctcttggggtttatgtttggcaggcggagtggataggctggggcccggagcccggtggtcatcttctgcacaaggctggccaggccagaagctggagggtagcttactgggaccttccaagcgtgaccaaggaagctctgggggccgaccagcttctccctagtggagctgcagctggggagacctcacagacaggcagggaggagagggtgccccgctcaccgccggcctcgttccacaggcccaggcctggcacatcccaggcttgcagtatctatctggtgggtaaacaaggacctgctcttggcctgcggcctggctctgaccgtggtccaggtcggggcagagggagaaaggccacagcttaggtgttccaaaccaccggtgcccttcctgccggcccctggggctgtgctgggtttccagggcccctgccccccagtatttgcatgaaatcgtgggggcgcactggctttcgtcctagcactccccttcaaggctctgcacccctatcacgggagccccacccagccagccgaaggaggccacaagctctaaattactaaattcgggccagtgctgggggcctgggagccaaggcagctcagagcccactctccgattc

SEQ ID NO: 48090 - DNA, 1178 bp, Homo sapiens
accgcgaggacgccccctgcgctttctaggacctcccctccttccccagcccctgcgcgtcgccgggagagggaaggagcgggttgccgcggggagccgaggagagcagggggctcgggaggccagggagagaaggggagggccagaggctccgagccggactcgcggcggaggaagagggggtggaagggagcgcgcaggcgggcgagggagcgagggagggagagaaggagggagggagggagggaaggggggcgggagggggcagggcgagcttgaattcccccccggccgcgcggcgaggggcggggccgcgcgcgcagatcgatgggcgaagctggggaggaatttcaatcccgggagcgaagttagagcttgaaggacggcggcggctgcgggcgcagccccggaaccgaggccgggcgggcaggtaagcggcgagcgcggccgggcgctgaacctgggggacttgggacccggaccacccccggggagcggcgcggccaagccccccgccacctcgaaccccgggcgtccccgagtgcgcagcgtgcgcccccagcccctgctgcgcccccaggcctggcgcgcgatccgagcgcagcgggcaaagttggaggaacttggcggcggcggagcgggcgcaggctcagcccgacaaagcccgggggcccgggtcggggtcgctgccgcagcccgcacgctgccccgtgcctccgagaggtcccttccccagcgcctctctcccttccgtcccccttcgccgtccgcaccctgcccggcgccccccagacgcggccccctgcccttcccttcccggaaattagggggctgtcctcacctcctggccgagtcgctgacccctccccaggctcgcatcgccctccctgctgggccgccctccccccgacgctgcgagcctcctcgctccgcgcggggaccgtccagtcacgcacggggaggggtcacattcctcggtcccagcccctgagtccaaccactggcgggggggtggggtggggggcttcgctccgaactgaacttactgggtgctttccacccctcgccccacctggagtccatcctcgtcctcgtccctctgggggctgggaggaggctgccaagcctccgtgccccaacctgcctctaaagacaagcgcccccatttccatcctttg

SEQ ID NO: 48091 - DNA, 1433 bp, Homo sapiens
tgggacgcattgtttccgagatcccttctagggacatccttttgtcactcagcgagttgaagtttcccagcttctaaagcccctgcccctcccctccacttcctgtgttcaaggcctggtccctagaagttgcttttatccaggcagtgattgagagtttagaaggggctctctggtatcctgtgaccctgggtgaccttggctggactccttcagcaccagggagagaggccggtggctgtgataggaggcagaggcctgttgaaggcagcagggcctgggagcccatggaggtgagcccagaccctctctgcaagccccttcccctccgtaggtctcggtttccctctctggggaggggggggcgatgtccttgccagcagaggtgctgctcaagtgcagggctggcatcccagcgactcgcccaaggccacctcgccaatccccgcaccctgcgtgccactcccccagcactgccgcacgcccggctcccctcccccacctctccaggagcaattgtttatctgccagagggtgacaggcggctgtggctggcatgttgagccgccgtccagagatcagctggcggctgctgagcaaacagcacgagctaatcagcaaaaggtcacgccggctccccgagtccccgcatttgaagtcatgcctcacacgggcgggctggaaggaacctgggacgttgagttagtggctcagtgaccaggtcagcttcaagtcacagcccacagctcatcgcccagttgaccagcctacgcctctgaggttgcatcttctagagattccccagccccaagggaaacccatcgcctgtctccaggtggaacaaaccctctcacgacagaggctcagcccccagcatgcggaggggccaggcttaaccaccccagccctgcccgctccccctgcccgggacagactgtccttcaaagcagcagtgcagggctgggcagcatccccaccagagctgtccgttcaccaccccccacaccacctctgacttcaagcctaccgccttcctctaaatccattcagtttttaaaaacttaaatacatttatttaaaagggaagatttatagcactactacaaatggaaaacaagcctctcttgccataaatagaattcataatcataaaaataaattcagtggaaacaaaacaatgttattaaattctagttggatgctgtagccccgggggaggctcagagcccaaggcctactattgctttattaaaaagggagagcagtaagtgtgcagaggtgttcaagactcaccaaccctgatctgagactttcttcttgttgtaatcaagagttttaaagtgagagtaactttctcataaaatgattcagtagtattttatgctgtgtcagctagggactgaatttggctgcgcaagacaaacctaaacact

SEQ ID NO: 48092 - DNA, 617 bp, Homo sapiens
tcagtttcctcttctggaaaatgagaatgatcagaagactttccacgtcatggtatttctatgtgtttaataacatgtttaaataaacacgtgtcagcacttgcaaaattaaacattggataaaacctgtctggcattactgtaatgagctctctcatccctgtgaggtagctgagaggcacagaaagatttagcaacttgcactgggggagggagagccggtgggaggcagttacatggctgatcactcactcaccctcctcctggctgcccaaccaggcctgatgttttcagggagctacaggggtgtcaccttggagagggatgacctcactgtgtaactcagggaaaatccctttccctctcagggcctaagtgtgtgagtgcaagctctcagggggcagaggccaatattgggagcgtctcttgatgtgactccaggcacgctggaaggcacacacaaggcagcgaacttgctggacagtgcatctgccctgtgccatgccctagcgtggcgtctggcacatagtaggtgctttaaacgccttgtcggctggaagaagaacagctggggccttaaagccatcagcctgtgagatgaaggttcagcttctcac

SEQ ID NO: 48093 - DNA, 493 bp, Homo sapiens
gctgcatttcaactctgcaactaccatgccggtaattaagccagaggaagcggcgacagatttcacttttcacagacacccttcccacctgtgctcccgctccgtgtggccgcagcccccgtggccctgtggaaacccagcagctccctgcggctccggccctggaggcctgaggtggccttgcctccaggagcccggcctcagccgtcacagccgggcttggccctgcacttaggatccaaagggcaactcttggcagctggaaaggttctcccagtccacaggccgccagaatcccttccggcgcatgcctgcctgagctgccacaatgccgcgtgctcactggccccccaggcctgtcccaggcgagctgagtaactgcagccacctgagccccggcgagggacagacagctatgcttcttcaggtccccgagggaggccttcgtccttcgtccatcgctgggcccatcatttactgagtagctactgcc

SEQ ID NO: 48094 - DNA, 1125 bp, Homo sapiens
caccctgcaggccatctgcgctccctctgtcccctgtcccgcgacagagaggctgacacctaccccgcagggctgcctgcagggtcagacatgcacactgtgagccccacggggtgctgcaggcctgggactcaaacactctatagagaggatcggggccacactggggctgccgcaccgtttcccagatgacaggtcatgcccagcggcctggccgatggccctgagccccaggaagtgaggcccctggtccaggtgcaccaggcctccccacagcacctgctcctgggtgagccctcaccctctgcgctgcggcttccccgtctgtctctgctcccaggccctgagcctcagggcaggcagctcctcctgttcatgtctagcccatgtctggcatccaacagtcgcctgcgacaccgaactgggctcagctgaacgagaggcctttctttccagaacaggatccaggctgaaaatcacctccaggacgcagcccagggcagaggccgctctctgctcccgccggctcacactcacacgggcaggtctccagggctgtcctcctggctgcggactcctgggcactggaccgtgcctctctcatctgcccccagcacagggccagacacgggtgatatggagaaacgcttgctgaacgaataaacacaggaatgaaaagccagctccgagccttctgtgtgctgagatcgaactccacagtgaggatcgttctgtttggagaggacaccgcgatggacgtcaataaaacgtcaacgcttccagtcaattcaaacacccagggtggggggcgcgtcagaaggagagaaagccggaaactgtcacggagagagagatggccgtgatctttaatccagaaatcccactttggggactttatccccaggtgagaaacggagagaagaaagggcccagcccagcaatgacgcaacgagtcacacagggaagggctgcatgccgagccgtggaggagcggggaggagccccccgtggggctggtgggcccggttccaattctggtgcagcctctcctgcctcagtgtcccttttcataaggggggccttgacccccaccgtaaatgtgtgcagggagcctggctcacaggc

SEQ ID NO: 48095 - DNA, 1630 bp, Homo sapiens
tgatcctgtgagcttcaagcatgaaaacacagtgcatgtcacacatggggaaagtgggtaagctaaaagcaacctcgttccctgacactgtccacctgagccagcccccggaacacggcccagagcaggcatggtgggtggccggaagggtggggagcggggcctctgcgggcaccaggccttgctggtggagcactgggccagtggaccgtctgtccttccggaggcggctgcctcagctccatggcttctgacccagcacatccagccctcaggacctgcaaagtcacattcacacgggccttgggccaggacaggccgtggtccagaaggtcaggtcaggccaggcctgccactggaaagaagggacagcaagggctggaggatgggcagtgagggggcggcctggggaggcgccaaggctccagatcacaagagtctaggaaggcgggcaggatgcctggcaagagctgcggggcccaggccagacccctgcaggaaccacggctcctcagggcgagcccggcctcccgtacgctgtgtgtcctttaggcctggggcgagcagggctggggagctggccagctcctgggctctctgtccgcctgcctcctcctcctggggcccccttcctgcctctccctgacctcaggagcctgggggctgagagggctccaaggcggaaaggagggcaggggttcctgcccaggccatgggggctgaaagtccggccactggcaagctgaggccagcccaagccttctggtctcaacatcctgccatggctgggatcctgggcgggcggatgagggccgggggagctgagatgctggctcgagcaggaagagcggcagggcccatgctcgagggtatgacggggatggacctggtgtccagcaaacctgaggacattgggcagggctgcgcttcagaagcccatgcagggcttacagtggtcaagatgctacttgctgacggtgtttttaaaaagtgacacaggagcacacacaatggaaccccaggatcccgagttcccaggtgtaaatgaacatgcctaggcatgtgcctacgtatgaaacaccgaaaggaaacacggcgaagcaggacagcggccacctttcgcgggaagatgacgagtggcttgcttccctcttttggattttcgacactctcaacagaaaacactgtggagggtgccccaaggttccgctgcagttagtcttcctaagattcgcttcaactacagcacacgcagggatccggggaaaacgctgcctcttaatttgtaaatgttgatgtaacgagtgatatgttaagtgataactgttcatggtacacctttattaatacctaatcattttagaaacctatggaattcgtataatgcattaaacacctctgtgaattattcaaagtatacagaattatacaaaagcgaagaagtacatttctgatagcttaaagacttggtgtgtttttattattcaaaggtttgagagtttcaagagtgtagaaatggatgactgtgatctgagaagcaggaaatccacaaggaacgcagagcaagcccggcacggtgcccccgtgcagcgcaggctgtgaagacgggcgggttgtgcagaaggaggag

SEQ ID NO: 48096 - DNA, 988 bp, Homo sapiens
tatccttttttggaagctttttgattgtggattcagttatttaatggttctaggattaatgagacgatctatttcatactgggtgagttctgcagtctgtggttgaagcttgctggagtttctgtcactggttgggtgtttgccctggtgctacccagtctggacttggggacccctaaaacctgggagtgagcacaagacgcacacagcttgtcaagagaagcctgagaggcagtgtgggaaattctgtctgtctccatcctcttctaccctgacacccaggcaatcctgcgctcttccgccccggcaccctggcacccccgcgctcttccgccccggcagccgggcaaccccgcgctcttccgccccggcacccgggcaatcctgcggaggtacagccacagctggacagacgcctagagcccaagagtgggcccctccctccagacagggtgcgtggggcatgtcctgccctgttccaacgctgtggctggcgttggccgtgaaggcggctgtggccgtgggactgactgcacagcacagtgggcaagccttgcctggctctgtggccagaaggcagtgaagggaaccctgggtcacctgggaagtgctgggtgctcagagtggctctggaaggtgccctctaagctgggcatggggctctgaccctaatcagcaccccacaggtgtgagagttggactctgagctagaccacaccaggacccagccaggactgtggaggacacaaggttcaatggcctgggaaactcggcaaagagcctgaaatggaagtgccatcaggaaatgctgaaaccaacagaaatttacattctccagagaacttaagaaagacctagaatctcgggatattcaaaacatccagaatgcaatctaaaattaagcagcatgaaaagaaccgggaaaacagaaacctgccagggaaaacacgaccaacaggcgccaagatgacggagatgctggaattat

SEQ ID NO: 48097 - DNA, 504 bp, Homo sapiens
atggcaggacccaggcagacgatctcagcttggcacaggactgggccaaacaggcatggtcctgcacttcagacgccagcccttcttctccaactcccactaactgccgaacagggctggagcccctgcacccccatcccatttgaaccgctcagctgtcggcattgcacggtgtttgtactgagcaaacagaggcgtgggcaggtggcggccctgcccaggtggcacggggtgggggcatgacgtaaacacaggcctgtgccacgtgagagctgggcactgatttctggccgtgggagggcacagctggcttggcactgccaggccaatgggtagctctccacagtgcttgtcctggtggtccacggagcagccattagggcacctcactgaggccacctgtggggccagcgccagccaagcaggaaaagtgtgagtcctgagactgcagaggacacgcgccgatacagacagaagcagtgcacaggacgcaacagaaaggca

SEQ ID NO: 48098 - DNA, 1390 bp, Homo sapiens
accggcgcttactatgggctcatggcaggccggcccaccagccacaactagggaacagccaagcgcgtttaaaagccaaaggtagaacttctgcagctgcacagtttctgagtttccatttaacaagaaccttggcctggtgcaagcagaggcctgagctccccaggctgccagccccgcagaggcaggcccgcctggaaggaggctccacagcccaattcctccattgcccaaacgagatcagggtggcccttgccatccccgaggggaaaccgggcccacacgcccccttcctgagagcggaccggcgcgagccaccaggatgccaagagcccctgcagccccgacttctccaccaggcgccagctcaggccccttcctcggcgcgccggcaccctagcccggggacccacacggtaggcagcgggaccccggggctgggaccacgagcacgcgcccctcggccgcccgccctggcacaagggacggctgcggagacccaggcgaggggcccgctgtccccagcacagcccaaagggggagtggggacaggggagtggggagaggaggggagagcacagagaggagagcgcgcccatgggagacggggcgggcgcggggtcctgaggcacggggtctgggtcgttgtgccccaccctggcgagcacacccggtccgggccctcggcccctcccttgccattcccgggacccccgggaccccgggaccccgccgcccgcgcgagccgggccgcttacctcagccgctcgcagccagcttgccgccgccgctcggatctccctccgctccgccggcgcccatttatcgcgacacttgcgcctgcgctctcgcgagacctgcgtggcaatcgggccgtaaagaaccgagtctgcgcaccggctgatcctggggactccgcgtccgcacccggagccgccacccctgggagactccgcacggaaaggactcggaaccgaaggctgagccaaggcgcagtcgggggccccccggctttgcgcaggacgcgcttccactaaggctttcgcctcgcgccgtaatgtgtggaatagccgcgcccacggcagcctcctcggacaaacttgcaccgttgactcttcccaaaattttgctactcagtatcagcttgaatcaatccgttattttgcttttttctgggcccactagaaatgcaatttatgctactaggctaccttcccagtgctctgcaagccagggcacagcatccaatggggtgaggtcaggccccaccattattatggtaacctttgtctatccttcaaattggagccttcctgagaagagtgtgccttactcgtttccatattctcttcctctcctcctcccgtctctgcccagcccctggcttccc

SEQ ID NO: 48099 - DNA, 1209 bp, Homo sapiens
taacctctgggtctcaagtgaacctcccacctcagcctcctgagtagctgggactacaggtgtgcaccaccatgcctgggctaattttttttttttttttaattcttaaaaaccttttttagagatggcatctcactacattgcctaggctggtctcgaactcctaggctcaaacgatcctcctgcctcagacttccaaagtgctgggatgacaggtgtgggccaccaagcccggtctctatgtccatctttctgatttaaataaataaataaaagttaccaccctcatggctccaaggccaaagcttctagcttctgcaacaccaaagcgtgctgacaagccaggaggcactgactgctgaccgtgagtcgctgtcttcccctcgcttaaggggtctcccgggaaaatggcacaagccggtcccgggggccagggcccactcgacagcccaggaagcgcgggcaatggagctacccggcccagaagcgaaatcccgccccgggctcgcccccggcgccttggatctgggccccggcgctgcgccccccacctggactccgccgccggccccggcctccccacggccccgccggccctgcccctggagacctgagggcgccctcctcccggggaactgcgacccggaatcctggcctcgcccctgtcgcgctcgctgagtgcggggacggtgcccagcgctcggcacccagccccgaggccaggaccgaggaaggcgaccgggcggacccccaaccactcccgctgtctgcacgcgcagcagcagcgcccagctcaccccgccattggtgttccccgcgcctgcagcgcgccgccggaagtgcctggcctcacttccggtcagaggccacgcccccggaagcggcggtgcaggtacgaaaagcgcgcgcggggattccaggagtcgtggtgaccagggaggggagccgggccagcgggcggcaggagactaggggagctgagccatgggcttgggggagagcggggccgggagctcgaaggagaccagaagagcagggtcgggggctcgagggagacgaggagagcggggccgggggtttgggagagagacaaggagagcggggcggaggcttgggggagaccaggagtaaatcacaaaaatttactttggaaaccgtggcttctggcagaaacagatcagtgtcgggacaaagtacacgggcctggtg

SEQ ID NO: 48100 - DNA, 1531 bp, Homo sapiens
gagccgagatcgcaccattgcactccagcctgagtgacagtgagaatctgtctcaaaaaaaaaaaaaaaagaaaagaaaagaaaaagaaaaaagaaaaagacagaaatacaggccaggcacgatggctcatgcccgtactcccagcactttgggaggccaaggcaggaggaccgcttgaggccagaagctccagaccagcctggacaacatagcaagatcccatctctacaaaaataaaaaaaattaccgggcgtaactgcacgcgcccgtagtcccagcactttgggaggctaaggcggaggatcacttgaaagagagagaaaagcagctacacatctatagattcggttcacagatgagaaaacagaggtcccgagaggtgaaattactggcccaagaccacacaaccgacaggagcttgggagagaggatgtggctaggaaaggcgcccaagtccggggaagtggcccccagtgccatcgctcagcgtgaccaggcagggcagaagagcagggcaccaggaacggggcgaggaggaaactgtccccgaggacgcctctgagagccccgggaaagcgcctcggaacgcggccagctgtaacctggacagggctctcccggcgcaggagggcaggggaccccgagggacggaggcgcgagagagcacggggacccccaaaggacaggcgcgcaggagggcagggggacctccgagggactggggcgtggggccgaacgcggggcgcgggggcaggaaacgagtcggggaccaagcgcggcggctgagccccgtccgccgggggtggtcgggccgcgcgccctgggcaggtgggggctaccgccgccccacgccctacctgacgccgggggatccgcctcctcgtcagcctccgcctcagctgccgccccgactgcagccgcgggcagcgggtccatcgcgcggccagtcatgtgagcccgcgctcccacgtgacttcctcccgcgccacccggccgcgcagccctgccgcgccgcgccctcgccccgcccacaccccgcctggtcacgccccctcccccgcgcgccacgcccacagtccgcccctgcgggcccgccgcgctcctcgcccggcctcgccacgcctacaacccgcctagccacgcccacatgcccctccccgtccacgtggacacggagcctgctggtggcgcaggttacctcccctcaggttggacctccggactcgcaggtgcactacctcaggcgcaagcctgcacccaccgcaccctcattcactcccatctctcctcgcccagtcacgcccttgttcgctcattcaccggttacactggggttttctgactcgcacttcctcattcatccactcacccactcattcgctcacccacgcactgcatcctgcattcattcattcacccactcactcactgcatcctacattcattcatccactcacacactcactcaccgcatcctgcattcatccagccactcactcactcactgcatcctgcaatcattcacccact

SEQ ID NO: 48101 - DNA, 2731 bp, Homo sapiens
aaatatacataaaatttacctttttggcattttattttattttttcgaagacagggtctcgctatgttgccctgactggtcttgaactcttgggctcaagtgatcctcctgtcttggcctcccaaagtactgggaagagaggtgtgagccaccgcgcagggcctagccattttaatatgaagtttagtatacagttcagtggcatcaagtacattcaccatgttgtaccatcaccaccgtcatctccaaaacgttctcatcctcccaaattgaaggtccgtccccgataaacactccccactctccaccccagcctctgggtaccacctgttttatttatttatttaattttcgtagagatgagggctggcgtgcggggggtggtggtgctatgttggcaaggctggtctccaactcctaagctcaagcgatcttcccacctcagcctcccaaagtgctgggataacaggcgtgatccactgggttgttttctaggatgattaagacatcccccaaccagtggttgtcctccactccggcaaaaaacaagatagaagccacatgcacccaatgcccgtcccgtgagcacccgcgcagagcgaaccgctccggtccctccggagtcagcctcgagctccacgcggcgaggacccgcccccgcccccacgtgacccgcgctgtcccgcgctgaaggcggcggcctcggatggactgaaccactgtgaaagcccgaatggggggaaacaggcagtgacggccgctagggaaggactgggggtaagcgattaaagaaacttccatacatttttgtatcgcgccaggcagtcgtccttctagtcgtgtgggccctctctggctcgccccgaattccttttctattttgaagtagtctgtccttttgctcagtcagtaggcgagtccaagtgacagacacggacaggggggactttagtaacgtaaactaaacggtttccctagcgaaaggctcagacgccctgagcaatcgcctgttgagtctccactcttccagggtattaactgttgagttagaggacattttcctagcattccgggtactaaaatcatttcttgtccccgccttcagctccacaaatagttcagtcccgccccgcagcgtccgacgggaaaggaaagggggaggacgccatgttggacggaaccatctgctgccacacatggggtggtcaatgctcccatgagtttactgatgcacagaaacaaccttgctgaatggaattaagcactttcttgtcacaaatatatcagtttgatgattttcgggcgcggtcttgtggatgcgagtcctctcagggtcgttcgtgaggccccagggcgtgggtgcgccccccgccccgcggccttggtgcggcctccccgtcgcacgcacatggctgggctgtagccgtcgcggcgcgcggtgcggcctgggagagtcggaagcgcggcggccgcggagccctgcgagtaggcagcgttgggcccatgcaggacgcggagaacgtggcggtgcccgaggcggccgaggagcgcgccgagcccggccagcagcagccggccgccgagccgccgccagccgaggggctgctgcggcccgcggggcccggcgctccggaggccgcggggaccgaggcctccagtgaggaggtggggatcgcggaggccgggccggagtccgaggtgaggaccgagccggcggccgaggcagaggcggcctccggcccgtccgagtcgccctcgccgccggccgccgaggagctgcccgggtcgcatgctgagccccctgtcccggcacagggcgaggccccaggagagcaggctcgggacgagcgctccgacagccgggcccaggcggtgtccgaggacgcgggaggaaacgagggcagagcggccgaggccgaaccccgggcgctggagaacggcgacgcggacgagccctccttcagcgaccccgaggacttcgtggacgacgtgagcgaggaaggtgagggcgcccggggcggggctggcgagcggcgcgggagcgtggctggggttcccgaggtgggagatatcgtcgggctgtgccaccggttcgtgcagaagttccagcgagggtgtccgtgtgttcctgagaagccaccgagggaggggttcccgagtgccctggaagtgttctgagagcccagcgcctccccttttctttcctgaaaaaggggacagggtggagctcacttcgggagccaggcatttgcatgacaaccagaaatctgagagggtgggagagggcacatggggtactccgttatggctgggtgtgctgtgagtgtagcagctgggggtacggcaaaaaccgaagacccggtggcaggtttgcgggtctacgtgtccccagagctgaccagtcagacctcccaaggtctggatcggaggaacagcttgtggcagagccggtgattttgtcctcctgcccctcagaattgtccatctccagagacttccttagtgggacaggcaccctgtgaaattccagtttgatttttctttatctcttgcgctaaatctataaagagagttatttttccaggttttaatattgccgataacagccagctttgccttcatctcaaccttgattggatttacaggcatatttttgcttcctgtctcagagattttttcctgaagctacttctgatgagagctggtctcatttgtttttcttttgtttttt

SEQ ID NO: 48102 - DNA, 1774 bp, Homo sapiens
tggacgacacggtgagatcctgtctctaaaaaaataaacaaacaaacacacaaaactacattgatgccaagaacaattactgcatgctcactatgcattaggcatcttgctaagctctttacccgtgtcatctcgtttgtctcacatactccctgaaaggtagggtcactaacctattatattttacggattggcgacaacctcagagaggttaagtcacttgcccaaggtcacacagcgagtctcaagccccagccggtgagcatcacgatcctttgccaatgagccgatgctcgagaaagggtcggatagacaacaggcactgcataaaggttggttaacgggatcgtgtttggctgcaacgtggagctcccgggtcgaacggcgagacagctgcgcgtccccgagccgccgcgcgcccggtccgccggggcggagtcaacgccgcggattggctgctgagaaaggggcgtggctcgtggcggccggtgggcggagtcgatctctggccgtaaatacggcgccacatggcactggctcgcgagggcgggggcgggcgggctggccgggcgcaggcgcgctgagggcgggcgcccctcggcctccgtggcccctccggcggccgcgacgtctcgcgagaagacgaccggtaggaggggctcctgcgccgggggcggggccggcgagggctgcctctggggggtccgctagtcgcggggcggcggcggcggctgcgggcgcgaggtgaggggcgcgaggtgagggtcgcgaggtgaggggcgcggcgggcggcgggctcggggcgcggtctccctctctctcggccagtgctgggctcccagggcccgggcgggggtcccgggccgcgctgaggggcgcgggtcggctctccttaacctggcctggcgggcgcggcttgggcctgggttcgagttcccgcgccggcgcgcagtgtgaccttggccctgcgcgcgccctctctgagccccgctcgtcgtcctcggccagggggacccagccctggggccctgatcagcgcgttctgcggctcctcggggtctggacgagaaatctgtggttctgattcagcgacagcagaggctgcagcggccccgccggcccccaggagtccccctgcccggcatcagcctctgccgcccggcaggggtaggaccaattcccgggcttggagttccaggatccccagctcccgagggcccccgtgtgcctgctgtcacctgaacggggctccccggccccgccgaccgcagccctggagcctgcagacgccagcagcaccggcaggtcgctcagggtatcccttaaatgacctctcactccagaagccgcagccctgcccctctgggagaggaaaccgtgcatttagtccgggaacagtgggacttagacctcctctgcgggctcccggccaccgagacaccgccggcaaagccttggctcgggcagaggctccgtctggcaggcagcacaacaagccatagtgtttccagcattattaaattatttagttcataagcggggctgtggggactcggaagccccggggtgaataggaatgtgagttgcaggcgcggtgctggacgcagtacatcttccaggacaccaggccctacggtgctgttcccggctgtgggtggttggggacagctcagcgggtcccccacttacccccacgcggggacccgggttagcccctcaccgtgagcatctggtgttgggagtcagggctggtgtctgagtgaggatggagaga

SEQ ID NO: 48103 - DNA, 1180 bp, Homo sapiens
gcaggggggtgcggaggggaaggggcgcctgtccgtgtgtctgtccctctcagggtcagtggtggctgcatttgctgttctgcagccagtaggagggtgaggaggggaaggggcacctgtccgtgtgtctgtccctcccaggattagtggtggctgcatctgaagccggcgggggggagaggggggcggcggggtgcggaaaggaaggggcgcctgtctctcccaggaccaggtgtgcatccgtgcgtccagcctcgggggtgggcggggtggtcagcggctctgtctaaccggggcaccgtctgccaatgcccgggaaggctgcgtcccgggaagaggaaccctccccacactttgaagtcagttttggccgcgagcgccaggcccgagagtccagaaggggcgccagagcaggcggccacagtcgggctgggaagcgagcccaggtcgcgcacgccccgggctgggctgctccctggcccgcccgcccccctcggccgggtcttggcctccccgcgccccactaccacgacctcgacccccgaaggcccacgcgcctcaccgctcggttgcgtcctccgccgcaaccacccctcgcccaaggctccgcctccggacagtgccacctgccaggcccggaggaggcggaggacggagacggctggcgtggggaactgagactgcacccctggaggccgctctggaagcctcgagggcccagacttgaaggaaggagttcaagctgagaggggctggggacaggcaggcgccaagccggtcgctccgacagatcacccccgccaggcgcctagtggttcatgccgagcatccggtgggtgggcggggcgtctcgagggcggggatctctgaggaaggcgcggggttgtgtccggaggggcggggcttcgcctgcagggcgcccagtgtctgcaccggcgggagcgagaaaactatgtgccggagagaagcgtcctgatccgtgcaccaaagcccttggtcatttagcttcaggttctcaaattaagtcctccgcggccgcgctgtggctcatgcctgtaattccagccctttaggaggcgcagttgggaggattgcttgaagccaggagttgagaccagcctaggcaacaaagcgagaccccatctcttaaaatttaaaaaaaaaaaaaaaaaaaaaaaaa

SEQ ID NO: 48104 - DNA, 1351 bp, Homo sapiens
gggtgagaccctgaaagcaaacgaaagtttattatgtgtgtttgtttgattgagacagggtcttgctctgtcgcccaggctggactgtagtggtgcaatcatagctcactgcagcctcgacctcctgggctccaagcgatcctcccacctcagcctcccgaggagctgggactataggcgtgcaccagcatgcctggcttttatttttattttatttttcgagagacggggtctcgctacattgcccaggctggtatcaaactcctgggctcaattgaatctcctgccttaggctcccatagtgttgggattacagacgcgagccactgcgccgggccggtttttttccccctctcagcccccgcgctccgccccgggaactccgggagcgctcctggtcggccggccggcgcccgcggactctgcgcacgcgcatggtcgccccagggggaacgcaggtcgcttacccggctgggtaggtcggcggcctggttgccatggcagcggggtcgcgggccggcgccagggaaggccccgaggctgcgggcggccagggctgcccgcggattcccagacccggacgcccgagccagcaaccctgaggggcggccgggcagcgccgccaccatgttcctgggcaccggggagccggccttggacacggtaagaacgggcgagggggcgacgccgggcgggcgtccgcgaggcctcggctcgtctccgtcgcccgcagcctcggggccccgcgcaggggccggcccggggcgtgaggacggggcgcacggccgggtgacagctgccattattgttaccgcacaagagcgcgctgcaggccccgcgccgcctgcagcctcgcccgcgcccgctttcgcagaggccgccgcttccaggaagctctccgggacgccgcgccctcgcctctgggcgcctgcgagtctgcggcccgcaggtgacggagctcacggtgtaagtgcctccgggcacccccgatctaaggcgggatccacggatcccgtgtggccccaagccttcggggtgggagggaggcagccccagggtctgggaacccagcttggtcagaggaggcttcctggaggagggtggggcccgatgtactccccagggcgagggtgcatgagccttaggttagttactttgcccggtaaatatctactgtgtgttagagacacgggaataagctgcattccagtgggggggggggggggggcggagggacaaggtaataaacaggtaattaagatcgtgtcagaaagtgagaagtgctgtgcagaaaatgaaacaggcccatatggccgggagccgtggctcaggccggtagtcccccggtagt

SEQ ID NO: 48105 - DNA, 1344 bp, Homo sapiens
tgccaggcttctggaaacaggggaaggaactcctgtaccccctgcctgcatgtgtgtaccctggcagggctgccaggctggtgtggagggcactggagttgtggtggggggaagcaggaggtctgtttgtggccatgggagctgctgctaacagcaggaaccagaaacgatctcaggccatgaggacaatttctgcagctggccagggactgccctgttcatccctggagttatgcgacacagaactctgaggtcagagtcagcccagggcacgggccgtgcaggcgatcccctggctgtggagatgaggtcacaggctggatgctggagcagtgtcaggctaggagtgggcgtcctgcctaagccacctgttcacagtgagcaatcagctggcgccaaagaagaggactcacctggccaggtaccagcccactccaagtaggtagccttggtcttagggggttggggggggcttcattctgcctggagctcccaccatccttggcattggagagagaggaacctgagccagtatccccaccccaccccaaatttctggctcttcggcctttagggatggagaatgcgacctccccccttctgcctggctgttatttcccagctgggtggtgtctccaagttatccagcgggtggaaaccgcagctcagctagtccctcttgcccggtgccctatcacaggaaaacaggcgagtcagggcagtcaatgagccaaagtccaggcctcctgggaagacactgcccggaaccgtccctgcctgcaaagagctcttcctgccaggaacggcctgcctgcccacagagctggccaagtcgggcacagcagatggtggagcccgggtgtggaaacctgtttctcagtacacaggaggtccaggaataaggccccaggtgatgaagcagagccaggatgcacccactgccctagagtgcggagggaggcgtgcacctgggcccaagcacgcactatgtccatcctcctggctctggcagctcccatctcccctttagcaaaggaggaggcacaggcatggggaggccctgttaggaaatttggctgtgtggctccaaagcccatgatgggccctctctggcaggtgcctgaatttttaggccccaggacaccagaacagggcaccgtcttcatcttaggtcttgacaaaagactcaaccttccccagagggaaggccggatggggactgaatctacctgcggatccacttaacactcgtacctttttaaaaaaaattttttttatttttgagatggagtctcactctgttgcccaggttggagtgcagtggcgcaatctccactcaccgca

SEQ ID NO: 48106 - DNA, 2090 bp, Homo sapiens
taaaaggaccaatagaggttcaggagcgagtgggcggggcacgctgtggggcgggatcggcgggggatagaccaatggtgggtaagaggcgggacagagggcggggcgcgcgggggctgggctggcgggaggcgggccaatggaggctcgggggcggggccggcgggcggacgggcgggggtgcggagggggcggcggcggcggcggcgaacaaagaggcggcgggcgcgggcggccgagcggagccgagcgcagccgagccgggccgagccgggccgggccgggcccaggagcgcgcggatgatgcgggcggccaggcgggggtcgacgggtccctgaagcccgcgccccgggccagcaagggagccccgcgcaggccgcgcgcatccggaggcggccgggccccgccatggccggggtcagctacgcggcgccctggtgggtgagcctcctgcaccggctgccccacttcgacctgagctgggaggccactagcagccagttccggcccgaggacaccgactaccagcaggtgacatgggcctctcggggtcgcggggtcagggaccccaggtcacggccccctcctctcccagggtcacggcccccatccccgagggcctaaagacccctcatccccccctccagggtcacggccacctcctcctcgcaggtaccggcctccttccttctcgagggtcccttctgagtcctaggaccctttcttccagggtcatggcctcctcctcaaaggtctaaataccctccaacccccagtgagggtccacggcccccctcccgattctggccttcccttctggtgtcactaaggcccctgggtttcatggagctgcctctccccactccgtgagcccccttggccagtggagggcctctccaccatcactgttggcggcctggtgctgtgtcccagcagagacccctccccagatgacccccaggctctgagatcagagcgggtgcctgagcacattgggtgcaggcaggcagagactcctcgcccactcacccccgactggggaatcccactgccaggcttccagtgggtgaatggcctgggccgccgccagccctctgtggccggtaatgaccccctgcttggcggtcaggctgtgggatgtacacagggtgccgtgtgtggccgtgggagaccaggctgcctgtagcccccgggggagggaggcccggcggccaggaagcaccgtgggcctcaggcagggaggctggaagcggctgagcccaggcagacctggggggcggctgggggccctttgcagccctctcccaggggagcccttagcctggcatcatgccaggccccagcaccacccccatcgccaagctactgtcatttgagtgcggggcaggggaccaagctgtgggcatttccttcctgcctagagatccggattccagaagccccgtgaccagggtccctggtcacccggagtttctctctggacggatcatggcagagccccatggtggggtggggatggctttgcttatcaaaatggcttgggaatccggtattccgcgggcagcctagcacctggactcttcagaactgcgttgtctgtggcctcccgcatccagaggagggaggcggaagtggaggagcagggcacctgggagcccactgctcccagcctcgcgctcacttgcacccaggccccccagccgagccgatgacgtttcctaacagatgaggaagggggcgagggatcggcccaggcacgcccagacacagcagggaggagggaggcggaaggattggtataaaatctcacgcctgcgttctagaagcccagccctgggggaccgttcagtgtgggggcaatgcacattcaggaacttctggaacttattccatgctgatggctttgccacttgtccctggaggactctgttgaagctgcaaggagggtgtgcttcactttggaaagttctctgccctgagggtttggcccatttgtcagttcttaagctccggggcagccctggggcgtggggggcggctgtttcctgctgccccttgggctgccacctgcccgagctgccagccacag

SEQ ID NO: 48107 - DNA, 1313 bp, Homo sapiens
gatggtttcactgggacatctgccttccagggcagatagtgggccctgcctcagtttgcctagcatgggggacgtgttttccactagagcctggaatgcccagatgtttctgttgagaccttaatgataagactgaggtcaccatacagagaccttggggaagagcttctgggctgggggaacggcaggtgcaaaggccctgaggcagagagaagcttgagcctcggggagaggcctcagccccacgtgccagagggtcgctctggtctgactgcgcacggggaatgtgctgcctcaggaactggtgagccctctgttccaggcactgtgccagcccaggctggatggccactcagaggggatctgagctctgggagtagggccagtgttctcctagcagagttgggagcctggctcctaagagcacaacacctctgtctgtgccgccacaaggtgaggtcagccttgtgcccagttgcagcctggggggcagttccctggggcagggctggcctgttatcatcctccccactcatcagaaggaaatgagttctggttaaaacggcagtgttggtcgcctgtcgcctgtcttgtcatttacgaaagcagtacacgttcatggaacatttggggaaaagggaagagcgtgagacagaagcgtccctccagctgggttcagtccaagagcatagagctgtagggtgggtgtccctgagaactggaatcctattgcttttgacatgtctcgtactttggaccgtgttccagatgcttgtccagcgtcccacggtgccaggcaggattctgtacctacagatgacagaagcgggccagacacggaggcccccggggagctgggtggaagcttcaggagcaatccctgagtggacaggagctgatgaactaggctgggggtgtacagcgaatgggaccctgcattggggggtggaggtgggcaggaagcccctgatggctggtcccagtccactcaggatttccatcttggccggtgtctgcattcctggggagactccgattggctgagcttgccttttggccagggggtgtgaagctgtgggccctggacctgcttggggtgggtgtcaggccacccttggcccggccgctgcccgcatcaagggttcctatatctgggctcctggtttttgtggttctgagggtactctggccacctctgtccccaggagactctggggttctcaagccccttccttggagtgcagcagcctgggaccctctagaagtccccgaggtcttcacggctttttgtaggtgtggatgttggggtggtt

SEQ ID NO: 48108 - DNA, 2628 bp, Homo sapiens
caggggccactccagtctgtgtgtgcgggacccccgcctgccccccactcgcctgagactcgagggccagctctaggacccctcttctgggcatctccatggtgacccttcttcctcccctgacccctgggcaggccctgccagccaaccccgtctaagggatttgcagtgtcagccgctctgacccccggccgggggctcttggtcaggctctgggggagcggggagccctgcagcttggttccccaggccacggcggctctccccggatgcttgtgctgctcgtttctaaagcacttttcttggagagccacccagtggccctgggaggtggacactgtgtccccgacataagcagaaacgggggccggccagcatggggggccggaagactgggcacgggttccagctgcagcccagccacgtccgtcccagtggatacagcgtcagcacagttcgtgaacccaggggtgcaggtttagggggctcaggggcatctacacttcccccacctgccccaccgtcagttctgctgaggcctcggctagagaagaggaaccgaatctgcagccaggggcctggggtcaaggacatgggaagtgcctgacgtggccaccggggaattggcatgtgacagcgggtggatggtgggtgtgggagggtcacaggagggcctcctgtacccgggcctgccgctatgttctgcagggagcccacccaggccctgtgctgggcctcacaccatccgagggggcttctcacagtcttgggaggctggctgagacctgagtcctgtggggcagcacccactgtggctgggtcaggcccatgttggccgagggtgtgggaggaagccgggccacccacagagtgccagtgccttcggcctctgaggagggtaccagccacagtgcccctagccgttctgcccccctcgggcctgtgcacgctggctgggttcctggccatcgtggaagagcactcctgaagttctggggtgcacccagctctgagccctgcagccctgtgtctggggttcggccgtgccctctgggctgcctctccctggtagggagctgatcccggagatggggctccagtctggcggctcctggctgggtctgaggcctggggcccggtccccaggcagctggtgcagagggctgcagacaagtgggaagagcaggggattttccgggtgtcacgctgggagatgtgtcggagcacggggaccaaaatagacacgcttgctgcagctctttggtgtctgttccttgcacgagggggagggcgggcgtgggcagcgggagagctggggtcccccggctacagggtgcaggaaaggggcccggcctgtggggagacgggcaggagcggctctgagcctcagccccagggctgcctctctggcctccttccaggccattcctggagggtgagggccagcccggagggagccccggggggtgtggggccatgtgcagcctggcgacctggacctcggacctcaggagttggggacagggacacaaagttggccccgaccccggctcccacgtggccgctgctggctgcacgtcctccaggcacggccaggagctcaccgtcatggaatgcgtgaaacccaaacccagcctggtggaaaatctgtttttaattttgggccagtgtcgctgggagcctgggccgagtgtgctatgggtaggggctggggccacgtgtccagcttggccgcatggggggctgaggcctagccaaagactgtgaccctggaccccccacttgtgcaaggggacccacgaggcaaaggtagggggacccacttcccagtggcgggcccctgacatgggggtggtggtagtggctcgcacacgccgagcccaccctggcctccccaaacaagtctgggccctagggatcccgcccctttcctgaccctggcccaggacacctggggggttctcacagtgctgggggccagaacccctcggtctgcactggggtgtgggaccccagccagcctctcagacacccccaaaccttgttgcttcctctggaggaggggccttgggagttccagggctggagttcagcatccgtggaggcaggtgggggtcactcccctcccactcccacctctcgcctgccacgtcctcccggagccccgtgctgctgccatacgcacaggctcaggccagggcctggctggtccctgctgccagtgtatcttcggcatgcaggagacgtttgccgcctggaccctgtgccaggccttggctgacactgtccccgggccaagagtgccctcccccacctgttgcggtacccacgatgctccccacaacgggagtttcagtgaccgcctcattcctcttcctgcctcccacagcctccgagctcacggggccagcactgtgggcacaggggagcccccgacctagcgcggccgagctgtctgtccaagcctgggccccagcacccagcgcaagctgctgctaagatgccctggaagctgatgctcccaattagcccggagcccagccaggaccacagccgtcagtgtggggactccgtccccatccaggaagccgggggtgactctgtccccactgcagtcaggctgtgtgg

SEQ ID NO: 48109 - DNA, 1298 bp, Homo sapiens
aggtcaggttgggggtctcgccttacaagtgcggagccagccgaggttcacacagagcaaaggctgcagcaccgggtttgggcctgggtctctaatatcctggggacatcctggaggagatggcctgtgtatggggacaatggggcttccctgaaggggaaggctccaggcccagggacagcatatgcctgggtgtagaggccacagagccctgccccgagccacaccccagccctgcccgctcctcaccagccagtgccccaggcatccctgccaggccagggaggtcttgctctggcccagggtatactgggatcctatcggtagcaacctgatctgggacagagtaaggcttcaggccccggctctctggctggctgggtgtttccagagttggtggggttttgggggctgcattttgggggctgcggggcagtcgggggagtctgggctcacggtgggagggggcatcccccatggatgccgtctgtggctgtggggctgcaggggcttggagaaggagggggtggcccagggccgagaccaggagccctagggtgggggcagggggactgaggctgcaggagggggtcgcccccagcccccttggcacatgtgtggcagttgagtcctctccgtgtgctccgcggaacccagcgtgcagttttcgcctcgcctgaccgagcccttacatcacttccaccacagacggaaaattccatttggtcagagcccagctgctgatcagacagttcccattctttctctgaatgggccagggaggggcggaggggccgccagcccggtggagagaggtggctgggccaccgtaggaatgccgctggcccggtgccccgcaggagaccgtctgctgggaatctggcttcgggaagtgggtgcagaggccaggctggccacggcacgctccccgcagacagctgggctcaggcctggcgcgttgggtgccggggctctgacgtgggatgaagcagctgcccggtttgctgagcaccctgacacccaggctctgcatgctcgcagtggtgggctgggacccgggcagcccaagtgggctccctttgagggaggcgccatctccttcctcagttgggggaagccaagtgaggctgtcctggcaggggccccgaagcctggcctctggcccccaggggctgaggagcgaggctccgtttgcagctggccccatccaggcaagaacaagagaaagctgcctcagccaatcgcggtgctcacacctgtaatccagcactttgggaggccgaggcaggtggattgct

SEQ ID NO: 48110 - DNA, 2708 bp, Homo sapiens
acacctgaacgctgctgccagccgatgccccagccctgcacgccacccactatcccggcacgctccctctgcagatggtcgccgcacctacaagccctggccgcacccaacctgtgttgttgccgcccggcccttccctccacagctctccttcctcccgcccggcacttctgtggaccccttcttagttcacaggcacggctggggccgctctgtgctggcgcctgctggccactgagggacagggacacgtgccacctgctcatctctgccctgaggtcaccccgtggtccctccacgtgcccatctctctgcagtgccctcctcgcctgtgcagcccgcccacccacaggctcacccctcctgccggctgccagaggccccctccagcagggcctctctccgttgccccagcttcactctctccctcagcacctgccctgctggaggccccagccctccgtggacagcaggggccacgtggagcccgggccgctcacccgccacccagtgctggccgccttcttggtgccaaacccccttcccccacccagagactgggcagctgtgtctggttcgttctttgcactaaccacatttgtcatctctagggcaggctggggctgcgggctgagggggaccgctggcaccccccttccctcccttcttggttccatttccatccatgacaggtacagcatcccaggagcccggcctgaggggctggacccgagccggctgtgaacatccctcagcccctgctgtccccccttgggactaaccactaacctcacccccaaactccacgggtgcccctagctggcccagagccggcagtgtgagcccaagtccgggctggagccgaggccggagcagctgtctgggagtcaaggctgcagtagcgtttcttcatggggtgctccagggggtgccacagaccgacaggcagcccaagggcctggacacccctccccaggcaggtgctgccccaggaggactgtcctcgggaatgaacctcccgcgggctttggactgaggtccctgtggcctcggtctcctccccatgaagtgggagcgaggctccccaatggtgcttttggctttagtgtacgatgtttgctgtgcttcccgccgtggagggcagagccaccccacatcaggatcggacgtgctacccctcccggtcccggccctggcccagccagcccagccctcgaggctcgatgcctgtgccaaggccaggggcagccagagggcagctggatggccacgtgcaggggtcaaggctgggccctgcagtggggcgggccgccagccccagcagtttacagacgcatggctcttcctcccagagcagccggcagctacctggaccggaaatgtcctcatcccctccctggggccaggctctgccctggccttcctctgtgaacccctcctttctttgtgctggtgtctgggaccaaaaagggggaatatgggagggcagagtggggaggggagtccatgggcctggggccccaagccggggcgtctgagctccccaggcatgaccaaacctcagtggaggggcctctgcttcaggccccgcctggctgacattctgagcccccctcggaggccccgccacagccaacctgcccagtctttcctctgggcttgacccgccaggggagttctccaggcctagggccaggagagaggccctggcaccctggcgtgggtgcccgccaaacgccctgcgaccgctcagaagcacaaatgctgtccatggccgtgaggctgcctgccaggtgaatggacatagcgtgagaggcggtgaggccagggcttccagcctcgtgctgtctcgggactcctgaccgtggtgtgcgtgtgtgcccgtctgtgactttctactcaccaaggttgaagaaaggaaacggggaaaatcaaaaggggttcaaaccccacctcagtaggtggaggggagcgcctgccattggttgtatttttgttctgagttttcggtgccgtgttcctaactactccatcccatgacctcgccacacctactggggcatctggctggtgcctgctgccatggccagcccccactctcaccctgcacagggggtcttgcagcccccaggcccacagcctcgttgggaggacagggtggccctggggacaagagggaggagcccaggggcttacctcactgagagtgctccccagcaggcatccactaccccagggccccccacatgtcatggcaaggttggtagtgaatgggcctggttgggagcagcccctggcccattgcccacccacccatctcactatgcaattcgagttccaagcaacatttgctcctgccctggggccagctctgccccagccctgagaggggtggtgaggcagccccctggaccccagaaccccagacaagggggcaggcgggggaccagggcctctcctgtgggatctttgttttgtgtttaaccataatggttgtgtactgaaccacttcatatttgttatatataatatatatatatataatctccttaagactcagcctcctggtttacccccccggcctgggcatctgacctcccccaccccagtgtgatttaacatccaggaactgaggcctgaaccattttgcatttccccctcctccagcctctgtagggccatggctgtatgtactgtcgctgtgtttt

SEQ ID NO: 48111 - DNA, 857 bp, Homo sapiens
gtagctaggactataggcgcccgccaccacgcctggctaattttttgtatttttagtagagacagggtttcaccgtgttagccaggattgtcttgatctcctgacctcctgatccgctcgcctcggcctcccaaagtgctgagaatgcaggcatgggccactgcagccagccagccttttctttttccaacaggacctgtcaccttctaacctaccttctatgctatttacttagcacttttgccacctgccttcctgctggagcacctaactccatggggccagggacctctgttttgtccactcatgttggaaaacccccagcacagggcccagcacccaggaagcccttggcagctaatgtcactgtcatgagtccgctgaactgggccacagggtgcctgatgcaacaccgttcctgggcgtgtctgtgagggtgctcgagatgacattaggattaggacagtgggttcaggaaggtggactgccctccccaagtggctgggcaccttccaatccctccagaccctgaatagaacagacggcagagggaggaggagttcacccctcatttcctgcctcgccgctggagctgggacatgtcatcctctcttgccccgggactggatgtccaccatcggctgccctggttctcaggccttcggacatgagctgagtttgaatcacgccttgggcttccctgggtctctggcttgtaggcagcacactgtaggacttctcagcttctgaggcctgtgagccaattctcataataaatccttattttattttcatagagtagagatgaggtctatgttgcccaggctggccttggccgcccctgctcaagtgatcct

SEQ ID NO: 48112 - DNA, 1868 bp, Homo sapiens
attctcctgcctcagcctcccaagtagctgggaccgcagcgcccgccaccatgcccggctaattttttgtagttttagtagagacagggtttcgccatgtcaggtgggccttttaaaagaggtgctctcctgctgacctagaagaaagcacacagccgtgttatgaggaggagccacgtggcaaggaagtgagggcacccctaggagctgccagctagtaagaaaatgggacatcagtcagaggactgcaaggaaatgaactctgccagtaccagtgagcttgaaaaaggatgacaagccttagatgggaacgcggccaggtgcaccagcctgcgaggttccgagcagagcacgtggcgaactctggatgcccaggctgctgacccaagcacattgggagatcattacatctgtgccgttttaagttgctaattggtggtaatcttttcatccagcaacaaaaaacctttagtacttcttagggcaaaataaccatgaagcataaaggaaaatgtcatcttccctgcacattctcagccccagggacctcttgcacttagtacgtactgaacgcttgctgagtcaatgaagacatgtgttttttcaaacctgactttttaaatggcagcttaaatattttttcctttaatagcttagtggttctctgactcctgttcgctgtccccacatcagaatagcaataataaggaatgattcttccctccccctgcaaatgtagctgcctggttaacacagaacacaagctctacagacctaataaatgtctggaaaacctcttgcttggggatgagtcactccctaactcaaaaccaacaggatgagtcagcagctgttgcttcaggctctttatggaaagcccctctatttttactatcctattcttaaacaaagacaaaaacccaaaaactcaacatctccccaactatcgatgcttacagtattagaaatgaaaactcagagcttttaagaaaacaaggctttagggccgggtgcagtggctcacactgtaatcctagcactttaagaaaacaaggctctgcaaacacttatctcattcgccatccaagtgatgacatcctcatacgtcgtgtggcctctgaaaagctccaatgcaggcttgcacatgaaagagggtgtaaagggcagacagtgtctcagcagtttcatgtgttctgtgctgtcagggttctaagacgagcctcaatgacacacgccctgtgcaatttcttcccctgcagcgtgggaggaagctggagtgtgatggaacgtatctcctgtgattgggcgactttcagctaagccaaagggaggtgatcttggtgggcctgatctaatcaggggagcctttcaaggaacctgggggaacccctgaaagggtctcgggggcccccacagcacacttggaggaacccctgtgctagagaggttggtgcctgtgtagcagcgtgcccctaacagcagagtcacagccctaggctggaagccaccagtgcccacctctggttcagtggataatcaagtgcagtttactcatctaatagaacaccacagaagaatggatatgagagggttatcaccgcatgtatcaacatgatgggtctctgctgggcgcggtggctcatgcctataatcccagcgctctgggaggccgaggtggatcacctgaggtcaggagttcgagaccagcctcctgatatggtgaaacaccgtctctactaaaaatacaaaaactagcggggcgtggtggtgggcgcctgtaatcccagctactggggaggctgaggcaggagaatcacttgaacccagggggcggaggttgcaatgagccgagattacaccattgcact

SEQ ID NO: 48113 - DNA, 1657 bp, Homo sapiens
tggcaagataatgagaaaagtccgggcacagtggctcacttctgtaatcccagcactttgggaggctgaggcgggcagatcacctgaggtcgagaccagcctggccaacatgttaaagccctatctatctctgctaaaaacacaaaattaggtgggtatgagcatggtggcaggtgcctgtgatcccagctacgtgggaggttgaggcaagagaatcacttgaacccaggaggcaaaggttgccgtgagccatgattacgccattgcattccagcctgggtgacaagagtgaaactctgtcttaaaaaagaaagaaagaaagaaagaaaaaaacaaaaagataatgagataacatgtggaaggaggccctggagcgctctcattcaacagggacacccaggcccgcagctcagcctttggagatggcaagtcccaagaatcagaagaaacagatgcttcctgagtcgtcaagtgaggggatttcatctcccagcagcaaaaaggagatcagaattggaaaggaaatacagactacaaggaaccctggcccagagcccccaggctgtgcacacgtgggctccaggcgaaccatttcaggttcagggaagacggctcagcctaacctgggtggggctgacttctgtgcacaacatctacacctggccctctgtgcacaaccagagctccccgctccaccgatgcccagagcacagcgactgtgctgcaagcggggtgacctggctgatgacaccgcggctcacacagaagacaaaggagcaacaaagctgccagaactctagtttcccagccttggcagagaaagcccagaacaaccagggtgctcacatgttccagaggtacaggagaataagtgtgctgcttcttcttactcagataactttatgtcatgaccaatgaagtaacttttatcaaatttttgccaactatatagacttcttaaaaaatcatttgagaagggacctcaaagtgaaatccatttacctgaaagcacacggcacagatttcgtaaggttgtaaagaacgattgcaaaaccagaagcgcttcccctgacaggctctggttaaaccctagccgccaatgctgcccaagggctgctgtccagtttcacccacagctgtgctggtctctgatgttgccatgtcttccctgcggcacggacgctgctgaaactggtgctcccttcagaggggttctgctgacagctgaaaagacagtccggcaggccacgcaggacaccagtgtctacttctcaaaaagcccctcccttaagagccaagtgaaaagtcccatgtccccgtccatcttataaaacgaaaggaaatctgtttttttcacgcacagagcagcgcttatttgtttccctagagaggcagcaccacagctttcccaggggcagtgggaaggggctgtaagtactcaagagaacccgcgtttcacgcgactcctctccaaaaacctgaaaaaactctcaagagaacttgcgtttcaggcaactcctcaccaaaaaccttaaaaccgggcaagtaagtccctgtgttactaattccatgaaaaaaactaatctgtttcaagaaagtcagaattcctcccttaaggactcacatttgcttttcttcagaattatggtaaataact

SEQ ID NO: 48114 - DNA, 3914 bp, Homo sapiens
aggcaggccacaagcccgtggcacgggcagaattctaaagatggccgggggtattcatcaattgggaacctaggtgaaaggtctttgcagaggtaattaaggctaccaatcagctgagcttaaaatagggcgattattctggattaccctgcgagcctgatggagtcaccagtccttacaagcagatgtggaaggtggaaaagtctggcaggttccttgtgagccgctcgctgctggttctgagttgcaggggctgcaagcaagactggagggaggcctccaggagccgagggaggtcagaaaagaaaccggacctcagtcctacagctgcaaggacctgaacccttgccacaacctgaatgaacttggatgccgatgcattcccagagcctccaaaaaggaacacagtccggctggaaccttcctgttagtctcatgacactcagggcaaccaactgagccacactgtgcccagacctctgacccaagcaactaggagctaacaaataaatgttttaagtcccgaagcctgtggtaatttgttacagtggcaacagaaaaccaaaacagctgtggaggtgtatgtgactcattactgaaaggtgagtttataagtgagaaacacaataaccaaaagcagtccccttaagaaattccctagtctgcataaaagacaaataatccaaattaaaaaaatgggcaaaggatctgtatagccatatctccaaagaagatacgcaaatggcccataagcacatgaaaagatgctatacctcattcaccatcgaggaaaggcaaaccgaaaacgggatggctggaattcaaaggacagataaacacaagcacggttagaccccaaagacgttatattggtgggaacagaaatgttgcggccaattcagaaacactcgggtagctcgtcaaaatgttaaacataaagcaaccatttgactcagcaattccactcctaggaatacacccaagagaaaacatgttcacaccaaaacccgcacatggatgtttatagcaacatcattcataacacacaaaagatggaaagaacctagatgccactgactgaggcacggataaacaaaacggggcgtagcaaaagggaatgctattcggccgcttagagggatgacgatgccacgctacagcatggatgaactttgaagaaacgatgctaagaagtccgtcgcagaagacaacatactgtatgattccatttacataaaatgttcagaaaaggcaaatcaacagcgtcgagagaaatccacggtgtcgaaagtgggctggtggccgcccggggctggggctggggcaggaggaaaatgtgcagtggctgcagggtttctttctggggtgatgaaaatgttttaaaaattgactgtggtgatggctgcacagctctgtaaatagactgaagtccactgaattgtaggctttaaatgagggcatggtatgatatgtgagttatagctcaataaagcttttttttttttttttttaagctgaggccaggcatggtggctcatgcctgtaatcccagcactttgggaggctgaggtgagaggatcgcttgaaactagcccaggagacatgcaaaacctatcgctacaaaaaaataaaaaataaaattaaaaaagctaaaaaattgaaaaagaaagtcccaagcgctgtaaagcacagagcacggaagtgacacacagtgtggcagctgcttgttgtccagacctgccccaccggccagtcaccagctcctgactcactgaccaccctggcctctgccctgtaatcttccaaagaggaaactccaactgtgtcttttaaaactttttactttagagacaggatctcactctgtcacccaggctggaatgcagtggtgcaatcacagctctctgcagctttcaagctcctggactcaagccatcctcttgcctcagactcccatgtagctgggattacaggcatgcaccaccatggccagctaatttctaaaaatttctgatagagatgggatctcactatgttgctcaggctggtcttgaactgctgacttcaagaaacctcctgccttggactcccaaagtgccaggattacaggcgtgagccaccgcgcccggcctacatccatgttttcatcaacatggacaaaactccacaggaatcactcccatttcacaaaaatgttgtctaggtgaaagatgccaatcaattattctctggttaatgttctgcttattcttggcttaagaatttttgtgatgacgcttagattacagatgttctgcaagacaggctgagaaacagaatcattccaatcactcctgctgtatcctgaggggagactctccgcctgttcaacacagggacacgctgcctcccgtggcaaggtgactgtcttgctgctgactcgggcaaaaagaccatgagaatgaattcaccaaccagggttcccttccctcgtaaatactgtgagaaaatggatgtcagtctccagctgaccgcagagaaatcacggccaggtgttggcacttacagagaagaatgaatacagaactgctttaatcatccactcaggaaactccccaattgtatcaatgactctatataaggaagcgaggcttgcaactccaaacgaactcactgggtggccccaagcaaaacaattcaccccaaacggtgtgccctatggacaagagaaactcctgcagttattctattttctcagctccctgctcctcgttttcctccaccttagcaagacagtgatgaacaatgctaggtaagctctttcccttcctgtggcaagtctagtagcaaagggctagttgccaggaaacatgaggttacaccatattcctgcttagtggaatcctgaccttcatgttactaaaacatgaaaaatactttgtttacaagatcatcaatattaaaatttggctttcaagttccctaagacctttttcctgtatttattacaagaatttatttatgcatccaacaaatactcaaatgcctactatgtgctgccatggtgccaggccctagggacacaggggaatcagaccaggccctcgcatgcccgcccaggctgacattccaggatgtgatgactagaactatgtaaaatgtgatatacacatcaacaagggtgattcagattaccaccaacatttcttaacaaacctagctaaaaaacgttagaatgtgcttagccttcccattctcttttaactttttatctaaacctacaaattctgaagcttctgtgggaagctatgcctcctccgagatgttgttcttcgtacgttttcaaccatacagcggcagcgactggagtggttgttttgcatgtcaggcttcactgggcaatttcttcagaattcagagatctacctactggaactagcatctgtagacagtccagtaactaagagtggtagttctgagttaggtgggcctgagacctggcacactcttaacctccccaatctaagacatatcttatggaagtccccttctcaaaccctgataaagattgaagggccaagcgtggtggctctcgcctgtaatcccagcactttgggaggccaaggtgggagggctgcttgagcccaagagcgtgagatcagcctcaatcaacaaaaagaaaaaggactgcaagcccagggcaggaggactgcttgagcccaggagtttgagaccaggctgggcaacatagtgagtccttgtttctacagaaaaattagccaggcgtggtggtgcgtgcctgtggtcccagctacacaggaggctgaactgagaggatcacttgagtccagaaagtaaaggctgcagcgagctatgatcgccccactgcactccagcctgggcgacagagtaagactccgtttccaaaagaaaag

SEQ ID NO: 48115 - DNA, 1629 bp, Homo sapiens
aggagggggctaagtgccaagcccccactccccatccccagaagctggcccgagttcccactcccacggtccccaggcaccctagagagggcagaggcagaccgggcgccatgactcatgcctataatcccagcacttgagggagaccaaggcaggaggatcacttgaggccaggagactgagaccagcctgggcaacacagcaagaccccatctctacaaaaaaaaacttaaaaattagctgggctggtggtgcgcgcctgtaatcccactacttcgggaggctaaggagggagtagggcttgagcctgggaggtcgaggctgcagtgagctgtgagggcgccactgcactcaagcctgggaaacacagcgagaccccatctcaaaaagggcgagacggggtggggcagagacgacgccagcaggcctcggggaatgggtcgggggggagtggggtgcaggcggggctggatccagcatcctcgccccaggggtccccgcccgcggcggcggaccacggaggggcccggggcgggggttagcgccccggcccacctgggtgcaggtgctgggcggggggcgcgcgtcaccttgaggatgttgtcgaagatggtgtcgcggaactccagcagcgccttctggtcgaactcgcggccgtggatgatgcgcatctgcttgaggaacgtggacttgccgctctcgcccgcgcccagcagcaggatcttcaccaggcgccggaccgcgcgccgctcgcgggccagcagcgcgtcgatgtcgcggctacgcctccgggcctcgcgctccgcgtcgcgcgcgccgctgcccgccctgcgctcgcgggccccgccggcctcggccggcagcaggcagcggctgagggtccgcaccaccccggacatggcccctcaggccgcggccgcgccccgccggcgcccgggggccatggacgctcccgccggcgagggcgagcccgggccgaggcaccgccccacgccccgccgctcgcctcaggccgcgtccgccgccgccgctgcagtcgctccgaggcccgcactcgtcgcccggccgccactcgggcccggcggaggggcgggcggcgccgcgtgaggcccggcggattgggccggctgccgtccatctggccgtgagagcccttcgattggctcatctcgccaagggaggcgggcatcccttccggcctcggggcggggtcgacgccgaaagaggcgggatctttgaggtgaaggcgcttctcattggacgcccaggctgaggttctttctttcagaatgaaagggaggcggggtcgcccgggaggcggagcgatcgtccgccatggccaattataattgctctgagtggacatcagacgtgcccaacgggctttggattgggtgttcgggggacggggcgtgacgagaagtgccaggtgtacagaaagattctcccttggttcccagattgggtccgcctgtgagaccaggacctcgcggagtagcccaaaggctgggaaatgctgataagaggttcagctgctcgtcgtattccctccgatgatcttgtttctacactattttccttccagaaacactggagggggatgggccataaatttcaaacacatgcacc

SEQ ID NO: 48116 - DNA, 1115 bp, Homo sapiens
tggaaagccagcaatgattcaggaccggctgcacaatttgtgcaaaatgaaaatgtggggcctcttgtccaaaaagtattacgaatttcaaaacagccacagcagagcaccacgccgagcaagggcccttctcagtacagaccctgagcctcccgagagtgtgagtgctggggaaatctggggaaagaggccaaggctgtccagagccgagcccctccctggggattgtgtctggggcccgcaaactccccaggcggagggaagagccagtcctccggagacgctgggcaccgagcctcctccaggcccggagaacgagcctgtagcctgtcgctgtttgctgagggccctgacctctgtgggaacacacaggaagtggttcattttctccccaccagtgactcactcccgtcagccctgccctttccaatctctgcttcctgtcccttagcctcagcttgggtaattctgggcaatagaaaggccagtctggttgagtctgaaactgccatctcacatgcaatttcgcactcatcttgtcccccactgaagggctggcttagccttggccggagagccctggagaaggaggggagaggtcggggggactggctgcggtccttcctctttctcctggcttctggggttgggaggggaagaggaggaagaggaggaggaggagaaggtctggagtgtcggcacaatagtaatatcaataacaatagcagctaatatttactgcaagtggttctctgggtctggagatgctccaagcacttttctgaccgtaagttatggcattaagttttgtaactaggaggtaggtcctgtaataaggtcctgttgtaattcccatttttctctgttgaggaaacaggctgagacaaggtaggtaatgtgcccaaggccacaaaattaggaggtggcagagtcaggattggaacccaaggtcttcctgattccacatccgttgcccagtcactccactgcctcactttcgcaagagtccatataaagttcctgaggttggggcctgggacctgtggcaaggtaagtgtccagggattcagctaagatgaggcttacactttttttttttttgatagagtctctct

SEQ ID NO: 48117 - DNA, 893 bp, Homo sapiens
tgcaatgtgtccctccctaccccgccctcctccagcgccggccaaaagtgaccttggacgcttctacaatgccatatccactcctctgaacaggaggcgagtttgcacccagtggtgcctttggttgctagaaattaaaaacccgattgcgcgtgtttgcaattacggtaacttggcgcgtcacccccaagcactgagctagctggtggtagccgggcgcctctcggggcgcgccctattccgccctcggccctgggctgccgcacgatctgcgcgtcctgctgcacctgagcccttcccactcgggcgcccgcaccgctgcggggccgggcgaggatgcaccacccccgcccgcgagcccgccacgggagcgcgtgccgaatcgacgccgcctgcagtccccactacgggtccctagggggcgcagccggcgcgggaagccgcccgagccaggcgccgcggccggcacaaaattgcaggcgggcgggcgccgcgactttgaaaacaagcgagggcctggggggcgggccctgggagcgggcgccgcctccctcggccaatcaacggcgggcggcgggcggcgggcgcgggcggcgcgtgcggccgggctgtgaatggggagcggcggccgcggcagctgagggcgagcgcgaccgcgacgtgcgggcgggcgcactttcttctcagcgccgggcgggggcggcggcggcggcggctcctccgcgcccggcggacccctcggagctagcgcggcgggctcgggactgcgtgagcgccggacgcgaatttcccccgttgacaacttcttctcgcccggctcgtccccggcccgcgccgcgcccctcacgcggggacccaggacgccgcccctcagcgctgggcggccgctcacc

SEQ ID NO: 48118 - DNA, 1495 bp, Homo sapiens
tcaaaaaaaaaaagaaagaaagaaaaaaaaaactctttcatcctcctggaattaattctggagcctggcatgaagtgagcttctaaatggatcatttgtttccagagaagttttttcccccgaaaccatctattgatttttaattgctttgtggtgcgtcttaatcatggtttaaattcttacacacagtcaagtctgtctgaagacattccttcgttccacagacatctttactgttgccctagtacttctaaagctttcatttacatcagtttgttacacatttttttcatgtttaggagggcttgtcttattcctctttgttttctaaaatttctcagccattctatgaattttacaatcattttggcaagttcttaaaaaaaagcaaatgctcctgggattttgatggaaacgtattaaatagtaaagggatttggaaatcctcgccgtcttcctccttttcgtctattcatgcttgctcccgggagctggctgtccctctggcacggtgctgctgggctggcagcgctcctggtgcaggtcctgctgttgcttgtcaagtcattcctggcagttttattgcggcggttgctgtgagcctgggtattgtaatggctcgtccctgctctgcccaccgccaatcgcagctcaaggctgaggctcacatggttactcaggcatgttaaatattagtccagcaaaaagagcaacataggttttccccaaaaagcgagccaggacttgccttttttccacacccaatggggagtggctgcccagctcagatgagagccgagtgtccagcactgtggcctttagccccgcaactttcaccaaaaacagaagacagacagatacccatgctcagcatttaaaatcactcggccggccaggcatggtggctcatgcctgtaatcctagcactttgagaggccaaggcgggtggattacttgaggtcaggagttcgaaaccagcctggtgaaaccccatctctactaaaaatacaaaaattagctggatatcgcttgaacccaggaagcagaggttgtagtgagccgagattgtgccactgcactgcagccatggcaattgagtgagactccgtctcaaaaaataaataaaataaaatcagttggtggctttaggtggtgtttggttgttcctggtgtacatgtggctgtggaagacagaaaagtgtcttgaaaatatctgtttgctgtttttaagaatgaaaaaattgtcgtacaatatgggtcccacctttcttctaagtgctccaagtttttaattacagttggttggaatgagagaaaaaaaaaagcacagcttctagctgtttcagctcccgctagtgacaaataaagccagtcctagtgcctattaagtgaaattaaaaggcttcagtgacgccagtttgaaaacatgtgtttgtagggaagagtgaatggcacctgtttacagggtaattaacgtcgcaaccccgactccaca

SEQ ID NO: 48119 - DNA, 684 bp, Homo sapiens
tgttggccaggctggtctggaaatcctgacctcaggtggtcgacccacctgggcctcccaaagtgctgggattacaggcgtgagccaccacaccaagccctgttattattttttttctaacagttttatttaccaagatgtaatttacatgccacaccatacagtcacccattaaaagtgtacaagtcaggagttctgagcacatttacagagttgtgtaatcattaccctgttccaattttagagtgttatcatccccaaagcagaccttgtacccattactagtcactcaccatttcctccccacatctgcaaaccctgacccaggcctacgcaatcacaaatctactgtctgtctctccagtttgccttttttgaacatcttacataaattaaatcatataatatgaagcttttgtgactaaaacaatgaaaattcaccgaatgtaagacagaggttgacagaagggtaaaatgacccatctctatgccttctacagtaatattggttcaaatatgatgatataggtaagccgaaagaaaagaatacaaaaacattaatcaatagaaaggagaagtagatgcgtataaatcagataaagtaaactgcaaagcaaagaaaaattacagagacagaaagggaagttaaagaatgataaaagggtcaaatcactattaaagcat

SEQ ID NO: 48120 - DNA, 623 bp, Homo sapiens
gccagcctcccaaccatgtcccacgttgtgctgttgagagctgctcagggcggcgctgctctaactggtgctttggatgtattctaagagctacagctcagaccaggagccccggagaacaacaggccagttcagaagattacagcaggactgatggcgtgaagtcggggagaagctgctgcgggttttctgttcaattcccatcctgcactgccatctccaggacacaggagtcctcgccaggatgatcaaagcggcagccaactcagcgggaaaacgtgcaacatcaccctcgtgaccagggcttttgatccgggaaggtcggagcagattgggaacatttgctcatcattcctctccctttgctgtgcagcggtgagaaaatggggaaaggcagttgttcaaagaacatctcctacgctattagctggtgagaccagaggaccaagacagggagtgccccggcccagcgctcacaccccatggcaatgttcctagccggctacagggatcttgcacaatacggattccaaggcagtagcctggggtggggcctgagagcaggcacttctagcaaatcccagatgcagctcatggtgcaggtctgagccatggtcaatccg

SEQ ID NO: 48121 - DNA, 1534 bp, Homo sapiens
ctgggtgcagctgcccaagggggcactgcggggcccgatgccgccctccatccaggtcaccactgcacctccacgaccacccacagaggccccactttgcaggcgagagcccgggctcagaggccagtggccggcctgcgcaaggacacgcagcaggtgaaccctccgcaaggcgaggagcagggctgggaagggcgagggcgcctctccgcgcccctcccctgcccggccacagagcccggccccgccccgggccctgctcgcggcccgccctgcgccgccactgcgcaagcgcaggaggagcagcgtggcgcaaccttaaggcgcatgcgcggccggcgcagacttgcggaaggctccgttcccctcgcgtgaatccgccgatccgggctttggggcccgccgggagctctgtttataaacacacggcgcggctgccggcgaggggtaaccctaaggggagtggggtcggaggtcagaggtcagcgggcgcggggtcgccggctgtgagaccggccccgccaccctcggggactgctggctgcgcagcgtggccagccggaccgccctactgcgcaccggggctgccggggcgccacgtggtgcgcacgtggtccggccccggcgcggcagctcccctcccccaccacgcgagcctggccgcagcgcccgctggcggcgcggcgttgcacattgcgcgtgcgcacaactcgccgcgaggcgccttccggtggcgcggcggggtcggttgcctcctcgcgacggctgcgccgggatgttccggggcggtggggtcgcctgcccaatgtcgggtgcgcgagtgacgggtggaagctggatttgtgcgcgttcttcaatgctccaaagggaggagggagcctccgagagtccacgtggggccggtgggattcgcagggtccgttttctaaacattgggtgtcctcgaacctgggggcgcgggctgtgtccgcccccagcagggatgaccatgcctgggtcagtggctgcataaataaataaacgaatggggaggaaattgataaaatattaaaagagtgttgtttcagagtttttactatgtcacctcttacagatttatgagagtttgttgttttttggagaagaggggtctccctatgttacccaggctggtctcaaactcctgggctcaatccatccgtccgcctcagcctcctgaagtgctaggattacaggcgtgagccatggtgcccggcctgttgatgagattctacgtgaaatatattgggcgttacctaagcactcagtcagtggtagttcttatagttgttgcttaaaaacagaaagaaatgtcataccgtgttctaaaaggatttgagaaaggtttgcaaagactaaaaagcaagtggcagggaaaaataacatacgcaaacttcctcctgactttttctgccattttatagcaaaggctcagaattgcattgccattgtcggttgtttcggtaaaattagtgttcctcaagttatctactccagggacattttttttttcttg

SEQ ID NO: 48122 - DNA, 2881 bp, Homo sapiens
tttgccaccgcactgcagcctgggcgacagagcgaggttagaatataaacatatgtattgtatataatacacatatattttatcttctgtctatcttacactttagggttgggggcctggagtgtctggggcggggagactgctgaggtcatccgtccctttctccaatgacccaggctcaaaactttgtggctgggcatttcaggggtcccctcttccccctggatggaggaaagggcgcccgccgcctgcagccccgcggggaggggacgaggtgcgccgggcccagctctcccgggggcccgccggccctcccggcacaggcctcgcccccagccccgcgctggcgcgcgccacgtgggctacgctgggcgggaccggcgggcgggcgaggcgaggcgcacggtgggctgggaggctccgctccgcgccggcgcgatctggcccgggtttccgcgcccgcccagcgccccgacctccccgccccccgcgccgccgctgcagccgccgccgccggaggccgctcggagccgcgcgaacatggccgaagtcggcgaggacagcggcgcccgcgccctgctcgcgctgcgctcggcgccctgcagcccagtgctgtgcgccgcagccgccgccgccgccttccccgcggccgcacccccgccggcccccgcgcagccccagcctccgcccgggccgccgccgccgccgccaccgccgctgcctccgggcgcgatcgcgggcgcgggctcctccgggggctcctccggggtatccggggactccgcggtcgcgggcgcggcgccggccctggtggccgcggcggccgcctcggtacggcagagcccggggccggcgctggcgcggctggagggccgcgagttcgagttcctcatgcgccagcccagcgtcaccatcggccgcaactcgtcgcagggctcggtggacttgagcatgggcctgtccagcttcatctcgcggcgccacctgcagctcagcttccaggagccgcacttctacctgcgctgcctcggcaagaacggcgtcttcgtggacggggccttccagagacgcggcgcgcccgccctgcagctgcccaagcagtgagtggccccgcgacccccgccgcccgcacccggggctcgcccacgacctcgatctctgaggcccgggcctggggatccccctccagcttcctcggcctcgacccccaccccccggcccacccccggtaacccccgaccggcctggactccggggtcaaccccgacccccgcctcctggctccctaggatcaccccgaccccgatcctggaggctccagcctgaggatctcctccactttccccggtctggataccccgtcgcccccgacccccaccggcctggactctggggtcagccctgacccacaccttgcggctcctggggtcacccctgacctcatctcccaccggcctgggctcctggagccacccataccccaagcccatctggctgggcctcttagacccctgacccagatccctgctgctccccagctcccatcggcctggactccggggtcattctgaactcccactggcctggatccctggggtcatctacgtccctaccctgcctaaacacgcaaggttaaccgcgacccccacttcctaggcccccccggagtcacccctgaccgctaaccccacaagcctgggctcgcagggccactcccaccccagctccacccagctgggttactgaggtcaccttgaccccagtccctgctgcctgggcctggggatcaccctcaacccttccaggtcaccctggacccccaccagcttggactccagggtcaccccagcctgacctggttctcaggaccacccccgacccccaccagccagggcctcaagtcaccccagtgcctgatgcctgccgtcctggaccccagtggctacccctgaccctgtctggtctggacccttgggccacccccaccccatccagtctgggtcctgggggaccccaacacactcacccaggacagtgggagggtgttgctccgggaagtgcgaggtccctaggagtgtgggctgtgctgaaggagcagaggcctggcggggaggggcgaggacaggaagcctgtgcctcagtttacatccccaactagtgctccttggatggagtagcgggaccccaagatcaaattagattcccccgggcccgaggtcaccagggcagagagacccagctgggcctggacggctgcccaggcctgtcggtgcctttggtagcatcccgtggtcacctcccgcccattccggttccctcctttccagctccactgccctccgcaccctctgctctgccccggacctcaaggtctgttgatcaggagaaagcctgtttaattactcatttcctctggagccactttctttttctatttagtgattgcctctaactcatcaccagtgtttatatttcttcaatgtggttcttgttcagggttgtctgtctaattactcccttttataaacgccttgcgtctggggaatttttgctggggtaattcccagggcccaaagtttgtgtctgtaaacttctccccttttttagtcttggcatgtttggttacagatatcgcattgaataatttaaaatgcaacatcaacaatgactcactcccccttggggcgtgagaggggaagtatacctttttctaaccgtgctgaaaggtgtgcattttggtaaaatcagaactcaggagataacaaatttgttctttgcctcagatattagtgtgttctctctcttccataaccaatacactctctccgtttggggccattaaatgcatttcctggccactctcccctccagtaagaaaatg

SEQ ID NO: 48123 - DNA, 315 bp, Homo sapiens
tgcctccctccttctagggggttggctggaactcgggccccgctggccggcggtaggagctggaatgcccgagctctgagaagctcttcatctatcagcagtcagctttccacttaagcagagccaagtttagaatgaatgaataggatattttgaaatgctctggtgttgtgaaatacggaacttggcgagttcttgcggccatcccttttgttccctgctgtgactgactggcaggaacctgggcttgtcaagtcagtctgtagtgcacgccgttagattggttgtcattggccaagccagctccgggcaccc

SEQ ID NO: 48124 - DNA, 1848 bp, Homo sapiens
tgaagccaagcatttctattttgtccaaatgtgtcaatcaggggtctgtgcctcgttgtgtgtgtgtgcgctgcgtggctccacggcccccatcctagactgtggtccaggccagggctctgggctcagcagacagccaggctgcttccactggtctgtgaagcttctgtctcaatgctcaaggtggcctcagtgttcagcatggttgccagtgccccggtcattatgtttccattccagaggggagagaggagggagggatggtgggcggtgatcctctgggtagctctctgcccacctcttctgagactcccacgagggctgtgccgtaggccacacccactttgcattgctggcccccagctgcaaggggagcaggaaagtcaccttttagctgagtgcgtggccacacagaaaaatagtggggacagggagaggagaagtgggtttggggggagccccgccctcctaaccctgcctgctgccctctgtccccagcaggagctcccccgaggccatccaagcgcggtgcacccgccacccacagcgtcctccgcgcccacgttgccctaaaccccactgtgctgtgctctctcgcagttcctgcaggcgcgcgttctctctctgaatttgtttcatttcactgcgagttggggtcgcgggggtagatcggagctgcctcttgagaatagcagtgcccaggctttggcccaggtggccggaacgccccttggagcaccgacgccatcggctccgggaaatgcagcgagcacagagcccagtcccttggtctgaccgggggcgctgcttttgttcagaaagcggtgggggtgatgtcatcggattttttttcactgctgttgcccaaagtgaaaccgggcttagttgttgtctcaggagcccagccagccagggggacacggcctcctgcccacaggcagaggcccggggccagatgtccgctttctctttcgctccgcaggagtgagaagcaaggacctcactgcctttgtgcggccgggcccctccggccagtctgcgtgaacggactctccgggcctcgcccatgctccgggcgtgtggctgtgttgggaggacgggagctctactgcttggcagtggacacaccaaggctgccgactggcccagtgggtggcgatgccacttacatgtgatttctcaatctccgtcaactgccgtggctgcccgggctgggctgccctgtaggtttcagttcttcagggcaacaggctgggatccaggcaaggtgcctgcactcagaggggtagggagccaggggcacatgtgctgggcgtgggctggggcttctggctggcaggggtgtgggtttgggcctggtgggattccccatattaggaaggtgagctgagctcggctgcagtggctgaagcaaggaagtgatttgtcaagccatttagacactgtccctgttttctttcaacaaacagaactttttttttttttaagcagcgaagaccttttgctctctgttggggtgtgattggggtttgcatttgggggctctcttgagctttgccgctgtcttcaaggatggtatctaaagggaaagtcttaaaataaataactttgaatttggataggaatgtctatgcagtgagggacaggaggcttccgtgtgtttcactagaacgttcttgtttttggcctacgaatgcttttacttaggaagcacgagacctgtgctgcagaccgtctgttggagctggccgcggcaggacggcgatcaccttcctggcaggcccctcctggattctgccctctgcttctgaaagcgtttcctccatcagctttagcaaaactgggcct

SEQ ID NO: 48125 - DNA, 1520 bp, Homo sapiens
gacttaagaggacagaattgtggagtattttcaaatagccttgggatgcccttctaaacctcaggggtgaccgaccacccacccttatcccccaagattcactcgctgggccgtgcctcccagacagcttctcatcttggaaacagtctcagagtcccttttgtgtttggaagtagaaacctggtgcccacaggcctgacagcgcctggcactgaacgatgcggcccagcctcctctgaccagtatctcggggagaatcaggactggcccagttgagccagcttaagtgcctgattttctctcttccatgtgggcagcctggctagcagacctatgggaggagccgcacatttgtaatgctgagtcacttcctttgaagcgggtccctgggaagaagacgcaagaggaccccctgccgacagccaggcacccttcgtcaccctctgacctgctcctcagtcccgtctttcaaaaacgctttgacgaagagcaaagggactttcatatgaaagaggggtgtctgcgcacgtccatgcaggattttacgtagattgactatttaaacattgctgcagatttaaaaacacagtcaggcatagacccagcagcctggtgcttcatgcaggttccactacaagagaccttagcgtctctcaagtgttgagtactttgcccgtcctgaatgccttcgggaactctgaaaagcgcattatcaccggtggcttatgtacattctttcttaaccccctcctacaattttaaacaagagccttttccaaacagctgcgcaggcggccagcgttccttatctctgtgtgggcaggctgctgctttacattgtttttgtttttgtttttgttttgttttgtttttaactgagtcccacagttagcaacttgatagttgctgcctcatcagtttagaaattgaaaggtgacctggataagtaatgctcagctttgtaaaaggtggcagtttcttcaagccagatgaaccctggatactgttcacagcacactggtgttgaccctgacgcttgcggctggctttgtttgcacttggtcgtctccagtagaaaaaccgaggctcacggttttaagcccagaactgatcgtgaagccggtccattaagctctgggtggataatgcacgctctctgcgactcccgcctgccggagcaggggtggaattgctccttccgttgtcagatcttctaggcagtggcagggaatcatcttgaaaatgtctgcataggtggttgccgtgctatttcagtcttccagtgtgtcatttgagaggtggcagatcccacctgggtgccacagcagttgccctggcagacaggaagtagccgtgtctgtctggagcctgcgtgggagatggcatcagcggcacttgtctggggatatttatatctcttctgttctcacacacagtagaaagacaactgacggctgggcacaatggctctcgcctgtaatcccagcagtttgggaggctgaggcaggtggatcacctga

SEQ ID NO: 48126 - DNA, 1941 bp, Homo sapiens
gcgggagccaggaaggtggggggccacccctttcccctccttccgcccagtcctgttctttgaaaccgccctgtgcaaagaccggattcttgttggggagaattctgtgcggagaaagtagtaagttagggactggctgtctggctttttggccttccattgttacaataaaagcctctctgtttacatccgtttatcttagcaccctggaattcaattgagtgtttagaaacctcagaggcccttgaggttttccctgccaagatacttttcagtttgagtttctgctgtagggtggagccggcgtgtttacaaacactccctgcccttccctgccacctccccactctcctcctctctggctgcgctccctaacagatcgggaggtgggagcggggccaggccagaagagctggctgcctgcaaggctgtcccctcccagtgccgccccgcccccgcggtgcctgccttcctaatttggtgtgcattcgcctcgccagtcctcattggccgtggagtggctggctcggtgtaggccgggctcgcccagggcccctcattcccaggagtcgggagtggcttgggagcggctttttcctgggggagcctccctgatcagctgcccctgcccccgccccccgcgccaccctgcgtccttcctttccgtttctcgcaggccctcgctccttttcccagggtgggtgggtatgggtgtgggtgtgtggttttgtgtgtgtgtgtgtgtttctgatttatttttttctgccctgaagtactccacccagaaaatgaatgaactctctttgaaataaattctgctatctttagcagaagtttgaccttttctttcctttttgcaaagaaggatttttacaggccaggcgcccggtggctcaggcctgtaatcccagcactttgggaggctgaggcaggcggatcacctgaggtcaggagttcgagaccagcctggtcaacattgtgaaaccccatctctactgaaaatacaaaaatgagccaggtgtgtaatccaagctacttgggaggctgaggcaggagaattgcttgaacctaggaggcagaggttgcagtgaaccaagattgcaccactccagactgggcggcagagcgagactccatctcaaaaaaaaaagtgtttttaggaaggaattaaagtatttaatgaaagaattcaagtagttaatcattttctaggttccatcagacagacaccagtctaaaaagtgttccttagaggtagagttttaagaaaactgctgaaattcagtgaaaggacattgcacagagtgactgtttttgctcatgagggcaagacttcaagagctgtttctcttaaggctcttcctgatttctccaacgtggagatcaaaaatgaaagtaactcgtacaattcggcgaaggtcagcagtatgtaaatatacagtaaaaatgcagcaactgacttcaaaatctttcccttttaatcatgatttttaaacagttctgtcttattgctagataacattcagtcctaacttggtttatgttgttttgtaaagttagaggtcttttgagtttggaggttattggatctacgttagaaatactctcctttttctgacaactttggtagcttcctgcagggtgattcatctctttcaaagtttctggttggctgggtgtggtgacgcactttgggaagctgaggcaggaggattgcttgaggccaggagttccagacaagcctgggcagcatagtgagacccccatctctaaaaaaaaaaatttttttgctaattagccaggtgcagtggctcatgtctttagacccagctactcgggaggctgaggcaggaggatcgcttgagcccagcagttggaggctgtggcgagctatgatgtcaccactgcactccaacctgggcaacagagcaagaccctgtc

SEQ ID NO: 48127 - DNA, 2419 bp, Homo sapiens
cttccatccaggggtcttctcggggcttatcccttcaaggcctaaccttgacccaccctatctacgcaacattgattcccacccctaccctattccccagaaccttcagcagtgcctagcgcagctaggactcaatcatcgcttgtccacttaatgaatgactcttggcacaaatttcctcgtccttttctgccccagacagacaccccacaaacatgaagttacccttgatttttccactttcttcctcctgcctgcaaattcctcaatcacaggtggtgcaaatcctacctctaaatggtactgaatctgcctactttcggggcaacctcccttacctggaccacaactgcaccagcctcctttctccctcaggagcttcccaatccattatctcccctgcggccagagatcagtttcctcctggggtgcatttaagccataggaagcagatcgctaccctaggcccgtccctccccaccccttggtctggacaccctctgggctcatcttaggccgcagtcgccgaagccttcctcctccggttggacccccaaccaggtcaggctgtcatagcgtttatcatgacgctggcgtgtcgccctgtgtccctcggccgtctgcaggatggcaaacttatggccagggcccagcacatttgggcacccaacacatccgttagaatgaacagaaacttcccctctccgagcctgtggcctcatctgtaaaacagagatcgcgagatcccatgaataccgtggggattgaataagggattttttcgtttcaagcagcaggaacagcgcgggatgggtgctcaataaatgggagctcaaaaaatccccaaaactgcccagagccgcggctattccttgcaaactgctggacactgctgggctcagcccacaagtgtcggagtttgcatcagattttcaggtcgtacttagcaaagggactcccgcacgacaaagctgtttacgaaacagaaaccagaactggggcagtgacactttggggccagcaatgccctctcccaaagccccaggcgcccaatttccgccgaaatgctttccggggtcgaagggcgccggggctccagagtgccgaggttccggggtcgcgcgattccgcagctcccaggcgccgacccggacccccggccgcggcacctacgccccgccccagtcgctccacgccaaagcccattggtcggcaacctgtccctcctgctcatgtgatgcggcacgtgacgcagccacgtaaggccgctgcgctcacgtgacgcggtcccggaagttgaccggggtgcggagctcctgggctgcagctcctggagtttccgaggttcgtgcgcgtctggtggcggcggcgtgatgttctcggcaggagcggagagtttgctccaccaggccaggtacgggggagctgcggccccggccctccttcctgcatctctccctaggggcacacgggggtgggtctcacagggcaggggcttgggcgccagccttgcaggaacccgactggactcgccctcgagacttggggatcgggtaaggcaacacggcggccaggcttggggtgaggaggtcggggagggtcatggtgggtccccggaggaggtgacacttgagcagagtcttggtgagtgaaagcaagtggggtgggacccagtcgacagtttagtcaaaggcttggcggtgagaactccgcgtctggcaggaaatcgggcagccgggagatttcagtgcctcacagtcaagaacgcaaagtcacagtgtccggaggcctgctaaggaataaggctgtgtgccaggctggggagctggaggccatccgagggctttgcggaaccgtgggagggttttgtgacttaaaaagatctctcttgcgcggatgtattagctaggctgagaaatcaccctccaggctggtttcaggctgtgtctggactcccagtaacgagtgagtagctccttcctcaccaactaaccagtcatgggggaaaacagtgtaagccaggactgaacagactcacggtccaccaaacaggcaaagacttcatactacatgtttaaaagaagaaaatgctgaccgggcgtggtggctcacgcctgtaatcccaccactttgggaggccaaggcaggcggatcacctgaggtcaggagttcgagaccagcgtgcccaacatgaggaaaccacgtctctactgaaaatacaaaaaaaaaaaaaaaaaaaaaaattagccgggcgtggtggtgggtgactgtaatcccagctactcgggaggctgaggcaggaggattgcttgaacctgtgaggtggaggttacagtgagctgagatggcgccactgcactccaggctgggggacagagcgaaactccgtctcaaaagaaaaaagaaaaaaagtaaagaa

SEQ ID NO: 48128 - DNA, 852 bp, Homo sapiens
tccagcctcgtgggggagtcaagtctccgtaggcggagagcccggatgcaggcgcggctaggctgccctctctatggtgagccccccggtccctcctccgcagcacccggagtgcctctatggttcttcctgtcgttagtcgggagggggcgctgtacgcgcgctgtacgcttgcgcgaggtgacgccggggcagggccggaaggaatgcagcggctgccacggagctcgtagctgcagctttggaggagtaagcggcgtggtagcgaaggtcgccgaacccgcctggctagccggcgagttgagtggcgagtgagtgtcggctgcggggcgcgctcgagcttctgggcgggtctgtgaggcgaggcggcctccctgcgtgacgcctccgttgagctgcgggggtgggggcgggggcgcgggccgtgagcaccacagagctgaggggcgcggccgaggcccgggcgggatcgggccggggagctgggctgggcgtctccaagccccctgcggtggcgaggcgggagcgacaccctcccgccacttcgcgaagtttcgcgagccggcccctcgggccgcttccctccctcgggcccgaggccgccgcggaggcggtgtccgtgcacccgagcgcggcctggaggagcggcgggaggcggcccgtgcctgtgaaccccagcccaggcgggcggcgtttttcctcctctcccctcacatctggagcgcgtgttgttccgtgaaacttggcgactgtcacccggcactcgcgagggcgccgcaagtgcgtcagacctttctgcggggcgctgggggctggcccggctcgggggtccgggcgctgggcagggagcga

SEQ ID NO: 48129 - DNA, 1022 bp, Homo sapiens
ttctattttctttctcttccttggaaagcatcgctgggcatttatcctgtcctagtatttgagtgaaacttctcttagcatttcagcgcagtgaccacgatacaccctttcctttccttctctttatgggaaactcggttctaacccagaggccttgggctccaggacccagtcaggcagccctggacttgaccctaaaagggagtaaagacaaatgcgaagttcaatcaggggttcagagctcccaaagctcatagcctggagcttcttaacctttaggcagggtagagacatttaaaacggcccctaaacttggggggcgcgtaggctcatgggaaatagagtagggtgcttgtcctgggaccagctgtgggccccggaggctgacttccggtgcactcctgcgcgtgtgcacctctctctgtgtgcgtgttcgcgcatgcgcgccgccgctgcactgccctcgcttcctgtgcgtcctcaggtcaccgcttgctctagttcccaggctttggcctccagtggacgagaatcgcggagcctgcggggctggaggttgagcgcccgggccagcacctaggcgggcgcgggggtgtgcaggccagggttcgcgcgggccgggtggaggcttgagcggggacccccgagcttgagccccggagccggcggcgctggggccagaggggccggacgggaggtggcggaggtggcggcggaggcgaaggggcggcgggacgcgggcctggcccgtgtgtgtcctggcggcctggcccaggctgccgctgtacggtgagcccgagggaggcggatctgggtcccgggaaggacacccgcctggatttgccccttaggcccggcccgggcccctcgggagcagaacaaccttagtgaggtggacaggaggggacctcgcgagcagacgcgcgccagcgacagcagccccgccccggcctctcgggagccgtggggcagaggctgcggagccccagaagggtaggtcttgggttttcgggcccggagcg

SEQ ID NO: 48130 - DNA, 602 bp, Homo sapiens
gagactctgtctccaaaaaaaagaaaaagagagagagagaacgagagaaagagagagccaagaatatctccacgggatcatagacaaactggggggaggtggtcaggaattctgtggacctgtgcttggcagcacccactcgaagcaatcagattaacacctggagtagacccaaaacattccccacacgcacccagacccattgtcacaggtaccaggggcttagcataagctgtggccagcacggaacaaacgataagccgctctggcacagcggtgactcctaggaagccaggcttaaagatgacgtcagagccatccccggccatctggaaggctgcctgcccaaagctgcgccttctcgggagaaatcacaggaagaatgccaagctaccagttcctgactgaccagggcaaaaggggaaattctctgaatggtgatagcagcctccaagccacacacacgtccagtgggaaagggcaaaaatctaactggccaaggggcttaaacacaacttttttttgagagagagacaaggtgtcactctgtcactcaggctgctggaatggagtggcatgatcatggctcactgcagccttga

SEQ ID NO: 48131 - DNA, 1309 bp, Homo sapiens
cctgggttcaagcgattatcttgcctcagcctcccgagtagctgggattacaggcgtacaccaccaagcccggctaatttttcttgtatttttagtagagacggggtttcaccatgttggccaggctggtctcgaacttctgatcttaggtgatccgcccgccttggcctcccaaaatgctgggattacaggccaccgtgcctggccattgagtgttattaagaggagggtacgcagaaaacagactcccgccagctctgccccatgcgcatgagcggccgccgctcgccctcagccaggcccagcgcgccccgacgcgtccccacgcctgcgtgatccaccggaacccaagcccaggcaggcggtgagagggcggggcctccgcagtgcgactgcgccgctcgaggccgtgcgtcgcgggggcggggccgcgcaggcgtaccgggtgccccggctctggagcataaacaagagcggggacgggatgaggcggcggttgatcccagggtggcgagtggcggcgaccgaggcggcgagcggggcccggcgccgaccctgagtgcagcctgacccgccctcgcgcgcgcgccctccccggccgggcccactcgccgcgcgcccagccatgaacctggcgagccagagcggggaggccggcgccggccagctgctcttcgccaacttcaaccaggacaacacgtaaggccggggtcgggggtcggagtcggggtgaggccagggtcggacccgggctagggggagggcctcgctgccaagctcggcggcgtcgcaggctcggcctccccgcgggccaaggcgcgcagaggcgtccccaggggcgggcccggggcgtgcagggaggggcgccctccagggagaccctcgggtgctggcctggagctgcggtcccggagcgggagaggtggtggagagggggctgctttcaccctcttgcggggaggccccctggcttcagacttaactacttctcgcaaagttggggccgaactttggggcttgacttgtcttggccgcctgtggagcgctgggtgtgggtcgcttcctctcctctcgtctcctcttcccgctgcttgctcagcgtctcccactcactctcctttgaatcaggcccttctccttgtcttttcatcgtcttaagacccttctctctctcttgattttcttttcttcgtttctcactgtttttttgtttgtttttgttttttggggtttgttttgttttgagacagagtcttgctctgttgcccaggctggagtgcagtggtgccatctcagctcactgcaacct

SEQ ID NO: 48132 - DNA, 411 bp, Homo sapiens
agcctcccctttcaagccatctctcccctcaaactattgaccagagaagatacaataaaacgtcggctcacttccttagctttcctgcctgggcctttgttcttcagtctcacacccgagttctgtaataatgatgtcaccgcttatgggtcacttctgggtcgtgaattatcctggatcttttatcttcattacctcatttgtttcccctcagcaaggtaaacagttctctgtttcatagcaagggctcagaaaggttaagcggtgtgcccggggccgcccaactgggcagcaacagaggggtcagactccaagtctgactttgattctaattatgctagactatcccaatagcaccttgtccttttcttttccctttgaaatggccctgaaattctgttaccctttgac

SEQ ID NO: 48133 - DNA, 1134 bp, Homo sapiens
ttacaagcatgctacagttacaaactcttccttggtaagattttcctccccagagcgctgttgtcagactcctggagctgctgaggccctgcaagctgggtagacaagggaggcaggccgggccaggtgagctcccctgcacccctccccgcccccgccctgcctttcctgtgtttctctggaccctaacgctgcgagacacagacggatagaccatcaggacctcaggagccgcctgagtctcctcccaaccccgagctctgaggagggtggatggttttcttcacggccactaggtggtggaagtctcccaactgtgcagacatctgcggggctggtgggttggcgagctgtgggggagggtgccctggtcagactgtgtccttgggggctgggcggtcgcacccgggagcttcgccaatgtgctagtttgaatgaactcccaatgcaaaaatggcaaacagaggccgtggagaaacctggcttcctccgacaatgggaatttcactctgttctcgttaccgcctgtggatgaatgtgggtctcggagggcgcctctccctccggggagagggtgaccttgccacagtgggactccattccagcggcagctccctcccctgtctgtagccccacggcctcctggccgcctgccttcttattggccacccctcccctctcaacgacctgtttcctaatcatgccattcccccgcgggagagccgattcatcaccatttaaaatggtgaatcgataaagccggtcaggccgggcgaggtggctcacgtctgtaatcccagcactttgggaggctgagacaggcggatcacctgaggtcaggagtttgaggccagcctggccaacatggtgaaaccccgtctctactaaaaatacaaaaattagctgggcatggtagcgggcgcctgtaatcccagctactcaggaggccgaggcagaacactaacttgaacctgggaggcggacgttgcagtgagccgagatcgcgccactgcactccagcctgggcgacagagtgagagtgcatgtcaaaaaaaaaagaaagaaagaaaaagaaaaagccagtcagatctagagagggcgaccggagcatcacccccagacggcttgactctg

SEQ ID NO: 48134 - DNA, 1857 bp, Homo sapiens
ggctctcgcctatagtctctggaggctgaggcgagaggatgggttgagcccaggagctgggagactgcagtgagctgtgactgcaattacaacactgcactccaatccaggcgacagaacaagacctggactcaaaatataaataataacaataaccagccatggcacccattcgctaaaagctggaatgcaccaggcaccgtgcagctgatttcaaatcctcccagcaacaccctcaggaggtggcagcaaagcacctccagctgggtgctaccactggccagcccccagcggagggattccgtgtgtaccctagagctacctcctttaaggccctgtgttgtgagcactgtttacagggggcatggataagttatgtggctttgcaggagatgtgggctcctagatggccccggtccagcctgtgggagctcacagatcccagtccagcctctgagtccccagtgcctcccttctccccaataaagggcctgtatacaagtgctcactgaccgcctcccaggggcacaggatcccagaatatccaacccatcttctttggggtacatgtggggaaactgaggcaaagaagggcagggcctccaccttgggccccaaagacaggagtgggcagagcagcaaggggtgccctcgggccacacgccatcaccaccaccccgtgtccggcccccaacactccagtccagccaggcccagccccctcaccggactccagcgccaagccctcgggccccggggcctcggtggccagtcagttcatccatgcggcccaagccggggcagcagggcctccaagccctgctgagccccgggcttccgccttgctgtggcaggcgggtgggtagaaggctccggaagccagcagccagggtttgcgcaagagcttacatcagccgccagctcttcctgccgcaggctgcacggaagcctaatggcccaggccggcccctgcccgggcttgtgaaacccgcccagcagcacccaggcccggatgccagccaacggctcctgcccaccacagggctcaatggcacccaaagcccctcctcccaggctgggcggggcagccgggaacccccagcatccccagcaaggcagtgccgttctcagtgcctcagtctgccactctgtaaaatggacacacaatccccactcagctatggcgatgaggccagcgtgccacccccctcacctcactctccagaacaaacaaacttctccctggtcacgtcaggagcctgcccctttcccgcctggcccgtcaggcacgaactcccaggcctcctagaatgctcctccttcactcccacctcgggtctccctgggccccagagaagcctccaacagccacacgacccaagcaggccccaagtgacctgtgaccacccacaacccctcggaaacagatctgccagcctccttgtggatttcatgcctctgtcttccccgagagacagttccctccttgagggcggggactatcttccttacttcctgccatatcacagtggctggaacctgccacctgtgacctgccacccaggacatacttctatttgggattacccaattgcacgagtgttgtttctttttttagagacagggtctcactctgttcaattcacccaggctgcagtgcagtggctcgatcatagctcgctgcagcctccaactcctgagctcaatcaatcctccagcctcagcctcttgggtagctgggaccacaggcacacatcatcaggcccagcaaaaaaaaatttttttttttttgagatgggagtttcgctcttgttgcccagggtggagtgcaatggcgcgatctcggctcaccgcacc

SEQ ID NO: 48135 - DNA, 365 bp, Homo sapiens
aaaaaaaaaaaaaaagaaaaaagaaaaggaagggggaggtggggaaaggttcatacacaaagatcagcaatcaaaaatggcatcatattcctgaaaagtagcagtcgaatatggaaggtgatgttgcaattctttcaaaatcctagagggaaggccgtgtgtggtgactcacacctgtaatcccagctactcaggaggctgaggcaggagaatcacctgaacccgggaggcagaggttgcagtgagccaagatgacaccatcacactccagcctgggtgacagagcaagactctgtcaaaaaaaaaaaaaaaaaaaaaattcctagagggaaagtatttcccaaatagcactcaagtgtgaaggt

SEQ ID NO: 48136 - DNA, 12555 bp, Homo sapiens
aatactagcttggatgggattcctccccggggatctttctccgagggcccctccagctctgagctctctccagggaacctccctcggcctaggaggggctttataagccctgacagcgctcatccacgtccgcagagcccaaccttaatgtgcctctccctagctgggtgaccccaagcaagtggctcaaccgctcaggacttcccggtacaaaaataaacaaataaagatgggactgataacgctggcaagacctaaggtgccgacagccaaggaagagagggaggtgcgtcagaagggaaaatgtagcacctgcaccccacaaagaaaacgcgggagggggaggatgtgctggcttgaggaatgtgtaatccggcccagccccaagcagagagtgaatgggagctgctcccacctcgtggctaatgggattagcacgggcttggctctgggcgttggcctggggtccgaggtctccttgcggctactcgaagtgggggagggggacagccagaaccagcaccggcccccacctttccctcccgggtgagcacggggttcaagggggcggcagctgtcctcctgctgtttcctccccgacctcagcctcggcgtgcagaagtcaggcagctcccagcgagcgcagaaggtgcgcagaggcagggctccgaggctacctcccgctgggcttccgaggctggtggcttggccttccctccacctcagcctcaccatccagcaaatgggcattaggccgtctgactgctgcgtcagattaggcgcggccctggcactgtgcatgcatgcatgagtagtagcttgttttcaccgcttcgcattagggcactttgccttgccaggccggagccagatcgcaggcggggagtgcgcgacgccccttcccagcctcgaaaaagccaagcgcaggcccagccagccagagagacccgggtaccgattcccaggcttggggggggcccccctgccaccactccgggctggaccaaatgacccaaaagacacacgcatgcacacacacacacatcacggtggacttgtggggagcgcaaaaggggacagctcagatggtctctgtaccccagggccgccccccaagttcttcctcgggggtcccccgcgcccctccctcgccacaacacgccactagagaacaaacccttgccccggtcacagaccccgggcggaatacgcccccagctccggagggacacaagcaggtccgggggccaagacctggttcttgcgccccggctggcggggatctccgagctcccggcccccgggcgcgcgcccctcccccgcccggcgcctcacaaaggccctttgtcccgccgagcccccgggactccagttcctgaaaagttccaggagaaaaatcaaagagagagcaaaatcggcgagctccgccgagcgggcggggcaaggccgaggtggcagctcctgagagaccccaaggaagaggggagcatcgagggctactctggaaattgcaaaaatccgaaactgcaattcgaacaggaggtggatttttttttttttttaagtcgagacttgggacgccaagcacaaaagccagggacagcccgggaaggagggaccaggtgtcctggggcggccgccgggcaggtctggaggtccccgagtctccttcccacccctctggctgcagcggccgcggactgactggagggagagtctcccgccccggcgcagcgcccgcccgggtaccgtccccaccgcgcctgggcagcccgtctcgggaaatggtggaggccgcgggaccttctcggccacctcctccagcagctcgatgtgagacccagggttttcccctccgccgcctgggccctgcccgacccgctctcttctttccccctaggttcgggaccgcgatggtccggtttcggtgtccctgccgcacctccgcaccctctttcgcgctggaaaacaaggggtccccgagggccggggtcgccgccctcctaccggggtgcaggttcccagggccgccgttctcccggggaagaaaggggcatcccgcccgccccgaggccagggtcccaaggctggggtcaccgtactcccgcatcccccggcgtactcccgcatcccccggcgctcggtaactgccagggacccggctcggcgcgagtggtggagctgggaacagaacccaggagggcccacgagcgccaaaagtagcgtttgccaagaaaaagattcgagctcggggagcgggtgtctcgcggggtgcgggggccggtttgttcttttctcgcccagattttgaaaactccagcccaggctcgtgccgccggggccccggggattggaatcgcccccggtggctcgggctaccacaccggctttcggctcacgagggccaagcacgctacggaaaaggtagccgagccgcgcgacactctccaccgccttggctccgggaccaggagtttcccagccctgggagccgagtctgcccgcacccccgtggccgaccgaaggagagtcgccgagccccggccgcgagtgcacaggaggacccggccgagtggatctccctgggaagacaggaggggacgggcacggcgcggggcacttacccgggtgcggatggagattcaggccggccatgtacttcccgggcggcagcgggccgggcaagcccgaggcgggcaagcgtccggcagtggccgcgcccacgcggtggctgtccatggccaggccggacagcagcggcggcgggggaccgtgcacggaccgctggggcccgaagtctcggccatccatcctccgcgggagtgccgcgatcagccccccacccggcccgcaggcctagctcagtgggacctaaaagttcggcctcggcgtagtcccagagtcctcgggcggcgggggctccgcggcgtgcatggcggcggccagcggggcttgcgctcggcggcgggcccgcggcccggggcgcacaggcggccggcggtggggcccctccgggcggccaggcggagctgcgcgaggcggcgcacacggcgtcttggcggggaggagacaggccgcggaagaaatagaaagggggaaagaaaaaagggaaaaaaaaataaagtaacaagtttcagaaagtcgcctcgcccttcaggatcggggggtgccgactgagtggccagaaatgaaatcgggagtagcccctttccactgaaaaatgaaatccaaactccttccgccggcggcttcaggctcccgggacctggctcggaaaagtgaccggcggcggtggcgcgctgcgccccagcccggactctgcctcggcggctgccgggtcctcccgaaaccggggagggctcctcggctgcgcccagacggcgtaaatacaaacctcctattttattcctaggcgtcaaatgctccggggtttaaaaccgtgaagccttgccacaaacggtccgaagtgtctcccaaaacactctggcactatctgatccgcaaagtttaatatttaaccttttggagacctcgcctcccttttccgagtttggtttttcctgagctcgccttgaaccgccgacggaatggtgtttttctgggggtgggaggagggagggtccaaagcgggtttattatttttaaagaggctcgtggtcccccccctttctccccccggggggcactgtgagtcccagagctcgagtccgaggacccgagacgtggcattctcgcctaaggactggaaagaatcctacaaaacaagctttggtttcattttccaacgccctggcctgagctcctgcagcccgaggacctggcctggcgtgggggatttgggggatgtcaagaggggaaggaaagggatcaagggtctcgctcctactctagcttccccccccacaaccaccccccaaaataacctacaaagaaagcctttgcaacgcgggcctgccaaggggcgcctcccccacctttgggtaaatccccctgtagttccaggttaaagctgtttgtttaaaagatttgtcctttgccgattctcgtgaggatgggagggggtcttggagcccacccttccctcgatctctgtctgcagcagctcacattcctgattccgggaggcctgggctctcttaagagaagccgatcacgccaaagccaccggctcccgggtgcccgcccggcgccctgcactccgcgcccagccccccgagcaggagaccccctcggctgcaaaacccctagccaaacccgccggccttcctctccagcctccctccccaactttgctaagggtgcctattttaacccggttttggttacaaacaccccctccctccctctctcccatcaggctctggttaccagattcgcgtttactttggaaaaatctaagatcgccacatccgaggatacatgtcttaaggaggcgatgagcttcccgtgatttttttttgtaagagattctttgggtagctttctttaaaagccagcgcctcgtagtatgcccaggcgccccagtttggggaagtcggggtgaagccccctggaacaccctcacactggcaaagaagctgcctcggctatctgcgggctccgctgcgttctccttacttttctccccctcttaaatggagttaaaatggctgaattccggcttttaattaaaaacagcctataatcgaaaacgtctcggcgtcccgggctcccccgccgcctgctgggaaccgagagaggaaccgccgcccctcggccgggccaggagggccggagcggggctgggggctcgcgtgggtgcccggggcccagcagcccacccccacccctcccggggcgccccctccccgccggccctggtccccgattctgcaatccggagccagacagtagcggggatccccccccgcgcaccccgaggggcaggcgtggttggggggcgagctggagaagtttggagaccatcgcgcccggccgggggccggcaggctgaccggcggcgtacctggcgcggctgggttcacggctccaggctccggcgacaacgactccggcggcggccccggctcccggcgcagctaggcgcccctgctgcccgccatcccgcggccgccgctcccctccgccacccgcagccgcctcacactttttgcccgcctttcctttttttggtagaaaaccgctccccgggccgagcgctcggcgcgccaactcctccgccctcccgcggcccggctcccgcagcccccggaaaagccagctttcctcccgccgagctccccgctttttaataaaatccaggtagcgccggtttaaagaatcccaaatctccatatacagcccgggattggaaaaggtacattacacaacccccctttcaagttcctctcgcaggatctaaaaaaaaaaaaaaaaaggcagcggaggggggtggttggagggggttgggggagggggagccctctccggcaaagaaacacgcattgttcccgggtgcccgcccccccccccagcccggcccccggccgccgcgcattggccgcgcgcgccgccaatcacgcgcatgtaaacaccttggcccacagccattcctataaaaccaattacggacctaggggctccagcagtttccaggctcccctcggcggggctgaatgatcaaaactggtggtgagaatttttccgggccgtttctaggcagccctccccctccaccagctcggacccccccctccctcctttctccttctcctcccttttccttctcccctcccccagcgtctgggctgagtgatcaaaatagaggaagatggttgtcgccgcaatccagggctttgcaaggcgcggtttaatgggccgcctgtcagcttcctgctcgcaggaggaggtgacaagccaagcgagccggagagggcctggggcccggctggctgcaccccgcactccgggccccggcccccggcctcccctggggtgcgcttctagtacgcgcggtggagacgccgaaacagacaagggctgctttttcccttgttttttttttcttccttttaaaacaaagcagcgattcattccctctcccccagcagcgcggtcgggtgggatgggcaggcgagaaggccgttttcctagcactgacctacgggtccctccctgaaacgcggtgtcagatggttactgattaatattttggagaggccgcggcggcaggcagcgggtgagtctctaatcttctaaaaggggttcctatagaaacgcggagcggggcgcgccccccgctcggcccaggcccgggctgcggcgcttcgcacagcgcgcccctccccaaagcccctctttgcgtgggcgctcccctctccttccccccccgccaacaaaaaatcagagcagaaaaaaggattagatcggctgagcgcgaactgaatccctctcgattctgacatttcagcctattagcatttctccacggagccttctgaaacctattaaagtgtaatattaaaaacctcttggctgggggcctctctcgccttccatccgccgcgccccctccagggagggcgagaccgggaaaaaaataaaatctgttgagctcagaggaagtagccgccaagcccaaaaagtgcttggctggccacggcggccgtagggggaagggagccccaatcccccagactttgtacttttattttgcgctttcagcaaaatcctttctgggttgagtagccgtgagctgcccgcggccgacctacctgaccgggggcgcagggagtgcggaccacgccagcaggactgtcctgggggcccccgcaccctctctctgcagccccccgagcccggctaggcattacgtaccctggaaaggaagcttggaggggcagaaatccttccaatgctgcctcgaagagcaactgcagtgataagattttaattaaaacaagagaagcccgctctttcgccccgcgctgcggactcagcgttttcgcattgcccgttctgttttttttaaatcaatttttaaggcaactttttgggaggggggaaaaatgagcgagttagtgcccattcgttctattttcttttctccacttttagaaaaaagtggggggaggcttcgagaacgaacgggggggtgtctaatttaattccaggataaatttgaggaaaaaagttcagcctcttgagggcagtttcaagttgcccttcctggagcttcctgcgttagtttctaggctgccctcttttggaagctgtagctccgctggggaggagggaggagtgagaaggaaagaaaggaacaaaaatagccggagccgaggggaacaagccacggtgtccgcgtttggagctgggcgtgcgggtctcagtggcggcctcggcattcggggcggcgggaggcgcccggtgcatccccgggacggccaggagcaaagacggagaggagaggggggttagagaaaggaggtattgtgtctgtgtgccttaggggaggaggggactgcaggaatcgaataaacgcagtcgagctgcgcggggctgctggaagcccaggcgggggaagggggccgtgtgtgggggcgcagagcgcccttgagccttacgcagaggtcttgtgtgttcctagttaagccctcccacgcccgaggccccatcgcttcctctccaccctctttacccaccaatattccaagcccagatcctaattccccaccgcattaccccgccctggatttggggaatgtttttctttattttaatatagctcaaggaaaaaatacgtatatcttgagagatttggggtggggaaaacaaaagccttgcggagtagaaaaaacaaaggcttatttttataaatgtttaatgttttcaccccctggatgctccgagacgccgtaattgtgacggcggggtacgtgtgccataaatcatttagttgctaataaaaattctgcctgtttgccctggatttgccaatggcgtttgcatttttcaagtgtgcgcctcggcggtgtgacgaacccagccggtatttcattagggccgcggttcggggcagaggaggtcccctccccgcctgggctttgtgcgcccagcccccttgcaccggcccttccatacctgcccccggcacccactccatatttgcgcggccctgcagccaccggagtccggccggggagcagggcctggggacgcggtggtggtggtggctcccagttcctggccaccaggcggggcggccaggacgcatcctgcccacgcggttttccagggctgccgcgtgcttgggggcgcgggcgggccacgcggagaggccacctgcccgggccaatctgtacgctccgtgatcttcgcccgctccccggccccgcgccctggtgtccctgcagtcgctgagtaaacagcgactgggagccatcttggggcggaggaccgatcccaagcgaagtagtagtggctgcagcccgggtgcccccattcgtaaaggggagcctctaggacatccctaactaggcttcagggtccagggaaacgccctccccagtatggcgggccacattgaaatgtaaaaaccaggcctgggcgctgtggccatagggcacaggccataggccaccaggtccagccgccatcttccgcgccccacccccattccatcccctccccctccccaccccctcatacttttgtttacccagcgggataggtggccaaaaactgtggacgcaattgagtgaaagtgcgtgtgtgtgtgtgtgtgtgtgtgtgtgcgcgcgcgcgcgcgcgtgtctgtgtgtgtgtgtgtttgactgggtagaaaatcggctgggggctgggggggtcttccttgtagccctaagccgcagctgcgggagaagctgccctggctagccgaggcccggcccagcgtgcttctccgcggccagcctgggccaccggagccgaggccttccctgtgttcctaggccgctggctccggcctccgctccctggacgcctcccgactgacaaaattctccgtctttgttttaaaaccaaaggacaggccaaccttgagcccggccgtcacccctgtcgcgcttttgttggcgcaggctcggccccctacaccgggctggtgcagctcccgcgatcagacggtctctctcaattcggcgttgaacccggttcttcccaaattctggtattgctggccgcttggacacgttctccccttatccctcccccagcggggaaagaaaaagccaggatcctttccttggcgcggccacccgagccactccacccgtcgcgccaaccgcctttccaggtggggaccaaagcccccactctccgctggcatctcattgaagggcacccccccgagggattgccagcttctgctgccagctgagaggccgtgtggctgggcgtcttaagcgccggtttccgcaggtcccgtgtctggcgggcgcggctaaaacccggagaggctgtgcccgggaaagccacgttcgccgtcccctcgctgcgacaggcccagccgcgatacagcgccaagtctaggtcgggccaacccagccaggagctgcccggacctgcctgaaagaccagggacgcggcgccagcgccccacaccccaccgagaccagggcgcaaggcgggcagaattcggactgatgcgccaggcccagccccgatggattccagctcctctcggccccgcctccggccctggcctcttcctccagccggggtcgggtcctccactccactgtttggctgggaaaggaccgagacgcgctcagtgcacagggggccggctgcggccataaatctccgggcgggccctccttcccgctgctcacgccggggtgctccgggccggtctcgtgtcccgggccacgccgcgcaccctgctcaccccatcacggcctggggacccggagactgcgcagggaaccacgccaggagcttctccgttcaccaaagagagggaacggcctcgttcctcggtgtcaacaccatccatctctgagggcgctggaccctgaggtggcccgagcttcacaggatcaccgccttggggtaggggcgcccgggcctggcatttcctcctaggaaggctcggtgagactgggatgggcatgcggctctccgctcgagcccaactccggtgccacctgcaccacggaggggtgaccccagggtcagggtcagagcggcttctcagaattcagcttgccacctctccgcggaccctgccttcatctcgtgcctcctcagagccctctgcgggcgcatgaagggcctttttttttttttttttttttttttttggcacaggtggaccaacggggggtgtgactgtgggcaccgtgcgcggaggcggaggctcatctggttcccaccctccgtgccgctggatgccccaggattttctccaaccggggtcccggcttggagccctccttggtgcgagctttggctcagcaatggggaaagcgggaatgggtctcgcccttgtggctgcctggtggaagcggcggttttgacacacgaatagtcgtggggagcagatccagagagggcgcatttgcaataataacgcttagtttatctctgccagaggggcgggaacaggccttcgcgctggtgtcttacatcagccaagcaaaccatgggcgcgattggagccaaccacctccagcggggttttgctccagacttaaggtgcacggaaaccggagcattcagcccttcatggatgcctcccgaaaacctcaccatgccagtgacacgactgcaaacggcgggtggcacatgccgggggcttgggatgggagggtttggaaacctcgctccaaggacgccctcagccaaggagcttcggctccttcctagaatttctagaagcacttttggagggaccgagggcttccggccgggcccagaggaatttgagcgcttgcccgggcaggcagaagcgcagcctgggagtggagaggctgctgggccacattccggcccagcttcccccgctaggccccagccctgccgcggcgccccaggaagcacctccgaaaacaaagcgctgtggtttcagcccaaggttaaagtccaccgcgagcgtgttttttcccccctccagaatctaagagcgatagcgtttctccaaataaaccgccaataaatcagctcccgggggcgcctgctgaagagctctggtgaccttgggggatggtttttctgcctgacccgtctgagcacaggctttggggaggagggggcagtgtcagccctacccctccagagagacgcggaagagggaatggccaagggcattcgtgggtgattacagcagtacgtgtgtacccagaggagatgggagaggcttggaatgggggaaaggggcgactgtggttatccgggggcctgtagtgcgcggtcaggaggcgtttgtgattgcgaggagggctgcttgctgtcggttcaacgattgctggagcgccggcggtgtcggcacaggtctaggcatggggaaagcaccactggggacagacacggccgctttggggccccgagtctttgtctgcctgggactggatgtgtttgtgtcggtgtgactaatgggatttatggatgtcagtgccagggtgactgatgaagggcttggcagcacgtgtgtttggggagaggcgctgcacctaggtggggagtgggtgccccgggagaggactgtcccttctcttagaggttccttcccccaccccctccctgccggctcccagctttgtttaggcctctgaacccctccggggcaggcctgtgcacgccgagttctgcagcaaattccacggccagcctgtccctcagaggcacctcagcacgccccacctctcccagccccacctccccagcacacgccacgcgtcccaaatccaggctgtcccacccccttcccaggcagagccttcccagtttgctcttttcccatctgaactccttatggtgtgctctgagccctgcttcaggcaggctttgacgaccgtatggtttgggtaccggcatacccatttaacagatgaaaaagttgaggtgcagaaaggagatgtgacaagcccacgcagccaggaagtagcaggcaccctgaactaaaccaggcagcttgctggggaccccactgtggaggccctttgcctctgggagcccccagcctggctgagactcgcttagagaaggtagaggcaaaggccactcccatgacacaggacacaacctgccacccttgtactgtgcgttataaccatcagtcctccctgccactcggtaagggctgtctccttccctgacctggcatgaggaaggaggggggcagtgaaggtcagaggactagtaggagagcctggtttggcctggggcagggtggggtgctgaggtcaaggtaacccaggggtcactttggagatcaggagagccgtggctggaaagcaggagctcctgtgtgattccacagaacctagcgcagactcaggttcaggacaaacctggagaatccatatcccctctcccttg

SEQ ID NO: 48137 - DNA, 626 bp, Homo sapiens
atggccatcaaaaaaggcagcgcggtcaccagcaacaggtcaccggcgacaggtcagcagccacgacaccggccggccctgcaggctgagacacagagagacggttgagaccccaggccacccagggagaggacgggtgagccgcacaacagcccggggccaggtcctccctctggctccataaatcctccaggcaggaaaaaagacgagaaagagaaaagcgtcaggaaaagcgagagcaaaccgctgctcctcctcctccttccgcgcccagggcgcaaagcagggggcggggcctgcggccggttcccgggagccccagcgccacctgctgggccttgggcgcagctgcaaaggccagagctgcagggctgacactgacccctaggcccacacaggtgccctgggctggaaagcccagggaaggccggtcagaccctgtctgcaggtcagctgggacctgcggctcgggccacactgccgtgaccggggccggcgtggagccaggcacaggcactgatgccacgaggaagctgtggtacaggtgtccgtggacggggcctctcccacctggctttggggtggtatctgactgccagcagggtgggaagagaaaggctttcagc

SEQ ID NO: 48138 - DNA, 1980 bp, Homo sapiens
aaataataaaataaaacatccaaattgtctttatttttctatatttgttttgttaagctattcagattgtttttatttaaagatagtaataaaatgttttcattacgtatattttaaataccacctctccctaaaaaaatcctaaagtaaacaaccctttgcagaccggaaggtgggaaacgggaaggggtaaaaaagacggtgcaggcgccgcacctgctgagctgcaaagtcacctctggatttctctccaaagcaaaagcaggaggctccagacagcaggagatggaaacggggcgttgggcaaggacggtgccgtcgtgtggtcactaggtggcgatgcggctccgtgctacccgccccagatcgccccgagcctctggggttaaaaaccaagtctgcagagcgtggaaaaaaaaccttttttccacgagataaccacatccacattcttccgccccggaggaagtcacctgtcacaggtgttcaggatgtggcaggcccacgggagtgactggtcaggcagcgggcctggcacgtctaaagcttcctaggctcccacagcacgccgcctggggcacggcacccaggacggtggcagagctgacctgactcgagtgaccggcagcgtctgcagggaggatggggacgaggaaaaggctcccactgcgccgggcctcacctttgagtgaggatccagcctccccattctgctccctgagggggcacctgggtctcctggtgactctgtgggcatgaaaggtgctgagctcacagtgcgggggctcccatctggccacccactgcacgggccgtgagagcagcacccaggcctccgaggtgtccctagggtggctccggggcctggctctgaaaaggatggcccgcttctgcccagacgctgccctggtcacgctcacagcagcccgggtgactcagggtgacacgctcccccgccctccaccgcaagcagggcttagctggtctagggaaagaaggtgtcttttctgcccaatttgtaatccccttactactgaggtgtgtccaagtcccagccagagcgactccttcctgcaccaccccctccctgccaggagccccagcaagcacaaagctgggggtcacggtgtgggggctgccagtggcagcaggtggctggcgtgggattccaagctctgccaccaaagagactccggccgccccaggatgcggcctcggagcatcgtgccagcctccagggatcccagcgccgtttcctctgcacagctcctgcccacgggcaagcgagtgccacctgctccttccactgcagcgtccgggctcccttgccgcagaaggcaggaatccagaggaacggggccagctggcagcgtctgggaaccggcatttgttctgaacaggcagtacccagctcagagcagacgtggttctcaggggctgctgggcacaggctggagtttgtccacagagatggcattatgagcagggtcggtctctcaggctggcccacaaaacccacaaaacccacagaacccgcaggcctctccgcgccttctccatggccctgctcctgaggaaggcccttggccacggggattccgtcccagactccggaggccatcggggaccatgaaatcacgctgacctcgggaggccggagacaagcagccatgtgacctaggcaagttcatgcactctctgggccttactttcttcatccattaagtgggtacaactgtgtcgacactcagaggttgttgagaatatcaaaggggtcaagacctgtacacccatgaaaagcacctggcagaggtcacatgagcccaaaggtcccctccacccgcggtggctgccgtcacctctgcctcttgcttccggaacaccccctccctccggccagtgcctcccttgctgacagcctctgctcggtctcccttccacattcttcttcctcttcctggccaatccttgtcacgtgtg

SEQ ID NO: 48139 - DNA, 2259 bp, Homo sapiens
aacccaggcaagctcctaaatctgcgaagtgcacccaacgatctgagacctgaaaggtgacagataccaacccaggtgcccatacagataggcaggaagcatcaacgggaagccactagtcagagtctagagtccccgctgcacccctttctgcagagacaatactttgcaccacattacagggacgcggcgggcttctccatcggacccagatttggggagtgttgggaaagaattccagggtacgtcgtaagtccctcaggtgaaatggcttttcctccatcacccaccccccacgtcattcagcaagcaggctccagggagaagtgggctggggctgaaactgagcatccagagatagaagatggagtgggacgtgggcacggagggggaatgtcccagggctgcaggggcccagccaaggaaccggggcactgagaaaggggtctcggaggagcctggaccctcaggggacggagagacggggacaactctggcgatcaggaatgcacgagcgaagggggagacagcttgtgccttccgagacagggtaggagtcttggggacaggatgcgggaaggacgggagcaggggcaaggccagggtcaggatgggaaggacggggcggggtaggggtcgggatagaaaggatgcaagggaacccgggtcgggatggaagaacccagggagaccgaggccgccgaggcagaagcagagcggagacagtcgcggacagtacctctccggagctggccatgtcgccggcgggtccgaaccgcggccgcgggatccgcaaccccgtgcctcccacctgcccggctagggatgctcgaagccggcgcgtccaccgctcaaccgagaccccggcaaggagcgggctctcgtcacttccggcgcccgcctacacgcacttccgttcgtccgcaggcgggccctaggcggccgccatgttgaatgtggctccgcccggggagctgctggagtacgagggagccaagaagggctccaaggacctctgcctcttctctgagctcgttcttaggcccctctgccgtctgcacgctcctttccagccacccggcctcccgatgccggcctagcacgttcctcgcgccaggcttttgcatctgcccttcccactgtctttcgtgtgcaaacgccacaggtcctgcgcaccgcacccctcatggaatagcgtcgcctcctctctaccttcacacacgccccgaaacttgcctctcatcctgtgtctctatagatttttgcaccatctgaccgacggtatctttttttttttatcctcctctaataaactgtaagcagggacaggatttcccaatacctgaaactatccctggaatgtgatagacactgactgaatacatatttgctaagtaaacatgaatgtatgcaccctcatacttaagcgtttgcgttttaaaataattagacccggccgggcttggtggctcatgccagtaaccccagcactttgggaggccgaggcgggcggatcgcctgaggtcaggagtttgagactagcccggccaacatggtaaaaccccgtctctactaaaaatacaaaaattgctgggcgtggtggcgcacgcctgtagtcccagctattcgggaggctgaggcaggagaagtgcttgaacccgggagacggaggttgcagtagctgagatctggccactgcactccagatggagcaacagagtgagactccgtctcaaaataaatacatacatacatacatacatacatacatacatacatacatacttagagccgacaggatggctcacgcctgtaattccagcatttcaggaggcccaagcgggaggatcccttgaggccagtcgttccagaccagcctgggcaacacagcaagaacccccaggccctctacaaaaaataaacatttcctggagactgagggggaggatcgcttgagcccaggagttccaggctgcagtgagctgagattgcgccactccactccagcctggatgacagagcaagactcttgtctcctcaacaaataaatacataaaaatattttactaataaaaatccctggggaaagttcattctctggaatcaaaagaactgggtttgaggccaagcacagtggctcacgcctgtaatcccagcactttgggaggctgaggcaggaggatcgcttgagcccaggagtttgagaccagcctgggcaacacagcaagacttctttctacaaaaaaataagacgaagaa

SEQ ID NO: 48140 - DNA, 539 bp, Homo sapiens
gctgctcttgaactcctgacctcaagtgatccacccgtctcagcctcccaaagtgctgggattacaggtgtgagccactgggccaggcttgaactgcatatctggccttctcactcctggggatcctcccactcatacctaatggcctcagggccgttgcatgagctactcaccttggtgagtggccctcaccccaactatggctaatttctcttcatcttcctcacatcccttctgcagaacccctacccttccctagaccatgtcacgattccgtcgcatcctctgccattgtccctcggaatattcctagatggcatttatcactgtggatagttaccactactcagcgttttggctaagatcaagtgttccatcatcgtgggtaattaaatatgcatttttaattaattaaatatttaagtaattagtcatatttgattaattaaatatctgcatttaattacaggtggctcatacgtgtaatcccagtactttggaaggtggaggcaagaggactgcttgaggccaggagtttc

SEQ ID NO: 48141 - DNA, 754 bp, Homo sapiens
agcctgggtgacagagtgagactctgtctcaaaaaaataacaagaataaaataaaatgaaagtactgatggagtgcacccgctacagtcaccttccagttgttactgatatgcccaattctcaaatggggatatgggcagtgatgtgacttcccaaagccacatagacaacgtgtctgacaatcaaccaatgctccattctgtcttggaggttgtatctcctctttgggcctgtgtccccagtcaatccatgcctctgagacacaccacctccccaggggactcctctggcctccggagccagctcaagcattcttcctccaggaagccctctggggaagcctactcaagagtgacggcccaattagccaggcatggtggtccacacctgtagtcccagctacgtgggaggtcgaggcgggaggattgtgtgagtccaggagttggaggttacagtaaactatgatcacagtgctgcactccagcctgggtgacagagtgagactctgattgtaaaaaatgaaataggctggacgtgatggctcacgcctgcaaacccagcactttggggagccaagacgagtggatggcttgaggccaggagttcaagaccagcctgggcaatatagcaagaccccatctctacaaaaaataaaacaacagaaaaagagtgacagctcctctctccctacccccatgtctgcccatgttcagtgatcctttgctttttttttttttgaaatggagtctcactg

SEQ ID NO: 48142 - DNA, 2210 bp, Homo sapiens
tgcgattacaggcgcgagccaccacgcctgcctggcctattttaatttttaagagtcacggtcttgttctgtcacccaggctggagtgcagtggtgcaatcatagctcactgcagccttgagctcctgggctcaagtgatcctcccacctcagcttcccaaaatgctgggattacaagcatgcgtcaccacagcaggcccaattagataaggtttgaagtatgtctacacctgcaagaccaccaccacaatcgacataatgaacatcacccgatgctcgtgttcatcaaagtctctgctctctcttcctatgatcacagcatgtcactgtacactcatttgtttgccttcgtgcttgtgatgtcttccccattaaactgggtgcctggtgaggacacggaacacatctggttggttctcctctatacccgcactatctggcacaaatagtgattggatggatggatggatggatgaatgaatggatgaatgagcaaatgaatgaatgaatgagcaaatgaattaagtcctcaatgaatgaatgaatgaatgaatgaatgggcaaatgaattaaatcctcacttccagactgacagctcctccagggcagggtccttgtccaggtcatctcagtagcctcccccaccgtagagtggtcactcaatgaatgggggttgaatgattaagtggcccaaggtggcccagggctcaccactgcagaaatcagaccaaaagagctagaaccaccccagagagcccttcaggggacctccaagataacacaggaggaagggtaccaccttcctctctgccagtaggccactgtgcacagttgagagtccaggcctcctggggggaccggatcatttccagaacaactgctatgcaccaggtggtgtttggggtaaacggcatccctgcaagggatcctcacccccttttcttccttcattctctgctggtgtcaatcacagcttctagcagagggaaggcaggccaggcttggtttcttcttgcgagagtatttaactcagggccctgtagaacaatgagaatctgacctgcaactagctgggcgtgctggggcatgcctgtgtagtttcagctacttgggaggctgaggcaggagaattgcttgagcccaaagttgaggctgcagtgagccatggttgtgccattacactccagcctgggcaacacaagaccccgtctcagaaataaaaagagaacctggcctgcagtgccaggcaggccctgaggtccaggagcctgggtatctccctctgcagcatgggtcacgaacaaactgggccctcagaggccacgggatggcgcccagtctccagtcacaaggcagaatccagacctcagcccatagctaaccagagctgtctgcaggccagatatggccccatggaccccctaccccaacttgactttgattccaggtccccctctgtctggatgaacaggtaggaattgcggcctctcctaagcctatgggagcctgggccaggctgaccctcaaggctgacagccacgatcccataggtgaaggcaaaggcgtggcagctaggaacacccactacacccccactcaagggaacaccgtgcccagctaccctgagacagccccactcccaggaaatgcaggtgccaaccagccccagtgaggcatggcacctgagccagacacccccaaatagtcccttcccacctcctcaagcatctgcactctgggtgaacccagaaaaactggggtacctggggagacatagaagggccaggccaggaactccccaataagcaggaacagagacctgacccctgagcctcccccaccctctaaggctgctcaatgtcaaggcaggagggatctccacacacctgcactctgggtaaggacaagttggcccccactgccccacccttttgcagggttcaccctcctgcagggttcaccctctgctgcccccaacccagccacaccacaaagtcacacttggcctcatttttaaggtgtgcacttttattcaactggtctcaagtcagtgtacaggtaagccctggctgcctccacccactcccagggagaccaaaagccttcatacatctcaagttgggggacaaaaaagggggaagggggggcacgaaggctcatcattcaaaataaaacaaaataaaaaagtattaaggcgaagattaaaaaaa

SEQ ID NO: 48143 - DNA, 4116 bp, Homo sapiens
cacgcacgatttcccgctcggccgtggtggtgaagctgtagccgcgctcggtgaggatcttcatgaggtagtcagtcaggtcccggccagccaggtccagacgcaggatggcatgggggagggcatacccctcgtagatgggcacagtgtgggtgaccccgtcaccggagtccatcacgatgccagtggtacggccagaggcgtacagggatagcacagcctggatagcaacgtacatggctggggtgttgaaggtctcaaacatgatctgtaaggcagagatacaccatgtcacactggggaagccactggggacagccaggccagacgggggacatgcagaaagtgcaaagaacacggctaagtgtgctggggtcttgggatggggagtctgttcagacctactgtgcacctacttaatacacactccaaggccgctttacaccagcctcatggccttgtcacacgagccagtgttagtacctacacccacaacactgtcttagacacctagtcagagagacaaacaccagaaaaagagctcatctgggaaaaagcaaatagaacctgcagagttccaaaggagactcaggtcagagaagagagtcctacggaaaacggcagaagagagaaccagtgagaaagggcgcagctccgggaggccaggaaggagggaggcggccaccagaagaggtagcgggccactcacctgggtcatcttctcgcggttggccttggggttcaggggggcctcggtcagcagcacggggtgctcctcgggagccacacgcagctcattgtagaaggtgtggtgccagattttctccatgtcgtcccagttggtgacgatgccgtgctcgatggggtacttcagggtgaggatgcctctcttgctctgggcctcgtcgcccacataggaatccttctgacccatgcccaccatcacgccctgggaaggaaaggacaagaagccctgagcacgggcgcagcccccaccccggaaaccgggaggctcctgtgcagagaaagcgcccttgcctcccgcccgctcccggggctgccccacccagccagctcccctacctggtgcctggggcgccccacgatggaggggaagacggcccggggggcatcgtcgcccgcgaagccggccttgcacatgccggagccgttgtcgacgacgagcgcggcgatatcatcatccatggtgagctgcgagaatagccgggcgcgctgtgagccgaggtcgcccccgccctggccacttccggcgcgccgagtccttaggccgccagggggcgccggcgcgcgcccagattggggacaaaggaagccgggccggccgcgttattaccataaaaggcaaacactggtcggaggcgtccccgcggcgcgcggcaggaagccaggccccaaccccctcccaaccgggcgccagccccgcctccgcccggttcaaacagcgccgggtcggcgcgcgcgcacgcagcggccacaccctcgggcggccagcggctcgggcaggaagtgcgcgcaagcgcccgggagccgcggcgaccccaccccttccggccgagcccgccttcgccccagcccaggccgcggcaccccgggccccagaacgcacgcgcagttagcgccttgagtcccagcgcgcacgcgcaattagcgccaattcccagcgcgcacgcagttagcgcccaaaggaccagcgcgcacgcgcaatggcgccccagcccccaccgggcctggcgggggctccgccgcgcccaccctgcgatccccattggcaagagcccggctcagacaaagaccccgccggttgcccccgccccgagagcggcacccccggagcgcgcctcccgagcgcggcctcgcgcctccgaactggcgtggggtgtcccccatctccggaggcccaggggcttctcccgcgccccccacggcggtccggttccccccccatgcgccccccgctgcggcccagacggcggctctgcacgggcgaaggggccgcggccgcctgcggccgggccgtgagccgcctgccccggtcggctggccgggcttacctggcggcgggtgtggacgggcggcggatcggcaaaggcgaggctctgtgctcgcggggcggacgcggtctcggcggtggtggcgcgtcgcgccgctgggttttatagggcgccgccgcggccgctcgagccataaaaggcaactttcggaacggcgcacgctgattggccccgcgccgctcactcaccggcttcgccgcacagtgcagcatttttttaccccctctcccctccttttgcgaaaaaaaaaaagagcgagagcgagattgaggaagaggaggagggagagttttggcgttggccgccttggggtgctgggcccgggggctgggggcgcgcgccgtggcccccgcgccccacgctgggcagtgcccggttcggccccgcatggccaggcctgcccccggcctgcccgtctctcgggccccccacccaccgcgggacatcctaggtgtggacatctcttgggcactgagcgcccaggtggggtgggccagggtctgcacgggtgccagggccctgggttctgtacgctcctgcagaaggagctcttggagggcatggagtggccaggcagtcactcccccttgccgacttcagagcaactgccctgaaagcagggcctgaggacctctggctgtggggctcagctagctaaatgtgctgggtgggtcactagggagagacctgggcttgagaggtagagtgtggtgttgggggagtcaggtggcttgcggccacttagaagtcgcaggaccacactccccaggacagggcaggggccagcggtccagtggctggaggtggcccgtgatgaaggctacaaacctacccagccgcagccctgggaaggaaggtgggctctacagggcagggcaccttttaccctggagctgcctgcttttgagggtaacagtcacgcccagccaagacaaggcctggggcgttagtgggtgacctaggcactgcggggcgggggggctgggtctacacagcctgggtctgggcccaccgtccgttgtatgtctgctatgcgcagccacagctgaactgccctcccagaccatctggaggccgctgggggactctggggaccaagactccatgtgccacagaggattgggggcggggcggtgctaggaactcaaagccagcctgggaagaccctgtccttgtcaccctttcttgccttgggtctgtccactgagtagcacacaagaccgggtgggcagggtccgttctgctccgggaatcacagactgtgtgtacccaggtggtgggcatgcagcgatcagtggcgtgggaccacagaggggcattcggctcagcctagaggaacctgccttcctcctcctccccctccttggaggtggtgacaagaagctggatttttacacaaaaataggaagagtggtgaggtgggggcacctcaggcctgcggggctctttgcagcgcgtagtaggtgttcactgagtgtgtgtcgcaataggcaaagatgagtccatataaggacatggaacctgtggccaggaaggaggctgcttgttccagttcacggtacaaggctgtgctcagccaatgggacctgctcctcccttgaaggttgcagaggccacagcctggtgggaaagatgaccaccacccagcacacagtggcagacacaggttcacagtccagaagacttgctgagcctcctccatcaccaccccacgcaagggcaaacttccccagcctgtatactccctgcctcctggggatgggactgtcctgtccctggccttgtatctttcagctgcaggcgtcttgccagctgcctcaggacctgccaacgttcacccggctggcgttgtggggcgatgggcggggggcccttcttgctgcctgttgatgagggctggttctgggggttcgtggaacgttgaactgggtggagtgctgggggggtggggtgggcagtggggatgggaccggatctgcagagcagggatgagaggttgtcaggtgggcggctccaggcagcaaggtggggtgcagagcagacc

SEQ ID NO: 48144 - DNA, 579 bp, Homo sapiens
taaaataaaataaaataaaatggggtggaaacctgctgtatggagttcctgggaggacaacgccagcgtgtccaggaatcagaccagcgctgcccgcagctcccgtgttagtaaaacgttagctgtcattactgcttacgtgcccggggagggaggaatcaggagccactggcctctctgtgggttccagggaaggagggcaggggaggtacagagagaaggagcagagtgttcaaggatcggatggaggctgagcttcctggccatgccttagctcacacccagcgacctgagtccagcgcagaggacaaagggcaaaaggcaaaaggcagggtctggagtctggcctctccctgtcatccaggggccactccgggcattatctaggttttttttgagacggagtctcgctctggcgcccaggctggagtacagtggcgcgatctcggctcactgcaagctctccctcccaggttcatgccattctcctgcctcagcctccggagtggctgggactacaggcgcccgccaccatgcccggctacttttttgtatttttagtagagacggggtttcacc

SEQ ID NO: 48145 - DNA, 3891 bp, Homo sapiens
aaagtgcccatctgtataatggagccaacggcctcctagggccctaggtggacgctggacaacctgggtggggcggagcgggtggcatttggagcaagatttccctactgggagtccctggccccagacaagagtccttctggagtcccagagctgtgtgtgtgtgtgtgtgtgtgtgtgtgtgtgtgtgtgtacacacaagtgcactggggggggtgctcgttcagagctaattagaggtgttggccccatctgcccccaagtcggtgatccctcagatctctctgctgcccgagaagagactgtttcgcccccttccccagacgggccttctggcatggttggggttcgaacccggggccagggctagagtctcagcttggggtgcgggggccgactctgcccgggctgggtggatagttgttatcgggagctcccaggcccgcgcggctcacgtgggccgcagctcgcggcgcctcccgcgtcccagggccgcgaggcgctccgggagataagccaggccccgtgcgagtccagcgcggacccggccggcccccagcccgcccctcaccggcccccaccccgcccctcggccggcccggcccacttggcccgagttcctctccataaaaggcgaggtttgggagcgcccggggagggggcgttgggtccacgggccgcccccgcccaccgtgttcccctccctcactgcgagccctcgccggcccgggggtgcagcccagcccccctgccgcgacccccacgccgggcccgtagaccacgaccctgaccccagtccccactccggatcgggcccacagcaccccccgccggtccccgcgagtcccgcgctctgtccccattttgcgattgaagaaattgaggcccgcagcgtgcgtagcccggctggggccacggggttggggactgaacggccggaaacgccacacgtgcctccaggtggcaagccagctcctcatagacgcacacgaacccttctgcaagtggggtgcatgtgtatatttacacctatagggattgggggcctcagggatggggggccctcccccgcacttagactagaatcccccctccccgcagcgctgccacttagctcttacgtgaccctgggcacacgatacttttactcacagcctcagtttccctgtctgttaaatggggggaggtttgcatctgccgggtttgcacaacgggttgtgcaaagtacaacacccagccaagggtcagtgcaggggaacaggaggaatggggcaagggcggggcccggcgcacccccagcccccgccctgccgcacacccctctcagaagaacctgcatttagggtgagacggatcggacctaagcccgccccggcgagactgcagtgagacttagacataaggcacaccatcaagcaaacaccgggtgctccataaatgcagctgcgccctcccgccccaccccactggggagcgtgagtcagctcggtccaggcgaggctgggaagccgagccttggctctcatgtggctccacccgcctggctctggggccggggcaggtctcgcctctctctgggcctcagtttcccctctgcctgctgcaggccagggccgggcctgaccccctagggggaggagggcggcgaggagccgggcagcggggagcccgggggtccctcgggggagcgcgccccctcccgcccccggcccgcggcccctgtggctcagaggcagggtgggccctgagccggccacgtccgcggcccacgagtccgccataaaaggcaaacggcgcgggtcgctctgccaaacttagtcatccggcccgccggcagccgcagcgacttcctccgcgggcttcccgttttcggagcggggcccggagggggtccgaggtgtggccgcgactttcgaaatgcccggctgcttctccgaaggggcggcggagggggcgccctcggagccatggggggaagggggtatcggccgggtgggggaggggatctcccccgccctgccccgccctccggaatgatcccgcggctccttaacccctgagctgccgggagcgggggaaggggctgggctccggccggggtcggggcgtccctgggtccagcagggagtggcctcccggaagacgccggcgagggaggcccaagtgcctgctccgagaaatctcagcgaggcctccttgggagaaaagtgcaaggcggtgacgtccagtctgtaaaatgtgaaaaacgcccaggccgaaaccacccagaacccgttcctgcagggaggagggtgggtgggaccaacaggggatcagtcactgcgccaaggcagggactagggccatggtggacaacgggggtctacctcagtgttccccagacacagacgggttcctactgtctggccccacttatgtgaagttctagaacaagccccacattttctggtgacagcaaacaggtggcattatttatagatgtaggggcaggtatttatgggagggggcacagagaagagcatgagctgggggtggaggggggcatccactgattctgagatcctatatttctttgagaaaacaactgaataaaacatagcaaaataataattgcttcattcggggtgtattatagtaccttctgtacttttctgtatctttgaaatatttcggctgggcgcggtggctcctgcctgtaatcccagcactttgggaggccaaggtgagcggatcacctgaggtcgaaagttcgagaccaccctgactgacatggagaaaccaattagccgggcgtggcggcgcatgcctgtaatcccacctactcggaggctgaggcaggagaatcgcttgaacctgggaggcagaggttgtggtgagccgagaacaggccattgcactccagcctggacaacaagagcaaaactccgtctcaaaaaaaaaaaaaaaagatttcacactttccaaaaaagggaagaaagcgaaaggacaaaggctcagagttggacatggtggtcaaccactgtgaccctcagtttcttcttctatactcatggggcaataatctctttgggggtaattaaaatgatatgcgataatgcaggcaaagtgctaagtacgaggcttgggcatagagtaggtgctcagcaaaggcgtctggtgaggggctgccctttctccccgggggaaggggaggacttgctggggtgagggtcctggatgggaaggttctctgcccacagctctctgcacccagctcctgcctggcccgacctggcctggttgggaaggcttgtgtttctgacaaatggggccagccaatcccaggccctgcctgtgctgttccatcctgtcctgtcttgtccccggggccagggtcactccgggtgagactcagagccagtgtacccaacgggacacaggcaggcaggtcaccagacctccgattccaggcggccggatcttcaggcagcctgtctgggcagtgaggacactggggtggcaggtgccagccggtcaggcctagagccctggccggagcactgttgcgggatcttagcccagagagccccagaaggctgtgggcggccagagccggcctgggaggagggcaggagagggtggggttaggggaaggacgagaaaagagaaagtaaaaggagaacagctacttttcctgatgttatttttgaacacctgtgggtattgagccctgcacccaggctctctgagaaaagtcccccatgaccctgataggggaattaagaccccaaggcaaggcacagtggcgtgtgcctgtaatctcagcactttgggaggtcaaggcaggaggattgcttgaagctgggagtttgagaccagccttggtaatgtagcaagaccccatctctacaa

SEQ ID NO: 48146 - DNA, 817 bp, Homo sapiens
atctgtagtcccagctactagggaggctacaacaggaggatcacttgagtccaggaggtcaaggctacagtgagcggtgattgtgccaccgcacttccaacctgggcaacacagtgagaccccgtctccaaaaaaagaaaagactcccaaatacagcaaggtcaagcagcttgaccaaggtgaccagctgagaagggcagtcaggggaagctgggacccagggagagaaaaagagagattgacagacacatggctggggggacttgcaagccctcgggagggggtaggaagcagctgccgggaatgggtgcccaaagaagcaggaatgaggggtggagggaagggcctcatttctggggaaggcccagggaagggcctcatttctggggaaggcccagggaagggccagggtgcagagaagccaatgacagctggagagttgggactgctgccaggacagactagacggagactgctcttgggtgccacctagtgggaaccttctttactgtcatccctggagagatggacctgtgacgtccccaccggatgccccgcccaccatgggcatccccatcccaatcatccctcaccacccccaggctcgggtcgcgtccccccaggctttgatggacaagtggccatggaaagcatcctcagctgccccagggttctgccatcacccatccactaaatggtccagggaccctgggaggtattgctttcccctttacacagatgaggaaactggttgggcacggtggctcatgcctgtaatcccagcactttgggaggctgaagcgggtggatcacctga

SEQ ID NO: 48147 - DNA, 3546 bp, Homo sapiens
ccatggtgaaggggagacaagccacctgacacctcgccactcgggccgacggcagcatttgactgctaggacactgtcttgtgacccactttactcactgctccttacttctcagttataagcagtaattagtaatgtcagtgttcctgttctggctggattgctcctggctggattgctccaggcccattaatgatacaagagcaggaacagatgaatgcgtaagtgtacaagagaggtttcaaggttaaaggcagtaatggagagagctatggtgggggtggggaaggcagtgctggtgtgtgtagaagagaaggggagagggggaatgtgtgtgtgagaaaaacagagtatgtgtgttagttttaagtctattctttaaaatgcccagcttctccttaggggcaacatgtatggcaaagcacaacttcttagcgtcctcaatcaagtgaagtagaatcttctatctggcatggacacatggttctggccacccggcagggagtccatcagtactaactctagacaccggagagttactagtgtatgaaattgaggtcagaggaaactacaccaatatctttcaaacatattttcgatgttttaaataacttctcttacagaaggcaatgtctgcttgttcagcagaactgctaccttcccacttaatgcttttacagcggaagtcaagacaagtaatgaaagacagaccccaggggccgacagtcaggccctcctactctagtggaagagatacaatactttatattgttacaattgcctctgcatacctacaaatctccatgttttcaaggagggatttcaaaaggtataatttccgacattcctacccagagttttgctgaaaaatagaatgacagcaagtaagcccgcaaatcatgcctggaaaaggcttagcacggctatttgaaaaatatttgcttgggagctggaagagggaactatgaatcgaggctggcagccaaatgggaattttttagttgtttatatgtacactgccttctaagcagacaaggatttgccactaagccttttacttgttcctcacataccaaaagctaactgttacacatactaggaaagtaacaactttatttgctgatttcacaacccaaagcagacatttttaaaaagcggtcatagcaacgccgggtgaatcagaacccatccttgttagtcagacatactctgtgggaaaaggcagcagttggaaacagtcttgaattctaactactaaaagccatactaattcccgcggggccctgacttctggtccaaggtttctcactggctgtatcctgtccgacagtgccagagcttgtgctgcaagcagagcccgtgcagaaggcgagcgaggagaaaggcagagctgctcagttccagctccttccacacaccacaaaacgccatccctcgcctccagcccgaggcaaggcactcctttttaggtggtaaaataagccttccaacacaccagaagaaatagcttggagtttgaaaatacacaagcatattttaataatcacatttctatttttcaagttctcttaatacaaacaaaacaaaaattcttttgctcatgttcagacatgactaagttaatgacaatgggtatacaatgtgacacatgcacactcctcccttaacccttggtgagcatcctcaaaagcgattcactgctacccatttcttatctatccttccaaatagattttatgtctgtgtcagcaagcatctcttcctcctcccatttaagacacaattgtgggcatattgcacccattgttctacgtcttgcttttttcacttaatatcttggagacagctccatatttgcacaacgggattccacgtcattcttttaaacgctatggtatatgctacgggttggcaaactacagctcactggccaatctggccctctgccaatttttgtaaatataattatactgggacacagccacattcatttgtttacatattgtctgtggttactttcacgctataaaggcagagttaggtagctgggatagataccatatggtccgcaaagcctgaaatatttactaccttgccttttacagaaaaagtctgctgacccctggtatggatgtttacagaaaaagtctgctgaacctcagtatggatgctgaccccccggtatggacctccactgtactgaggtaccaaaatgtactgaaattgttccctgctgatgggtattgcattggatttccttaagaataaaattaaactcctttaatgctaagaagctccaagacatttgaggaaggaaagagcaggaactagctaggaagaagccggcatgaagaagccaagcttaaagagggaacttcagagcaagctacaacctccccaagtgtcaattcctctttttagaggaagtaagaagggaactgtaggtcttttgataagaggaaattcccctttgctatatcaaagctgctccctgtgcttgtgttgttctaaagttaggcaagactgcctgaagcatactgtgaccaaattaggaagcaagaaggctgatgtctctaaagctggtcacccatggccaggcagcccaggcatgcaaagacagagatggacgcgggtagagactctctggccaacaaggagatgctatttgcttaagaaatcagccttaaaaatgacacaacgaaaattaataactgttctataagatggaattcacttgctgttgttgaccaaaaaaacaaaggcttccaacatttccacaagcaaagaacatgagagaagcacagtgagacgaatgctcccaggcatcatgggtttattccaaaggcagtaaaggtcttggaaagtgccaaggaaattataccacttagctctttgatagatcaagatagtcagttttacactattgagaaaagaagaatccagaaaggtcttactaaaaagggcattttgtaaactttccattttaggacggcctactcaatttctttatttgctggaacagttttcaaacaagtctttcagcttcaaaacaaggtctaggtatgcagtacttgaatcattcacactgagcttgcttccgccactgctactcaatgatattctctttaaggaatgacttctgagttaacttttgattcagatccaatgagctcagaatctattctgaccacgagcactatctgggtaataacatttgaccttgaaatccctgctttcctccaaaacttccagatcagcaagattcttggacacaatttttattcccttggcaatgtgcttagttcagttccaacatctgctatgagatcagacagtcagaattaaggtaagtttaaacgacaaaacaaatctcagttcttgtttataggaaaaccttcaagggctccaagccaaaggatgaggcccacttgtggcgcaatttgaggacctgcctgccctggagcagagatgtgtatggtggccatgcccttcagcctatggaaagtacattctctgtagctgcgtagcttgtgttgggctggtctc

SEQ ID NO: 48148 - DNA, 726 bp, Homo sapiens
ctctagtatagcgtatcgccgtctttgtttctaggcccctcctgtactcatttcttctgaatgtcatccctgagattctaaaccttctgagtaggagtaagaaatcaacatgaaacctgagagaaggagcacagcagtgctgtggacagagagtgcagaccctgagagtgggagcacacacacgacagcctcccccagcacgtggctctccccaggttgcacagggcccttctctgaacttgaataacgtggactaaaggagagctgtcatttcttatagaatgtatcagttagcaaaaaaatcaggttgaaaaatctacccctttacatggcagaacactggggagctggtagaaatgagttgagtggtgagtgatgagtcatcttctgttccctgatgggattttccacctgcccactttaggggaactccatgctcttgtggcagcaggttcacaaaactggaggcagttccccctttctaggatctccgttcatctcctgaggccgcacatctgcacacaccatcctcactgggcagctattacttcgtgacacaaagtgccaggcactgcacttgacactttacccacgctgtttccattggttttgcacaaaagctctacgaggtaggtgcaaccgttcttattgtacacggaaaggaaatgtggcttagggagatcaagtattcaccctatgtcacaaagctagtgagtggaggagcta

SEQ ID NO: 48149 - DNA, 1064 bp, Homo sapiens
gccgcgcacgctccagggttggttgcaagtggcccagagtcttggatccctggtcctgttccaccgggagcagaaccacctcgacgcggggacagcggcctcgctcgctgcccagcgcccggacacccgagccgggccagcccccagcgccccgcagaagggtttgacgcacttgcggcgccctcgcgagtgccgggtgacagtcgccaactttcgcggaacacgcgctccagatgtgagggaagaggaggaaaaacgccgcccgcctgggctggggttcacaggcacggcccgcctcccgccgctcctccaggccgcgctcgggtgcacggacaccgcctccgcggcggcctcgggcccgggggagggaagcgcggtctcccgggctgttgccctcgcgcagcagacccgaggggccggcccgcgaaacttcgcgaagtggcgagagggggccacccggccgctcagcgcctttgtcgctccagcctcgccaccgcaccgggctcgagacgcccagcccagccccttggcccgatcccgcccgggcctcggcccgcgcccctcagctcggcggccctcacggcccgcgcccccgcccccacccccggagctccacagaggcgcccctcagagaggccgcgtcgcctcacagacccgcccaggagctcgagcgcgccccgcagccgacactcactcgtcactcaagtcgccggctagccaggcaggttcggcggccttcgctaccgcgccgcttactcctcagaagccgcagctgcgagctccgtggcagccgctgcactccttccggccctgccgcggcgtcacctcgcgcctgcgcacagcgccccctcccgactaaggacaggaagaaccatagaggcactccgggtactgcggaggagggaccggggggctcaccatagagagggccgcctagtcgcgcctgcatccgggctctccgcctgcggagacttgactcccccacgaggcaggagggtgaaaggaaaggagacccccatatccgaccccacaaggagccaccatctccccagagctgaaaaggg

SEQ ID NO: 48150 - DNA, 1013 bp, Homo sapiens
aagtgctgggtttacaggcatgagccaccgcgcccaaccccaaaaggattattctaaaaagagtctacacccacaagatttgtaaatgaatcatttttatggagatgatttctactgtttattttggttttgttttgttttttttttttttttttttttttgacggagtcacacactgtcgctcagggctggagtgcaatggtgcgatctcggctcactgcaaccttcgcctgctgggttcacaccattctcctgcctcagcctcctgagtagctgggattaaaggtgtacaccatgacaccgagctaattttttgtatttttagtagagccagggtttcaccgtgttagccaggatggtctcgaactcctgacctcgtgatctgcccgccttagcctcccgaagtgctgggattacaggcaagagccaccgcgcctggcctactgtttataattcactctagaaccacgcggtagaaaccacaggtagaatctaccacagggtggaaatctacgtagttgaatgtgcaaaggactccaattcctgatgtgcaaacctgatccaggaaaccagacaaaaaaccttttacaaagagacaaaatctttttgtagaaacaaaaggaaaagccggctgggcatggtgtcattcacccccagctctgtgtcaaccagaagcccggcgccacaccctgccagcccatggccacctcccacgtgactgcagccgtggctgtggctggaagtgcagggtagcctaaccggaagcatggcgtcgtggggggttctgggagttgtagtccctgggggagctgcttttacgcagtgttttgaggtgcaggactgcaatgcccgcacttccggaccccagactcttcctacggcgactgacacctcagacacgcgttgtggggggcggcgctctggctccggggctgtgcccagcgcgagcgtggccggcacccacttgctgcagagccggcactgcactggggttcttgggggcggctcctcca

SEQ ID NO: 48151 - DNA, 534 bp, Homo sapiens
cctggctaacatggtgaaaccctgtgtctactaaaaatacaaaacttagccaggcatagtggtgtccgcctgtaatcccagctacttgggaggctgagatgggagaattgcttgtacccgggaggcagaggttgcagtgagctgagatcgcgccattgtactccagcctgggcaacagagtgagactctgtctcaaaaacaaacaaaacaaaacaaaacaaaaaggactgagtccaaagttccacatagctaggctgacttcataccattggtattctgaatacagtactgacagaaagcttcaggaataaaagagagaagagaggaactcaggaagcatgagtgttccccacgagggggtgccaggccctcctagacacacctgtgaacataccccttccccaaggccattggcagctggagtcttaaaatatttcctgcagctctggctgggcacggtggctcatggctgtaatcccagcactttgggaggccgaggcaggtggatcacttgaggtcaggaggtcgagacca

SEQ ID NO: 48152 - DNA, 1709 bp, Homo sapiens
cgtattgcatttttaaaaactgcgcagctatgcaaataaggatgtgtctggacgctctaccgtccccaaaataaccttaattttttaaaaaggccaggcacggtgcatcatgcctttaattccagcactttgaggggccaaggcgggcggattgcttgagctcaggcgttcgagaccagcctgggcaacgcagcgaaatccccgtctctacaaaaaaaaattaaaaataaaatactataaaaataaaaataaaaggggagagagaacaggtagaaaggaaatgcattcagtctatggggatttcacgctcccgcttcaagtccacggccctgtgatgggatgtgggcaaggcctgtctgggacaggccgaacccaactcctcacagggccgaatcctttgcccgcagcccaggaccccgaaggagcttgcctcggcctcaaggcgcacccaaggggcacgagatcgctgcaacactgaggtcgccactccggggcctccagggggctgcctcgccacgcgcctcggccatgttccccccatttccagggaggttggaatgccgtgggtctcaaagagggcgcgcgagaggggacaccggaagactgcgagccccgctcacctcgagctctcagctcgctccatggatgcaacacccgatccgcctcggggactgggaaagttccctccagggctcccacaggcgctccgcctcctgaactcccattggctgctttcgacgttgtgctccaccctttccgggcggggcggcaaaaatacttcccgtctctccttttcgcctattggctctgtcaaaggtcgacttcgtgacgtcaaagagcctgggccaatcagagcacaccggactgcgttttcccgaacgcccgcagcagggtcagaagggaggtggccggtctccgtcgtgacctctgacggtttctgagcgttggcctttggcacgcgctacccccttttgctttggttctgccatgccgatgtaccaggtaaagccctatcacgggggcggcgcgcctctccgtgtggagcttcccacctgcatgtaccggctccccaacgtgcacggcaggagctacggcccagcgccgggcgctggccacgtgcaggtaggagcgcggggccccccgcccagtgcgcacgcgcggcgaccggctgctggcccgggtccccccaggccggagcgagcgcgtcccaaccggttcacggccccaccccggcatctgtgccggccggccagggactcactcagacttttatgttttaaaagatttatccaggccgggcgccgtggctcacgcctgtaatcccagcactttgggaggccgaggcgggcggatcacctgaggtcaggagttcgagactagcctggccaacatggtaaaacctcgtctctactaaaaatacagaaattggccgggtgtggtgaggcgcctgtaatcccagctactcgggaggctgaggcaggagaatcgtttgaaccctggaggcggagtttgcagtgagctgagatcgagccattgcactcgagcctgggcaacaagagctaaactctatctcaaaaaaaaaaaaaaaaaaaaaaaaaatatatatatatatatatgtatgtatctttccaggtcgggcgcggtggttcacgcctggagtctcagcgctttgggagactgaggcgggaggatcaattgaatcccaagag

SEQ ID NO: 48153 - DNA, 1013 bp, Homo sapiens
aaaaacagtataccacatcacagtctagtctcagcaaggaaaacaacaggccaacattagaagacacgaatgacataaaacagatcttgaacattttgttattactcagatcacgaaggactagatcacgctgcactcagggcttaaaaatcacaagccacgttacacatacagtacttcagacattcttcattcctgaccgaggttttttttgtttttgagacagagtctcactctgtcacccagtctggagtgcaatgtcgcaatctcagctcactgcagccactgtctcccgggttcaagcaattttctcctgccttagcctctccagtagctgggattacaggtgccccccaccaagcccagctaatttttgtgtttcagtagaaatggagtttcatcatgttgtcctctcgaactcctgacctcaagtgatccacccgcctcgcccttccaaagtgctgagattacaggtatcagccactgtgcctagccagcactcaataatttaattggcatactgaactctgttccacccggaagtcagtggacttcacatttctctgacgtttgatcttaaataagagcagcagactaggagaggtgagaaagtgctgattaagcccgaaggtaaataggagttaagcaaacaagagaagaaggaagagtgatgcagatggagggaacagcacatgtgaagatctgtggtcagagccagggtggtggtttaggaactcctcggacagtgtggctagagcacaggcaaaggacgaaattgggtgaggtaaggtagccagaggccaaatgatacaaaatgtctgtgaagccatgttaaatgtttgacattttatcctaagcacctagcaggttagcaagggggagacattgacaatatctgatttttttttttttttttttttttttggaaacagtctcactctgccgcctaggctggagtgcagtggtgtgatctctgctcactgcaacctccgcctcccgggttcaagcgattc

SEQ ID NO: 48154 - DNA, 473 bp, Homo sapiens
tgggcagatgacagagggaaagataggaaaaatggaaacttttctcgatgagcgtgtgctacttatctacatgtacaatctccttcaatgctcaaaaaataatataaggtaagtgttcatcctcattttacagatgaaaacactgatctcagagaggctgaggaaccagtgaacaaggcagatcagactgactcccgaaccccatcctctttgcactgtatgagaccatgcagacagacgagttggcactaaggctgaaggtcgttaagttctcacttactgtttatttaagacatgactaaacaggtaaaaaaaaaaaaaaaaaaacctagctgggcacagtggctcatgcctgtaatcccagcactttgagaggccgaggcaggcagatcacctaaggtcaggagttcgagaccagcctggccaacatggagaaaccctgtctctacgaaaaaacaaaattagccaggcgt

SEQ ID NO: 48155 - DNA, 1786 bp, Homo sapiens
tgaatcaatgttgttgttgttgttgttgtttttcctctgtctcccaggctggagtacagtggtgcgatctcggctcacttcaacctctgcctcctgggttcaagcaagcgattctcctgcctcagcctcgaaagtagctgggattacaggcgaccgccaccacgcccagctaatttgtatttttagtagagagggggtttcaccatgatgaccaggctggtgttgaactcctgacctcaggtgatccgcccacctcagccttccaaagtgctggattacaggcgtgaccccactgggccaatgtattcattcttaatagcacaatttaatttttaatattgctaaaacacctggcagcaactaaagactctatttcactttcatcaaaattgtggactctttcacctagttagagtcaatgttttaagcatctcttactctatgctaagtaacttagctaccccgtatctcctagtaaacaaaagcctcaagaaaacttgggggctgagagtggtggctcacatctataatcccagcattttggaaggccgaggcgggagaatcgcttgaggccaggcgttcgagaccagcctgggaaacacagcaagaccacatctctgcaaaaaaaaaaaaattaaaaaattagctgggcacagtggtgtgcacctgtggtcccagctactcgggaggctaaggctggaggatcacttgagcccaggagttggaggctgcaatgagctatgattgtgccactgcactccagcctgggtgacacagcaagcctgtcttcaaaaaaaaacttgggcctttttattaaaccaaagacgtttatttatttccacgctgcctcactataagaaatctttagttctccttccaatgaagcaaaagacaagaaaagctccaatgaagcaaaagacaagaagagctacaaattacaactcttaacccaaactattcagcgtatagtttgcaaagtctccttgcagtaatgaaagaagatcgttctcaaccaatgacaaaacccagggcatgggggcaagacggtggcctcggggatgtccccagccatccgaaggcctcagtccccagagaggaaaccaaggaacagaaatgtaaacaaaggagggagaggcagacgttcttttcaataaatatttaccttacccgacggcccgcccgccgccccccctcgcactgcgcggctgggccgccggttcaaccctggaggcagccaaagtcgcccaggtcctcaggcaaacctcagggctgcctttgccgcccagaaacgcaggtggacagagagagcagagcggcgacgccgcgatccgatccctcaccgtcatattcggggtccgggccctcggcgggaaagtcgatggccggcggcgcagccacagccccagccccgtcgccctcctcttcgcgcttgcggaccccggagttgcccccctgcatcgccggccgcgcgcgggccgcagcccagcccgccggccagcccagcactgccacactccgatgctgcagctagcgccgtccgacccggaagtaacccctcaccagacggaaaaccagcctccgccacgcgcgcaccttcactgggggcggggctgtagcagactccgccctttatcagacaagaagagttgggcgtgtccggccccggcgtacccccggcgcatgcgctctggtgggctcgtctaccggcggctgggtttcaggggcgcccaggtgaaccctggcctagttcccagctaccccagaagggtcttagcgctcacgtctc

SEQ ID NO: 48156 - DNA, 634 bp, Homo sapiens
ggcctaatcttgtttgtgtagtgtctctaattccttcattttgaccacagctcttacgcaccctgtatatagtaattatccatgagagggagagtttgggaaatgatacccttgtcaagttccctcttacattgtactaaggttggtctgtgtgatgattcatgtacggagaattgatggtatgtaacttctcagagaagttcaaaagacactgtggctttcatcttactctctccctctttcatctgttgccctggggtgaggaagccatgctgtgagtagccctagccagccctcactgtgggaaagtgagcctgccaagaagaaagtgagtttggaaaagattcttcatccccagtaggcccttgaaatgtcctgtaaactcaagagtccgaactggccaggagcagtggctcacgcctgtagtcccagcacttcgggaggccaaggcaggcagatcactgtaggtcaggagttccagaccagcctggccaatagggtgaaactccgtctgtactaaaaatgcaattttttttgctcttactgcccaggctagagtgcagtggtgcaatctcatctcactgcaacctccaccttccggtttcaagcgattctcctgcctcagccaaccaag

SEQ ID NO: 48157 - DNA, 1467 bp, Homo sapiens
atcatttgaggtcagcagttggagaccagtctggccaacatagtgaaaccgcgtctctactaaaaatacaaaaatttgccaggagcctgaggcaggacaatcgcttgaacccgggaggtgcagattgcagagagccgagatcgcgccactgcactccagcctgggcgacagagtgagtctctgtctcaaaaaaaaaaaaaaaaagtactcatatctctttttctgtaacttttaaaatccactcccaaatacgtcttgggggaacttcctatgtcagtatagcatggtagtccataactggattcttcaataacagtaaatctagctatttcccccagcggaatgggaattgtgtccaacatttcaaacatctggaaaagtatcatctatacgcagtgtaatgtttacagcgaattctgccactgctcgctgattttaaacacattaccctgtgtctcagttttttatttgtaaatgatattttaccacctaatttacagggctgtagtgaggattacatcgattgacatatttatggcaagctctcagagagtcttgtacctaataccattatttgctctgatcctttagtttaggctcctaggagacttgattctggctgacgtgctgcgactgtcatctttcagatcagagtaactctgagtctggtgggagtgtcttcccccgacaccccgtatacctccgctttaagatgagagaatcttctgtcggtgctagcgttcagcggctaacggaggtgagctggacacacgttccccaacaccctcctcctggcccgcgacctagatccccaccggtccccaccatcataccgggggccgggccgccgcggggaggtagatggcgggcggcgcagccacagccccggccccgccgccttccactttgcgctcgcgggccccagaactcgtccgccggacagccaatcgcgcctcgctccttgcccacagccattgccgtccaccccggaagtagcccttctccagacgtaagacccgccccacccacgcgcgcgccgcagtttgggggcggagcccgccgcagaccccgccccttctcctttccgactgggcaggcggggcaggaggggcggctaccacgcgggagcacccatggcgcatgctctctggtgggctagtcttcggacggcggcctgcggaggtcgggtgagagggtgatcgcgctgctgaaagccgactgcgcctacgtggactgcgggttcgctccgggccgctcctccctgctgttcacgaggaaacctaaagtctgtgttgacccatgaaacctgatctcgttctttctcccctcctgagagtttaccagctgagtttcctgacttttatattcgttaacactaacatatatagaaatataaataaaatacagtatacctgtatatgcaagttgcagaacaacacataaaataacatattctgtgagacaata

SEQ ID NO: 48158 - DNA, 2767 bp, Homo sapiens
gagcccgggaggtcgcagctgcagtgagttaggtcgtgaaattgcactccagcctgggctacagaccctgtttcttttcttttcttttttgagacagactctcgctctgtcgcccaggctggagggctgcagtgcagaggcgcgatctcggctcactgcaacctccgcctcccgggttcaagcaattctcctgcctcagcttcccgagtagctgggactacaggcgcgcgccaccacgcccggctaattttttgtatctttagtagagacagggtttcaccatgctggccaggctagtctcgaactcctgacctcgtgatccgcccgcctcggcctcccagaatgctgggattaaggcgtgagccaccgcgcccggcccagaccttgtttctaagaaacaaaaaataaaggctgcgtccgctaggccaagggaggcgcaaggtagttgcagagggcgaagcccacgaagcggaggatttctcggagccaagtccgttttcgggggacggggatcccagactcctgcgtccccaggtgccccgcttctggaaacgcatctggggtcaagcgcaggacgaggcgaaagcccaaagtcctacgcccgccgcgcgccgtctggctctgcccagggaagcacagggcggaaggagccctttcgccggcgcgcagacgcgcgaccagcccagccaatcagcgcgctccctctgccggcccgaccggcgctctggtgacgcgcgacgtctgccttcgcccacggctcttgggcgacgacccctcccacactcgccgtgcttgttagctgcgcgccgcgcttcttgtgcgacggcccctgggcggcggcgcgttcgggcgcggccctggcgcgccccccggcggcccggaggggcgcggcgggcgcggcgctgacccggaggcggcggcggcggtgcccggatggaggcacgtcattgtcccccgccgggcggctgggctgtgtgcggcggcggcggcggcggccgagggggatggagcgagcgccgagccgggtcaggtaagctcccgcctccttcccgcccgccgcaggccggcatggggcccgcgcagcggcccgctcgcctgggccgccgctggctcggccgcccctcagccggcgcggcccgccgggggctggtgcggcccctcgcccgcctccccctacacagccgcgggccgcccgggaccccgccgctctgggggctgcggcgccaccgcccgcccgggccaggccgctggggagggggcggcggccgcggcgggcgggcaccggggtagccgggctgcgcggcgaggccgggcccccctggttgccatggacactgcgctcccacccccacccggccccagcccgccccttcggcctgggggccgggcaggcaggcgggaggctcggggcggccggggtgggcgtgtgctggccgctgaccgcggagtccggcgtccccggcccgcccgccgccccccgcgtggctgccacctcccgccccggagccccctcagagccccgggccggcctccccgcccccactgcatccctaacagaggcaaagttttcccaccttgggcgccccctccccaggcctagccacctggctgctccgtggagagtccgaggtgcccacgccgggcggagcggccaccccgaagggagaggagaagccgggtggcgcgtccccaaaagcatgtgtgcctctctagcgttttttattttcggggcaggaagagccagcttacctggaacgggggatccgttgcagatgttggaaatgaaaattggacggaacaagttttcccatctaggactttaacccctctcacatgcatgcagtggagatgacttttgttaatgactcttaggaggccgtggggtcacttgtttatgggaaaacatgttggttatgtaaagtcaataccctgacagcaaaactgtttgagaaactagttaacgcctccttttcaaggtaaccacagaatcctaggttctcgttttggtggcctctcaaaacgtttcgaagagttgtacattttaaacctaattctttttactttgtcactcattcaaattgcctaggggatatgaatgatcagtttcacttatttgttttaaattagggtcagtttcactttctcttctgtatctttgaatcaagtctacagtaagtatttggtttataaagtttaaggccagtcgtttggtttacttaagtataattaagacgaaggttttgtctttttaaagcgtgtgtgttttctcttataacggaaatgctatgagaacgtggattacattgtttacgaagaagcagagcgtaacagtttctctttaaacgtgctaatattattacctcaatgtatgcagagtgccacagtgtctaaatagtgaaactccacaaatgaagaaagaataatgcattctagcatttgataacaagggagacataccatataagagactgggaattttaaagctttgagtaagactagtatttaaagcaaaggaaacacttgtgaagtctcattcctccacacagatccaacctcgattcatgttcatgttgtttttttgaggcaagatctccctctgctgcctaggctggagtgcagtggcgcagttgtagctcactgtagcctcaatctcctgagctccagcagtcctcccacctcagcctcctaagtaggtaggactacaggcacatgccaccacacccagctaattttttttttttttcttaaagagacagggtctcactgt

SEQ ID NO: 48159 - DNA, 1186 bp, Homo sapiens
actccagctggccccctccccgttcgagcaaatccagcgaccgtttctgacccaaagccaagcagactgtcacgctttccaaccgtttcccctgccctcccgtcctgtacactcgaggagcctccagtgcaaaactttcccctcccggtttcccaccggctcagccgcttccgcccacctgagctgaaagggggcgtccgaaacgccgggctccggagggcatgaacgcccttggcgacaagatgcggggaaggtcgccccgcaaggtcccccgccccagaggagcgacacccaaaccccggcccgagactccggggcgaccccagcccgcggcagccccggcctggtacccagaccctcgccagcgccgaacggcgaccccggcccgccccctccctcggcccccggagacccagcctcggccctggcccggcgtgcctcaggcctccagcggacgccgctgccgctgcccccgaccccgtctcctccggcgaaccccggcccagcgccgcgccctcgacccccagcccccggcccccgaccccaggccgccggcgagcccaccacacctccgacactcaccgccaccaccctcgccgccgccgtcttcatccatcttgaggccactcccgcagccggcgagccgggggccggcagcagaggggccgcgggctggggacgccgccggagggagcgcgcaggcgaccgggcggctcctcagcgcgcggcccgggtcgcggccgggcctcctcccgccgggcggggcctcgctggtcggcgtgccgtcacgtgacccatgccccgcctctgcccgcggtgggcggggcgtgaggccgcgcagccccgccctcgggaaccggccgggccggcggcgtctgcgctggggaaggctgtagacctggcccctgaagtgcaggccgatccggtgtgcgtggagcgaagcctcctcgccctcagcattccagtagcctgcggacgggcgtggggccccggacactggaacgccacactctgcaaaacccagtggccaggggtgcaacttgcacgtgcactcggggtaaaagatcaagaaacgaatgcattcagaagtcaggcctggccaggctcggtggctcacacctgtattccaatactttgagaggctgaggtgggaggatcgctggagaacaaaagttggagaccagcc

SEQ ID NO: 48160 - DNA, 753 bp, Homo sapiens
acccggccagacatgacactttgaaaagcacaatccagccgggcatggtggctcacgcctgtaatcccaacagttcaggaggccaaggcaggcagattgcttgagcttaggggtttgagaccagcctgggcaacatgaagaaaccctgtctctaccaaaaacacaaaaattagccagtcatggtggtgcacatgcctgtagttccagctactcaggaggctaagttgggaggatggcttgagcctgggaggcagaggttgcagcgagtcgagatcacaccactgcactccagcctgggaaaaagagccagagtctgtctcaacaacaacaacaaaaacacatgatccataaaagaaaaaacatcaataaactgaacttcatcaaaatttaaaacttatactctgtgaaggacccaattaaaaggataaaaaaaaaagccacaaagggagaaaataattgcaaaaatatttccaatatttgcagggagaaatgtgttgcatatctgaaagcttactcattcctagaatgtataaagaactctaaaacttagcaggaaaaaaaagaatccagggttgggcgtggtggctcatgcctgtaattccagcaatttgggaggccgaggcgggcagatcacttgaggtcaggagcttgagacaagcctggccaacatggtgaaaccccatctgtactaaaaatacaaaacattagcctggcatggtggtgggcgcctgtgatcccagctactcaggaggc

SEQ ID NO: 48161 - DNA, 623 bp, Homo sapiens
ctgtgagtccattaaacctttattaattctttataaattacccagtctcaggtatgtctttattagcagtataagaatgaactaatacacaggcatattcacaagagccaaaaggtggaaccagcccaagtgtccataacggatgaatggattaacaaaatgtggtccatccatacaatggaatattattcaaccttaacagggtagaaattctgacacctgctgcaacacggacaagcctggaagacaaaggacaaatactagatgccacttatgtgagtcacctcatacatgctttatatgattccacttatatgaggtcactagagtagtcaaattcatagacagggaaagtagaatggtagatgccaggctctgggggagggggaatggggaatgagggtttaatggggtcagagttactgttttgcaaggtgaaaaaatgttctcgatggtgatgatggttgcaccatgtgcatgtatttaatgacactgaactggttgcttaaaaaatggttacaatgggaaattttacatgatgtatatgataaaatttttttaaagacaataagggctgagatctttttccacagctcttatcatattaaaaaaaaaatttttaa

SEQ ID NO: 48162 - DNA, 966 bp, Homo sapiens
agtggatctccccaaagtagggtcgcacgggaaaatgcacggtgcttgacatacactcagcttctaggcagtggcagctgccgtggcgtctgcatcccgcgggcgaggcgggcgctcggggagggccgggggccgggcaggcacggctcacccacctgcaggcggacgttgagcatcatggaagccacgatgtagaggtaggggaagttgatacgcagccgccaggccaggtcgaagaagatgagcagcgtgcgagtcagccccttgcagaagaccccataggagcgggcggcggccgagcgcgagagccggacagccaggcccgacagagccgccgccatatagagaccggcgctcccacagcccccccgcccgccctctccgcgccgcgtcgccccggcagctgaccctcgcctggcgtgctcagggagcgaaggaggcggcggctagaccggcgggcgggcgggccgcagtggagcggagtccgcacgtcacgctcggagaagtgcctccgcgagcagccgcctgtaccagcctggccgcgcagcctgacgtcacaaagccagccacgcgcctgcgcggcccacaggccccgcccctggacacgcccttgccacctttctttttggcaggtaagacgcgcatgcgcgggagaggaggcgtgggggtcgaggctgatgcgctgtctccgtccgccccctactggtgagtctgaaaatgaagacaaagggaggcgatggacggtagcgacggttgcagacaaagtgaatgtatttaacgccgctgaactatacatttaaaaatggttgcagtaggccaagcgcggtggctcatgcctgtaatcccagcactttgggaggccgaggcgggcggatcacgaggtcagcagatcgagaccatcctggctaacacggcgaaaccccgtctctactaaaaatacaaaacatcagccaggcgtagtggcgg

SEQ ID NO: 48163 - DNA, 2122 bp, Homo sapiens
cacctgcctcagcctcctgagtagctgggattacaggcgcccaccaccacgccccgttaattttttgtatttttattagagacagtgtttcaccatgttggccaggctggtcttgaactcgtgacctcaggtgatccgcccgcctcagcctcccaaagtgttgggattacggacgtgagccaccgcgccgagctgacaggttcctcttaaagccctgagtcccagggaagggacctgcaggcccggccacgcccaggccgctttagcgcgccaagatggcggctgccacgccccgcggccggagccgagtgggcccgagcgcttccgagcattcccgaagtccagagaaactccgggagcggcgcgggcgggagcggcgcgggcgggagcggccccgcccggaacctgggagcggcggcgccggcgcgggggaggggaggccggatgtgagtggagcggccatttcctgtttctctgcagttttcctcagctttgggtggtggccgctgccgggcatcggcttccagtccgcggagggcgaggcggcgtggacagcggccccggcacccagcgccccgccgcccgcaagccgcgcgcccgtccgccgcgccccgagcccgccgcttcctatctcagcgccctgccgccgccgccgcggcccagcgagcggccctgatgcaggccatcaagtgtgtggtggtgggagacgggtgagtgcgcggccggggccgggctggaggccgcgggatcgggcgcggaggggggttgggcccggactggggcccaggcaggccggcgtccgccgcggtctcgcgtaggcggtgggcctgggcctgtgtcgcggggcgggggccgcgggcgggcgcccccaccggaccctgacggcccgggcggcgcgtgcctggttccggctctcgatggaggagggcctcgccgctcgccggctagagggaaaagtgaactccaccctccggctttcttcccggacgccgcccgccgccctcctcgggagcgctcgtagagcaagcgctcttggagattttgaccatttttccaaaaagggaccctttattttttttgcatgaacctctcgatccccttttgagaattgggttgggaacgcggcggtcaagtcgatcatatttgatgcatgcttgattgtacgggccgctttggtgcccccaaacttttctttaaaaaaatttttttttcatagacggggtctcgctgtgttgcccaggccggtctcgaactcctgggttcaagcaatcctcccatcccagcctccaaaatgctgggattacaggcgtgtgccaccacgcctggctaatctttaaaagttttttgtagaaatggggtctcactgtgttgtccaggctggtctcgaattcctgcgctcaagtgattctcctgcctctcagcctccaaaagcgctggggtgacaccgcgcccggcctctcaacttattttcgacaggttttttgacttacacttctgccactgttaggattcttaaaattgttttcgccctttccgtggagaaagttttgaagatgctggctgggaggagccggctgtaatgggggactgttttttcttttctttctttcttttttttttttaaacaacgtggtgtggtcattgacaaaaaaactgttctttgcttaacgcgttaggtatgggatgtagcagaactggccccctgtgactccaggcattgcttttcatgattgtccgtgatggttacaggccctagaggaagacaaaacttgtcttatgcagtttttttctcccatagaaacaagaatctcagtgtaacccgagcaaaatcgcgcgtctcagcgttgcttgtataggttagtgttagcgaggaagaattactaccagtttaatcaaactcaatgcaactggtacatgttgcagtaaagtccaaggaaagttctggcatcacggttaactggattgatattcttcaaacttatcattaggacagattttggttcttgcaattcagatgcaagaaggataattagacagctgatttttgtaagatgcccatctgtcggatttgtcttggaagtgtgaaggagtattagagtatgtaggctattcaggctttttt

SEQ ID NO: 48164 - DNA, 1206 bp, Homo sapiens
attacaggcgcaagccaccatgcccagctaatttgttttttttttttttttttgtatttttttggtggagacggagtttcaccatgttggtgaggctggtctcaaactcctgaccctcaagtgatccgcccgcctcggcctgtttttttttttttttttttttaagtcatattgctgataattatttgaaaatttctaaaactaaaacataagcatagcagatacgtttatttaatactaaccgattgtggacctctgctgtttgaattggctgttttatctagtcaaataacttgttgaatgtcatggaatctggaccgtcccttcaaatccccaccccaccgcttacatggggtaaccctaagcacatcccccacctcccaagagaggcggttcaatgggaggtcaacaagactaaacaagatgttggttattaactacctcgcaggtgccccttgctgaatgcttagtaaatgccaggtactgttattgcggtttctactactgagactctgtgagggagtattaggcttaaaagtctgtggccttgagttttcagtctgttttttttttttaattagttatgagcatttgaacaagcacagttattttttaatactatgtttagtattgatgttgactacagctaagtgatattagaagtgaaatgtacctggccaggtcaggtggctcacacctgtaacccagcattttgggaggccaaggtgggtggatcactagagcttaggagttcaagaccagcctgggcaacatggcgagaccctgtctctgctaaaaatacaaaaattagctaggtgtagacacatgtgcctgtagtcccagctactcgggaggctaaggtgggaggatcgcttgaaacccaggaggtggaggttgtagtgagctgagattgtgccattgcactccagcccgtgcgacagagtgagaccttgtctcaaaaaagcaaaaacaaaaactattagagatacgtctttggccgggcacggtagctcaagcctgtaatcccagcactttgggaggccgaggtgggcggttcacctgaggtcaggagtttgagaccagtctggccaatatggcgaaacctcgtctctactaaaaatagaaaaattagctgggcacgcctgtaatcctagctattcaggaggttgaggcaggagaatcgcttgaacttgggaggtggaggtt

SEQ ID NO: 48165 - DNA, 1989 bp, Homo sapiens
gagatgggatcgtgctttgtcacctaggctgggtggagtggtgtgatcacagctcactgctgccctgaattcctgggctgaagggatcctcttgcttcagcctcctgagtagctgggactacaggcaagagccaccacttatttttgaattttttgtggaaacaaggtctccctatgttgcccaggctggtcttgaactcctgggctcagcgatcctcccacctcaggcccctgtgctgggattatagcctcctgtgctgggattacaggcctaagccactgcaccaggcttttattttttaatttaaaaaaatttatttttttgagacagggtctcactttgtccctcagactggatgcactggtgcaatcttgtttcactgcagccttgacctccctcctgggttcaagtgatcctcgtgcctcagccccccaagtagctgagactactgctgcacaccgccacacccacctaatttttgtatttttagtagagaacgggtttctccatgttggcccagctggtcttgaactcctgggctcaagcgatccacccacctcagcctcccaaagtgctaggattacaggcatgagccaccatgcctggcctaaaaatatttttttcagctctagaaatgttagctcttttgctgtacatttccagagctgctttaataatgacagttatcacacgcataatttcatgtgatgattgcattcttaatttttaaatttaacaactgcacttacttcatgaggtcttgttcattgatacatctttagcacctagtgtgcttctggtgtagcacacggttgatataaattgaaattgaattaatgctcacagtagtttggggatggagctggtagttctgcattaattttgcaggtgaaaaaaaaaggcatgaggaagttgaaacttgccaaaaaatacagccagtacgtgctagaattggccctgggtctcaaatctgggcttctgactccaaagcttaggctcctgctcatacaggtttattttcacattctaagcttttaacgaaatgtatgtccaatgagtcatttctgtttagaaagcctttaggagttggaagctacttcctggtgatgtaatgtttgactctctaaagtctttggaatggggagttccaacttttgttaagccctcaataatgtcatgagtgaatgaatattggcaagactggctgggcctgtaatctgccttgagtgtgagggaaaatggaaaagcgcttaactttatggtgaattctaatttatagtagttgagattgaacgacaaaaatcttaaaattatgatgctgatgtgtcattgtgaccttggtaaactgacagcacagcagagagaagggctcattaaggagagcacttggctaactgaaccctcaggatgccagagacttgaattctcatgtaagcccttaagcttgccttgtcaatgctgtaaaaattggagacctttatgttttgctaatgatgtggtgaccttagttattaggtgatagcctcttgaaaaacattccaggtggttgggagactttcagccaccactcttctgcctggcggcacactggtaatattaggattagtctctacccattgccagttgtgcaggtggtgctcctttctctgaagtatttctacacacttctctgtttggcaagtttaactcccatcgtctctgagctgttaattaaatgtctgggatgtattgtgatagtccctgcttatagacttatggtgctgtgtgaggattggggctgggggaggtggcatttaaatacagctgaatcaatgtgatggcagttacgtgtggtagtttattgactaagcactttctctcaagagaacagtcattgctgattgccataggggaggctgtagggatgtggtgggattttgagctgtcccacttaaggcagcagaataagttacttaaagaggaaggctgtgtttgtatattagtgttaa

SEQ ID NO: 48166 - DNA, 538 bp, Homo sapiens
tgtgagccactgcacccggccctgacagcacttcttaacaaattaccagatgccctttctctctcctgcgacggcgggatgcagtcaactccaggccacactcactgggcacctaccctgtggctggtgctgggcaggcagagcccagcaggacgtggactaagctgctgctggcgagcctccccggcgcacatccaacaacaaatgccaaagccctttcggccacacaggtttggagtccaattaccgtggacagcgtcagagccaaactcagcgtgatttggcacaaatgaagccaagaggacaggacaggccctgagcggcagccttcccgacccaagggatgaactgtcactaaaatatgaacccagcacttgggggcctcagctgccagccaagccgcggatcctcagcttgtggtcacataaagcctttgcctgagcagatccacccaggccaagccccctggcccctgacgggtttctggggcatctctgtactaaggcttacagttcctcctttcctcacacagtaatgg

SEQ ID NO: 48167 - DNA, 799 bp, Homo sapiens
tgggaggcagaggttggttgcagtgagctgagattacgccattgcagtccagccctgggcaacaagggcaaaactctgtctcaaaagaaaaaagtaaaataaaatacacagagctctgttttctatgttactgtggtaatcaggcacatgccactcttgctggtcatcccaaaccctaaggtctttttctcatgaaagatgttgctgctaacatttctaccctctacattgctcctatgagctaacaccttttacatttcagtcctttattccaaactgtcaagatcttgatgccgtcactcactgtatcaccagcgcctcccagtgcacctcaccaccagcatatatctgatatgcatacctcgtccatcccaattcaagcagtgacaaaggactaaaacatggcggatggtggcatgtcacacagccctgcctctgaccaatgaatcatttctaagaatgcattcctttattagtcaccacagtgctcacatcatcctatgaagcagaggaatccaacagggaaggtttccaacacttctggagacattctcagataaatggttatctacagaaaactgtaacacatataaaaaatatgaagaataggtgatcagacgcggtggttcacccctgtaatcctagcattttgggagaccgagacgagaggatcacctgagcccaggagttcaagatcagtctaagctatatagcaagaccctgtctctacaaaaaataaaaataaaaaaaattagccaggtatggtggcacgtgcctgtacttccagctacttgggggt

SEQ ID NO: 48168 - DNA, 1845 bp, Homo sapiens
gcagtgagtggtgatcgcaccactgcactcccgcctgggtagcagagtgagaccctgtctcaaaaaaataaaaagaaaaggggtctcactatgttgcccaggttggtctcaaactcctgccctcaagcaatcctcccgtctcagcctctcaatgtgctgagataacaggcgtgagccatggcgcccagccaagaatctacttttgcataacaatgattcattccctgcacagatcctctgggaacagacttcaggtaccaatgccacttcccactgattccacactttgaaagacaacagcgttgtatgttgagcctgtctgcttctcacgaaatgcagccacaaccggctcggtattttttcctatccttcgtgttgcagattcaagtgccccgtacaaagggaaggaagggcacaagtggctgctcccgcctcaagaaaggagaactcgaggccaaggcttttgccggcggtaacaccctcgtggcaccccagggccaggtctcggcgctgcacacaaaggggtgctcgcgtcctgctgcgcggacttcgaaaccccctgtttgtcccccggggtcagcccacacactctgggggcttcggtttgtcatccgtcaaatggacacagcaccactgcccacctcttcgggcagtggtgagaactcgataagaggatgcgtggccagcgctgggaccgcgacagtgcttgggaagccacttctgtcaccgtctcaagggacagctcgccccccgctccctctccggtgggctccaccgcccccgtagccgccgtccttaccacagcactcgcacgaccagctcgaagaaccctgggaagaccaagtcgtcgctggcgatggcccagcgccggccgaagagtaccatccccggcatggcgaaggtcccgtagctcgcactcaggagagaccccgcgcgccgttcaccgagaacaaaccagcaccctccggacgccgccaccaaattatcggcgctcaagcgcaaacgcagcgagggcggggacctgcgcatgctcacgctgaggccgagatcggcgcaagcgcactgagccctacaccgcctcttccgccggagctgtctgcgcctgcgcagaaacgctgatccggaaggcgctggctgagtcgattgcaggtctgccggtcggtgaaatccgttctggtattttctttttctttttcgtgaagagtgcagtgatatccgttctggtgatatttccttttccttttttttttttttttttttttttttttttttttttttttggtgacggagtctcgctctgttcccaggctggagtgcagtgggtgtgatctcggctcactgcatcctccgcctcccgggctcaagcgattcacctgtctcaggctccggtgtagctgtgattacaggagcgcgccaccacggctaatttttgtatttttagtagagacgaagtttcaccatgttggccaggctggtctcgaacccctgacctcaagtgatccgcccgcctgggcctctcaaagtgctaggattacaggcgtgaaccactgcgcccggccctgtttgtctgtttgtttaaggcagcgtatggctctgtcgttcagggtggagtgcagtggcgcaatcatgactcactgcagccttgaactcctgaatgccgccttgaattcctggattccagcgactctcccacctcaacctcctgagtagctgagaccaaaggcacgtgccacactcccggctaatttatttttatttatttatttatttatttatttatttatttagagacatagttttgctcttgttgccccaggctggagtgcaatggcgcgatcttggttc

SEQ ID NO: 48169 - DNA, 2471 bp, Homo sapiens
cggggtttctccatgttgaggctggtcttgaactcctgacctcaggtgatccacctgcctcggcctcccaaagtgctgtgattacaggcatgagccatcgcggccggccctcctaaggttattttaatgactacctgggataagccatataaagcactcggctgactacttgatatacagcaagtgcctaaacatcacttacccaaactgcagcagttatttgctgtcactggaaatcatacagttgaacctctcagaactatgtatcaactgagagataacctccaagtcaaacacactggcacatggactttgtaacacccatcttaactgttcaaaggtctttttggttttgcttacttcccggatctcagttatgttccaaggagacaggcgaggcctgcagacagcagattcagagatgtaagtgtgactttagacgccaaaatttttagaaataaatcaggtaaatagagtctctgcacccagataattcaggatcatcttttactgcctctgaaaaaattaagttcttgagttcaacaaaaattattttgccgagcatcaaaaataagtttaagggatttttaagaaagttaaagcctgggcaacatggtgaaaccttgtgtctacaaaaaatagcaaaaaaaaaaaaaaaaaaaaaagttagccaggcatggtggtgcacgcatggagtcccagctattcaggagtctgaggcaggaggattacctgagccaggggaggtagaggctgcagtgagcagtgatcacacactgcactcaagcctgggtgacagagcgagaccctgcctccaaaaaaaaaaaaataagttaaaaactctcaattattatacctttaaaattaacgaaatgtaaaagtccaaaactattatctgggaaagactcgtttcactgccgcctagcagtgcctgcatgaaatctgtactcttgatcagggaaccagccagctcactggtgacgtggagcaacgaattgcaggagcccataggaggcctcggcggtccccgggcgccgcagttttaagagaacccattattagatggaggcacttaaaaaccagatcgtttcccaaagcagcattaattacgccaagaaaatcactgacgacctctcggcaagcccctccccagcggtgtgatcctggacccaagggcttgggtgatgcccacacaacacttaaggacaggtctgacccgaccccactacaccacacctagagcccggtcttgcacgggcagggtggggagccgagtgacctctcccggcgcccgccccacctcccgagctggctgggctgccacgtcaggcgcagccggccacgatcctgcccatcctcctcccgcccgtcccattgattcgcgggtttcctgcaaccccgggacccccacgggagatcccggccggagaagcgcccccattcaagcccagagaggggccacgcctgtcggaccccccgtcccacgccaacttttcagacacagcagggccccgcgcagccgggtgcgctccgacagctcaagttcacgcggggaccgactgcagagcggggtcccgcgctgcgacacccggcccggagcccaccccgagggcccgcaggccgctgccccccgggtccgggcacccgttaggccggccgagggggtgtgtcgggccggcgcaggccccgcgagccgtggggtggccgaggtcggcgggtcctcggcgagacccggcccccacgcccgagcctctccgggccttcccccgccgctcaccggcgcaggagcgcgtcttccagatcttcagcagcaggatgacgatggccgccaggtgggacaggtccccagtcagccggaaaatgttcatggcggcggcggcggtggcggtcggcgcagcgcggcggccccggggctgggcggctcaggaggcggcggcccctgagaggaagcggcgaagatggcgagatcgcccgcgacgtggccagggacgtggccgaactgccggcgcgcgcgcgcgcggggcaccctgggagagcggggccaggccccgccccttaaagggggcgcgccccagcgcaggctcagcaggtcagctcgcagggactcccttgcaagaagaccccggactctgccaaattttccctgccgggtttccggcttctcctcgggtgccagcagtttcctttacttttttgaaataacactccctggggatcttttctttcctcccacatatcaaaagagctctacaggcctattgtatgaaaaagtgtaagagaaggccgggtgcggtggctcatgcctgaaattctagcagtttgagaggccgaaacaggaggatcctttgagcctaggagttcgagaccagcctgggcaacctaatgagagttcctccaccccccgtctctacaaaaattttttaaaaaattagccaggcctgatggtgggtgcctgtagtaccagctatttt

SEQ ID NO: 48170 - DNA, 1878 bp, Homo sapiens
ggtaatacataaaataaaataaataaaataaaataaaataaaataaaataaaataaaataaaataaataaaataaaataaataaaataaaataaataaaataaaataaataaaataaaataaataaaataaaataaaataaaataaaataaaataaaataaaataaaataaaataaaataaaatcgcacttcccagcggttacacccggccacggaggtccccaggctggctgcgagggcgccggggaggtcactgttactccagccccgcaacccgcggcggccctcgcacacttccgccggaagtcagcccctcaggggcgccgtgctgatgtcacgagcccgcaggaagtctcgtatcgcgcccgggaggcgccggagcccagcggctggcggtaaggccgcctccgcggggctgtgggaagcttgggctgtcccaggaccgtcagtctcctcctctgaccctccctttccccttgtgtgtagggccgccgtcccacccccacctcgcccgagtccggggcggccccggtgtcccctccgagcctgctgcactccacgtccccctaccagggctccagcccccagggaaatctccgaccaggcccgcccaggaggtgccttggatgggggtggcttcgggaggccctaatggggagtggcggggagagacccaaggctaccgacttggcttatttcttcccaactagctgtttctcacaaagtctttattattattgtattttgagacggggtttcgctcttgtttcccaggctgtagtgcagtggcgcgatctcggcttactgcaccctccgcctcccggattcaagcaattctgcctcagcctccccagtagcttggattacaggcatgcgccatcacgcccagctaattttttttgtatttagtagagacggatttcaccatgttggtcaggctggtctcgaactcctgacctcaggtgttctacccgcctcggcctcccaaagtgctgggattataggcgtgagccaccgcgcccggcctcttttattgtttttagagatggggtccagctctatggcccaggctggaaggcagtggcacgatcacagctcactgcagcctcgacctcctgggctcaagccatccttccacctcagcctcccaagtagctgggaccacaggcgcgggccaccacgccccactgatttttaaatttttatgtagggacagtgatctcactgtgttgcccaggctggtctcgaactcttaacctcaagctatcctcctgcctgggcctcccaaagatttgggagcaggcctaagcaacttagtctgggccatttctcccaaagtcttacccattcatgctgggggtgctgaaaatcccctacttccaaatccttttccacaggtattctgcctttgactgcaactcttgtcgtcttatgtgggtgttgaattgatctgtctctgcagccagatccaggctcctggaagaaccatgtccggcagctactggtcatgccaggcacacactgctgcccaagaggagctgctgtttgaattatctgtgaatgttgggaagaggaatgccagagctgccggctgaaaattacccaaccaagagaaatgtaggctgggtaccctgaatcaccccgtgagaattgctgctgtttgtttactctcacctatcatgtcatgaatagcttcttgtttggttatctcacttggcattacagcccagaatcttatctgctaaggtcaaaagtgaccagttccggtatcttttttggtttgtttttgagacagggtctcatgctgtcgcccaggcttgaactcctgtgctcaagcaatcctcccgcctcagcctccacaggcatgcgcaaccacac

SEQ ID NO: 48171 - DNA, 1139 bp, Homo sapiens
gtcaggggcagggggccttccagccatcttcccccgtaccccccagctgagaacagatggaaacgtgaagacgggtagctggggcggccagggaacccaagtccgctggccgaagccaaagcccggcaccacccccaattcttgctggtggaaagcaccgtgaaatcaaccagcggcagctctgaacgcgacgcacagcccgcgagggagcctgggcaaggacggagcgggcctgcaccggcggttgggcgggctccgggggcggggtccacctgggaccgcggcgcgcccctcaccgctcgcgccgccagggggcgccctccggagagcgcgcctaggccgcggcctgcgcttggcccctgcgggccgccgtctccgtgcccggcattcggccgctgttcggctgcgcggcggcagctcccggcggctcctggcggcgccgcagtcggaccttcgggcgcctgctggccggcggcagcagcgatggccccctgagcaggcagggagcaggcggcggcaggcgggcaagcgggcgggtgccgcagcccaggcccgggtcgcgcctctttgtttccacgggtagcggcgcagtcccgggccccgggcggaagtgagacgcgctcggcgcgggggccgcggcggccgcaccatgagcgacatccgccactcgctgctgcgccgcgatgcgctgagcgccgccaaggaggtgttgtaccacctggacatctacttcagcagccagctgcagagcgcgccgctgcccatcgtggacaagggccccgtggagctgctggaggagttcgtgttccaggtgcccaaggagcgcagcgcgcagcccaaggtgcggcctgagacggtcgggttcccgggccccgcaggcgggcgggcgggccttttccccagcgatgcagggctgtgtcaagccgcgggcgccccatgtccaggatccccgcgctcgcgctcggcctcgctcctgcagcagcccccaaacccttctccgggtcctgcagtgttgctcagctgcctgtccagtctgcggggcgtgtgacagccgagtcttggtgttaaagggacaaactggcgactgcccgctccctagaggtctgttgggctgttaccgaaaggctcatcctgaaccc

SEQ ID NO: 48172 - DNA, 1932 bp, Homo sapiens
ttacagacaccgtgcctggccgagtcctcctctatctcttgcccagtcaggcctggggtccccacagaaaagcaccaagaacagtggtgcaggcgggctgggagctggggaaggggcccaggccacaccattccaggcggaagacagaccctggactccaccaatgccagagctcatcctgacaccccagctgcacctcttgggagcaggtgcagacaggcttgtgggtgggggtctgggggtggccgctgagctcaccgacccctccctgggttcctggggtcgcctgtcacttctgcccccacactggccatgccctctgcctggacatcgcttccctgcccgtgaccccatgtccctccaagtgcgggctccacaaccccagtctcctcctgcactcaaccgccacagtccacccataagacgttcaccccgcccgtccctcctccctccccacccacaagacgttcaccccgcgcgggcccggggatctggtggaggcgtggacacctggccccctccccaccacaggggtcgcctcctccctccaccatcctggggtcccgggcaggctccgtggactggcggagggggcccagcgcggggcctggtcctcagcgggcgccccgatgaacgaggccgggctggggttcggggaaggcggtggtcgcagcggcgggacctcggggtcacctccgagacctggccagggtgtccaggagcggggcgaggttgtgggcgccccacgagtgtcgagggcgctcccgtcccctccccgcatgccccgtcctcgccccggcccgaggcccagctgggcaaacccccgcaacccgcgcttccccgctccgcgccgctgcccccgcgtgaccggaagttcctccccccgcgggcgcgggcggggcggggccggccggcggtacttccggtgcccacgcgccgccgtcgcgcagctcccgggccgtcactttgtgtagcgcggggtccgccgccggcccgcaggccccggccccggtgtccggcccgtggctcggccagcccggcccgcgcggtgagtgggtctcgcggggccggtgggcggcggcgcgggcggcaggtgcgggcgggccgggcttgcgctcgggggcggcggcggcggcggggccgggctggccctcgacgcccggcgcggggaggccgcggggaggcggcggggccggggcctgcagagtcggagcggaacgcgggtagggacttccgcggcagcgcccccgcctcccggacccccgtccgggcctgcgcgttgccgacccccggggccggtccgggcaggaggcggagggggcaggcccgggaggccacgcgtgacacctcggggtgcccgcccacgccttctcggccgcagcggcaggggctgggccgcggccgcccccaggacacacccatccaggaggggctgtcatcgtctaggtctctgcaggaggaggcggctccggacgccccctggggggcgggaggcgctcggcccgtcgccccaggagcccgctttgtgaccttgggggccttatccgggctttccctcatctgcagaaggagccccggtgggctgctcggctgtcttctgctgccggcaggtaggtagggacacccatccctgggattggatggggtctgggctgtcccgcgtggcagcagaggtaggaaaggggctgggctttggtcgaggacccgatgggcaagaggaagtgcaggtaccaggaggatcaggcccccagctctgcttgtgtggggagacctcggtgcttggtttggttcaacaagtgtgggcaggtctgggggccgggtggggtggtgagggggctaccctggggaacctgagatggcccccgtggaaataacctgcaccaggagcaaacccaggaaagtagggggatccagaatccgaggacagacagt

SEQ ID NO: 48173 - DNA, 1659 bp, Homo sapiens
cagtcggcataattgagtctttatttgcagaaacttcagtgtgctactcaaaaggatcttttattgaagaacttacgctcacttaactaggatacgggggacagaacactggcctgggagataaaactccagagttctactatgagcaactccacccacaaaacctcggacaagtcacccacctgctaaggcccttcccctagcaaatgaggcagcaagagatagttcctgcaggctgttcctgcactacaacgtatgattccacaagagcagacctaagggggaatcagcacttaaatgagagaacagaggtgctgacggacgtttagatacggtagcaatctggagcagagagaggaggaagggctgctggggtgaggggggagtggagacaacgtccgcagctgaggctggtgacaccccccacgcccccgtaagcctcgtcctcgccggaccctgccttcaaacccaaacacacgtcactcctgcaagcgatcgagaccttccactgtccctcactctaaggtgccctacacgcggtgacttcacccaggcccttctcgccccgggcccgcaaacccacgacttaccctcctggggctccgcagcctctgccccaccgctcccgacaggccggggcgggattgctgtcgcgggcgcgcgtctgctcgcgaggtcccttcctgtccacctcaccaaggccgttctgctccagaggggcccgggccgggcctacgggacaaatccaggcggggcgtccctcccggagcccagatccgtctccctggggctcaccgtcctgcggagccggggccgggccgtcgaggacgcacacgggccgggcccgggtcccgccgccccttcgcctccgccgtcgtcaccgcccggccggccccttgggccccagcgccgtcggctccgggggtcgtgctcggggatccccgcttgagcctccgcctggcccgcacagccccgcgcccgcttgggtgccggcccggctcttcggcgcccagccccgcaggctccgcgattctcgcccaccggaggccaaagcctgggaactagggcgagcggtgacctggggacgcacaggaagcgagggcactgcggccgcggcgcgcatgcgcgaacacgcacacagagaggggtgcacatgcgcaggaatgcaccggaagtccgcctcccgggacccgccgccggtcccaggacaaataccgtgactctatttcccatgagcctacgcgctccccaaatttaggagccatttgaaatgtctctatctggtctagcggttaagaggctctatgctaagagaattggcaacgccgaaccccagactcaaatttctccttagtttaagggaacgtcttcatggggatgtcttgactatctttaagggaacgtctagaaagtctctgcttcctgtagcatctcgtagaccatgcctgggccagtcctgccttaccggagagctcaaggcttaaaatcaatgtccatgtgcaaccgtgacaaatggaacaagagggtgcatcatgctagcttatgatcacaatgacacatttaacgaaaacttcagtaaatagagcccatggatgaaataatagaggattagcctgggacaggataccatcctcgccccaacaaggagaaaaagaattc

SEQ ID NO: 48174 - DNA, 646 bp, Homo sapiens
ccgcatgtagtccacatatatgttaccgagcagtcaatgcactcgctgcccagtgtgtacagaggccaataccatggctccagcttttgagaaataaagcctttttgtaagtcaactagcaaggacacaggaggaaatgctcaaatctccctttcccagctgggggctatgtcaggttttgtacgcatagggtaaggagatgtgatttgattggatcttgagatgaagtaattaatgctgggaggtgtgatctgactggatcctgccatggagtgacaccaaaactcaatctcattggttcctggctcctgccacagggtgtccggttcttaaatgggtcccagctcctcagtccgagcacttaggttccacttcgtggttgcatgcttggttaatctgggcatgctcagagtatatgaccttcaacccacggatccatggcagttgaaaaacaactgccaactacattacataaaagttgaaatggacgtggagtgtggtggctcacacctgtaatcccagcactttgggaagctgaggcaggcagatcacgaggtcaggagttccagcccagcctggccaatatggtgaaaccccgcctctactaaaaatacaaaaattatccaggggtggtgatgcgctgagg

SEQ ID NO: 48175 - DNA, 1181 bp, Homo sapiens
ctgtcctagtatttgagtgaaacttctcttagcatttcagcgcagtgaccacgatacaccctttcctttccttctcgttatgggaaactcggttctaacctggaggccttgggctccaggacccagtcactgcagccctggacttgaccctaaaagggaataaagacaaatgcgaagttcagtccggggatcagggctgccgaagctcatatagcctggggcttcttaacctttagacggggtagagacatttgaaatggcccctaaagttggggggcgctggtaggctcatgggaaatagagtccggcccttgtcctgggaccaacggtgggccctgggaggcggacttccggtgaactcctgcgcgtgtgcgcctctccctgggtgcgtgttcgcacatgcgcgctgccgccgcactgccatcgcttcctgtgtgtcctcaggtcaccgcttgctctagttcccaggctttggcccccagtggacgagaatcgctgagcctgcggggctggacgctgagcgcctaggccagcacctaggcgggcgcggagctatgtgggccagggttcgcacgggccgggtggaggcttgagcggggacccccgagcgtgagcccctgagccggcggccctgcggccaggggaaccgggcgggaggtggcgaaggtggcagcggaggcggaggcgaaggggcggcgggaaccgggcctggcccgtgtgtgtcctgggggcctggcccaggccgccgctgtacggtgagtcccagggaggcggatctgggccccgggaaggacaccctcctggatttgccccgtaggcccggcccgggcccctcaggagcagaacagccttggtgaggtggacaagaggggacctcgcgagcagacgcgcgccagcgacagcagccccgccccggcctctggggagccccaggagggtaagtctttgggttttcgggcccggagcgagaaaggcctgggtgaagtcaccgtatgttcgggaccttagagtatgaggcgggggagggtccgatcgcttgcaggagaggcgtgtgtttggccttgaggcgctgcacgggaatatctgggaggacgaggcttacgggggcgtggagggtatcaccagcctcagctgcagacgtcgtctccactccccactaacccctaacagcccttcctcct

SEQ ID NO: 48176 - DNA, 694 bp, Homo sapiens
taggtgaatgtaggttggctgagatgacatgttaaaaatttccctggagtaaaatgagctatattgagtggataggtttgagacatgttaaaaccaaaaaatccaaaacgttaatgccataaggattgattcttctctctaaagtgagaaccaggggagaatgttctcctccacttcctatcttaactgaaggctgaaagctgtccatccccactcccaccccacaggatcaacaagaactggcattctctgactgtcccctcccacttgcaggtcatttgcccaggcattggctatttcgagagctgtctgtctggagacatagggaacttagctgttaatggagggacaaatgccagccctgggagctgactcatgcctaaaatatgcagagggagcccaagggaatgcaggcttcctttctcttcctttctatttgtctttaaacagctgatggggaagctcccttgctacaggcaactgagaaatagtgctgactcagcttctgttccaaggctcaagagataagggcatagcacagccctgggtgctggcatcttcaattttaactcctgtttgccatttgtccctctctctagaccataagtgtctgcttatatgttgtgccaaaagtaaagcttcaatttctagaagaaaaggagagtttattacatttaacaaaaatggcaaacaa

SEQ ID NO: 48177 - DNA, 1769 bp, Homo sapiens
taagtcaattagttcttttcaataacagatgcaacatatacatttataaataatttactcctttgggatttcaaactaaagaaacttcaactatttcacttacaacaaatgtttctgcttctgtttctcatcaattgagaaaacaattaaggaacactcctgattcttattccagggaactagaggaacaaagagtaaccccagggattctagcctcgtaagctgagaatatttttctagatgacacaagttcctcagtgcacacgtgacagtctctgctttcaagctaatatgctgtgagtcacactgagtcctcttccctcgaggttaaatgtatttcctagactttttttctttatttcttcctctgctctattctccatcttaaccctattcctctgtcagtcaattcagaaaacaacaccagccattccaattgtctcaaaatcttggtaaattttgtaaagatgtagctacaaggaataaaaactgtttagaaaatgttctcttaggttatacagggtggcattgtcaggtattttcaataggagacgagaagctctgtctaaaagcacaatgttgccagaaggatttccctgatctttgtttcctggtgtccatttttcacttactccctaatttaacataggaaatgaggtgcaagaagctctgtccctttcttccccctagagttcttctttttcttactcagggatcatccacaacaacaaacagtctgatatctaattaggccagtagtttcaactgatttgggctcacagctgaatagctgaaagcaagaaaaaaccatacaattaaattagggaccttgtatttaaggccattcatccactacataatcaggacttgagtctcacactaaggctctgtcttactcattctaacatatttacctctcaggttagtcatgccacaaaaatgtgcattgttaataattgcctcatctctacctttgatgttccagtatataaagccttcccctgtgtgccctaagttctgccctctgaaagagaaagacatgttttctgccatttattttcttgctattgggtgcaattttgctctaggatgaactcataaactcaaataaccggttatatatatgtttgttattaagtttgtttaagtacctctgtcacaacaaagaggagcagatatactcagccacagttacaaattaattcatgaaaaagaaaaaggagccagtgataattatgcattcttttaaaagagtaataaattttcaacaggctcataaaatgagacctgacatataagctaccattctgccatactcttaaatccaaactgcttgctatgaatgatgctactattttatacagtacacagtaaaatcagtaaataagttgtcacttcctgaaaggtctccatggtattcatgtaaaatacttaatgcttaattgcttaaacatcaggtagacctcatcagcctaatttaattaaaagaatgctaatgctttatatgtaaagcatatttacatataatctcattgactgccttttggggtacattgggataattttccccagttagtggatagggaaattgagattcagaagggttaggtgacttactacaggtcatccagctaatcagtgataaaactgggggcactgaaagataagtacctggattgggcttaccaaagtggtggctacaaaaaggctggagctgtgtttaaaagtttacaggagagccatccatttttagttgacttttttaggaa

SEQ ID NO: 48178 - DNA, 2699 bp, Homo sapiens
tctccttccatgtttcacaatggatggcaagacattgcggaaaggtggaaggatgttgcggaaaggtggaaggatattgcggaaaggtggaaggatattgcggaaaggtggagggggaggaggctgagcaacaactgtatacaagttggggaggagtagagaatggacgtaatcatgtaaggcagagaagtctggacccatgagccaaggaaagagcaataacctggacatcaggatagctgcacttctcttctaacatggacctatcagtttatctttctggccttagttttgtcatctgaaaaatgagacatctgtattagaatcactacatgtgctttatgtttcacaattcttttggatatattgatgcaatgtcctgagaaactacactacagctgaacctaagcaaattaaaggaaaaataacaataactaatgtatattattatttgtctcaggcattctaagtaacttgccaataggtggagggaccaagatgccagcccgggcagtctgatttcagagcccatactctttaacaaccatgctgtagagtactaaagaaccgcttggatagggcatttaaaggaagcagggtagctttcctattctggaacgtggtcttgtagataatggttaacgccagtaaagactaaaccttaccctcacctcatgactattgtggggttgcctcaacaggtggcagcctcctccccctattccaaagacaacttccttattcagagcccagcgaaaggggagataggttttgttacgcccctaagaagctcttccggccattgccccacagaaccgaagtgctgacagaaccaaagacgaaatgtgcctatagaaagctttctggtatcattatctcggttctcagctcttcctggttctcacatgatgacccagcacccgtatgcatacttcatcttattacttccttttattaagcccagagagatactgagtaaagagagcacggggagagaacagaaaaacaaatgaacgggttaagagcaggctacaggccacaagagtcctgcagggttagagcctgtacctcagacaaaggtccttcaagcatcccctttctcgctccctattgttaccctgctttcgtcccgctcaaggtcttgaagctagtgcataaccttacagcaggatcagaaatgcggagagtagcagacacaagccgcaagggggatacaacaaaatctactgctcgtgcaagatccgacttcccagaccccttcgcattagggcggagcgtgcacccggcagccaatccccgcttcctcacgtcgccgtatccccgcccaccgcccctcccgctccgcccttccctggggctggtgcggcggcggagacgtcagcgccaggagacttcgggtggcggctgcgccataggcgggccacggcctggacgcgctgcggggaggggcggagcgagcgggcgggagcgcgcgctgggcccgccttggccgccgccgctgtgctgccgctgccggggaataatctgggcggcagcgggcggcctcggctagcggccacgagccacttctgcggctgcccagagaagcaaaggtcaccagtcccaagtcgtccccctctccgccccccaggaggggcgagagggagccgcagctgatgtcaggtatggccggcggaggcgccctcaggctacgggtccaaggtctcgtctcccctcgccctcccccctctccgggttggtggggaagcgtggaggatggaaccaaaccccgggcgcggcggaacaggtgtctcggggtcaaagccgggctggggtcgtccgggctcctgaggaaggcgcgaggacttcccgctcccggagccttagcgatctgccacagcgttcggctgcgtacccggcctcaattttgtggacatgtaccctcctcttcgtcgtgggtccttcccttgtgcccgctcgcgcccctcttctgctcgcgcgctgcctggcggcgcggcggggcgcgcagtgcgcccggaccggaccacttagcggtcctgccccgccgggccctcccagtccctcctcccgggccctccccgccccgccgcagacctgtgggtcccgccggactgggcgcccaggtgttgggcaccttcgccggggagccactcggctgccgcgccgcctgagcgcccagcgagcgggctccttccagaggtgcctggagcttgcttgggtctagcttggatcatcaggtttgtctgtagctgatttatttctttaagtttccctgccgcagagtgaagcagatacgtgtgtgttggggcattcggggcatggaggaggaagaaaggcattaaattttttttttttgcttctgcaccccatttttccccaacaaattgtgatggaattagtaggtgttgacaagttgtccatttgctttgaatttgggtaagtcgtacactcttaaaagatgaccataatttagcgctgtggatttattctttcctggtccttaccgtctccccaccccccaccaccccgcatttaaagcaaacaacagtatcagcaacaaaaaacccacacatcctggaaaaattctcaagatttctaacctagttctctatatccattgtacatactactgtatttccttttaacgcttttttaagatagaaaactattgtgctaaccatggattgatttcattatga

SEQ ID NO: 48179 - DNA, 1898 bp, Homo sapiens
aaagaacccctatgattttaaaaaaatgacatttttaatagaaaattttaaacatttagtgggggagatgtctaatatttagagtctcaaagactcaatctggagcaacaggtaattctcctgttccatctggatctagacaagtgattctcagattttagaagcagaggaattatcaggaaagtttggtaatgcacagttctgggttcaaactccagagattctgattcaatagctctagaggttggggcccaggattacgaaattttatgaagcacccctggtgaaaaacactattccagagcaattgtcaccgcacaccgcaaggtgttccaaatgacccactgggatataaagaaaatattacaacttgtctctatatttttatctcatcaattaaaatttcatttatataaattcataacatattagtatgatagcttataaacagaaattacaattaaaaaattaaaaatctgtggcatgtgatcaaaattttactggaggggtttataatcaaaacagtttggaaactacttctctacggtaggtgggccaaatccagcccacccccttgttttgtacagccttgagctatgaacggctttcacattttcaagtggtcattatacaaataactaaatatcttccattttgcctcttgggccacaggacctaaaatatttactatctggacctttaccaaaacaaacaaacaaaaaacactgtggagatgagtcgtggagaatgagctgtatctatgctatgtctaaacatgaccctctaggttttcagactgctgactactcctgcctccgtctgactcatgtcctctgaaaattcaattgcatgagcttccttttcagtcatcctgcttcctccagcagggactccatcagtcagattcaccagtgatgactcctgcccagggccgtgttcatcttcagagctgaagcctcccgctgtattgattagccaatacaaccaacaagctgagcacactggcccactgagacccagttcttgccaaggcatgtatgtgccagtccttaaatccaaacctggaaggcaatggcacaggacatgacaagaatcgggaaacacaaaaaaaccccatccaagcctttgacaaaggaacagaacatgaacctgttaaaattcttcactaaaaccaaaggaaaatcaaaattatgtctctagatttaattttacttcttttttcaaaaaaagaggtcaattacttttataccatgaaaagtatcatggagagtattaaaatacaggtctcaaataccctgtattaaggggtgattatgctttaacatatggcaattcttcaccttcatctttaaaaacagctttatttcaaaacacagaaaaatgttcactttgaaatagagtaactaggacataaagactaatctgttattaatactaatacaacacatctgttacatagtggcacttctcataatgtgcttcctgaactccctgcagcacagggcatttacttgagaagcacagattcctgggctcactcaccactgaatccagagagctgaggatggtaacaagaaatctggatttgtaatcatccccaggtgataccgatggacactgaatggacactgaagtttaagagtcactggtgtacaggtgatgttttgtatctgatgttgtcagcaccattttttaaaaatgtgctttttaatcatctggtcctaaaatatactccttgtctctttctcacaattagtatctttctagagacatgaactctcttacgtttgcagtttctgtttcctgacacattcaaatgaccttaatggtgggtctctgaggctaagtcaggacacatacttaattgctcacctcacaatccccttcgcttcttcctc

SEQ ID NO: 48180 - DNA, 4614 bp, Homo sapiens
ataaagaataaacatagcgcaaagttctctcaagatttcaacaaggataaatagcgaaatagacaaaatgttggttttcataaaggtaaaaaattctagaggaagagaaatagctcgaatttaagtgaacaaattaccctaaaatgtttattatctcttcttgtccaaatgtaattcagtattttcagttttcacaaaatattgtgtaagaattggcaggacagactgtgtggcaatgcaggttggttacagagctgactaagctgacaatgtgtgtgctgtgccctgccctcttgccaccatccaggaatgtcaccccttccttgtccccactctatcctattcatctctcctttaagctcttttcagacttcatctcctccagaaaacttctccataactctgccagcataaactccacctttcctggagtctcaatgtgctcattgttgaaatgctatacatggggatattcaattacattcaaagtacactgttttgtactgcttgctattttaatcctgcatcaaagtcttattgtcacaaccacttggaaaagccattcaaaataggcacttctgctttattaatatgtcctgcataatgtacagcctcacaggatggacgttccttccttccctttctagttctctacaaatctctctgccaacattgacctattcattgccatggcccttctggtttctgcccctttatgcttattcaatgtgaaccatgattgttgatgtgttaagttgtttcacttcccaataacatatttgcatgtgaatgtttaaagtccatgaaaacaacagaactacatgtaccttggcaaaagggtgggtatttggagacaagtaagtttttcattccaacaaaattaaaaaatacgttaattattcttgtggtaactgcccctgacaagcacatttctgtgtccaagcacataaaatgaagtaacttcaggaagcctccttgtgtctattggatttaggccaaatggagttcaaatcatggctcccccaggccctacaataaattcaacagtcatcagtgggcaaaaagacaagtatctttaccttaataccttgctgtccaattccaggagctcctggagaaccataaggaccaggaggacctggctcaccctggaggaagaaatagtgacatcagttatatgttaggtcgactcaatagtattgactaagcagcttttagatgtatggttttgcaataggggctttcagagcaacaacaaacctgtacatcgtgcctgccctcaattgtttacaactcatttggaaagaaaacacagacccaagatcaaattatccactaggcacagtagtcacaatatctgggtccacaacactttcaggagcctgcaaatatgttccaattgtaattttttgattcaaaataaaaataaacataatgactatataacaatgaatacagcttgcattcataaatataattttttaatgtgtttatggaggaaggggcccacaaagtcaagtgttttcaggatccataaaaggcataacgcagccatcactcattcattcacaaatctttaagtgctctggaagacatattttgtttcctcccctgcggctgtcctttctcagctttccttccctgctgataaacccccaattgagtcagtcagtgggcagctgttctttgccctcagaggtgtaggatgaatgatcattggcctaatgcaagatgggaatctcctttccctttgtcactgattcatctcagttggtcacatggctcaattctgacaaacgagatgtgaaggaccttactggatgcaaaggagaaaactgcctctgtctcttctttcctacatagagatgtgataactgtcttgtaactatgaggcagcaatctctaggacaaaagccagctgctgaagaggcctggctcctggataccctcaatgagcaactgatccagtcctggactacctgccttcaaatattctgtttactcaacagcaagagttctcatgatttaagccactattattcaagatttctgttactcaaagccagagcattttgaaataataatagcctatgatgtggcaagcccataatagaattcaggcattttagaactagatgtgaccattgcactcaaacccctacatttcacaggtgagaaacccaagtcccagagagattacctggccagcccaaactcacacctgaataccactcacacagttacagctctttaggtctctccggctttaagccctgtggcatgatgataggggaaggggagtggctattgaccccaattacccatttcataatattatttttttctgtttatcaaaataatatgtctcattgtagaaaattgtcatatattaaaaagcatgcatgcaaagaaaattttaaattacctatctgtaactattaatactataaaatttcggtgtatttccttccagttttttacattcacacgtgtacctttaatttatgctaaggaagattgctgaacactctttatgtttcagctaatgaatatttgctattaaaaatttcattcaacccaaaggtttctctcttcatgctttcactaaccaacagtaaaatgaaacaggaaagtgaaacaagccttctctgagatgaagggagataaaggagttttcagaaatattaaagtctcaatttaccccagaagcttgtgattttggaagggacacctaatgaccagagcaatgttctgtggatatagtaaagacattgctttactataagaagtctgtaaccgatgtggtggctcatgcctgtaatcccagcactttgggaggccgaggcaggtgaatcacttgaggtcaggagttcaagaccagcctggccaacatggtgaaacactgtctactaaaaatactaaaaaaaaaaaaaaaaattagctgggcctggtggcatgtgcctatagtcccagctactcgggaggctgaggcaggagaattgcttgaacctgggaggtagaggttgcagtgagccaaggtcacgccaccacactccagctttggcaacagagtgagactccgtctgttaaaaaaaaaaaaaaaaaaaaaaaaaggtctgttgactttgaccaattgcgaaagagaaccagaagggctaagaagggtcagagtcaaaccagctccccagaagatatgcccaggctcagggtgatttaaaacaaaggaatcctgcctcaaaatgagtcatccacatttatgatcctttgatatttaagtggattgaattcaaaagtacttactgtgcatgctgttgagtacaagtcagtctggcaaatattttttcccttaaactcctaaggttgtacttgtttttctatattgattaagttttctgagcagccagttgactgacattctcattttacatgtttttagccatggaatttatatatatatgttacataatatatgtaacattatatatacctgttatataatatatatacatatataacaggtatatataatgttatataatatatataacattaatatataatatatatatatataccattaaaaatacaataataatatctacccactgctgaatttgtctggctaaaaaaaatacaataataacaatacaaggccctaaattcacttattctattcattttttatcccttctatatgtagcattggttctgtaatgggtcagaaggcatctaaattatatatttggtagagaatttgaggattttttgagtagtggaagttctgccctacttggtacttatctgatgtttgatcagaaacaaaccaagagcccaggttggtgacaagaaattggtttggtcattaccttgaaatgtatggatcaggagaatcaagagtagaagcagctctcttaccttgagcccatgaaatccctttagccttagtcaagtaccaagagcagctgagcaatatcttaatattgctttacaaggcagttgcagggatctgaagattacagagggattgctctcctttacctgaacacagccccttagcaatgtagcttcacatttcacttgcttaaatttatttctcgggagcctggtatctcaaggtaggatccacaaaacagtattggcctatagctcatgtttattcccttcccatttcccctttttctttcctacagagattcctgaggtagtaaagaaagtggtcctgactctaaaatatgctgtctgggtaaaaacaaaacagggagggaagagtcagcactctagtcagaatagccctggtaagacggcaggcatgattcctttcctgttaatattcctaccccagcccttagcaacacacacacacacacacaaagacagagagatggcatgcccaaaaaattgcatgcccacagtaattatttctctactttactttcatttgccatcagagccatttaccaacaggcaagtataacaaagaggtctgggttaaaatcagtagccccagaaagaatatgtttctcattacctccatgtgagtgtgaatgtgtgtgaatgtgagtgtgagcgtgtgtggaggcagcaaaaagtttaggtaaaccacctttgtccttt

SEQ ID NO: 48181 - DNA, 1018 bp, Homo sapiens
gatcttggtttagtagagaaggggaatcagtttccaaaaagactgagaaaggtgtcacttattcctgtgaggggctttagaagaattagtggcaatatgaaaaaatatatactttcacaaagcttgagtggaaaagaaagttgaaaaagggacattagctggaggaggatgtagaataaatacgttgttttaggatttattcaatacatttttatttaccacatttattaggtactgttttacatcctggtgattaagcagagaataaaatagacagagcccctctgttttaattagggaattggctaagctgctctaccaggtccaaacaaacaatgattttttaaagaacaaagtttattttctcttgcataatggtccagaagtctgtggttgatccaagggaggaggtgccccagctccctgagattagtttgggacttaggctagtgagaacagctttgccttccttaatacatggcttccatttccagtctgtatttctttttgccatttgccagacagcaagaagagggaagagaaagtgtatagcaagcagctttccttttaagggacatgatccagttctactcacatcttacaggacataactttttgatatagccttaccttgctgaaagggaggccaaggaatgtcatgtctaagtaggtcaccaagtgccctgctcaaatttgaatgtagagttatttcctcttactaaaaagaaaaaaaatacagaatgaaaactggagataaggagaagacacagtctagaagataactataggaaagtaaagagatggcgacgtatgtgaagttgtggtgtcataaagacaacaacaaaggagctaatttataggtagtcagtgacaagtgagcagtcttgagtaaagggagagtatgagtcatgtagatttctgcattccagacagagggaatagctagtgaagaagccctgaggcaagagcatgcttgtcatgtttaaggaacagtgaagtcacagggataaaagacaaa

SEQ ID NO: 48182 - DNA, 1634 bp, Homo sapiens
acctactgcctcctcactgctatgtcctctctcctgacccggcacttgctctttcccagtcctagaaggctcttctcttccagttcccactgcccttttccctttcctggctaatcccatactcatccttcttgtctcaacctagtggtccttaaggaagctttgctgacccccgacaccgagcgggcgtccctcctgtgtagcactgtgttagccctaccaagtcaaggctctccttgcctgtttcctgccggaaccatgtctttttacttcactcctgtctcctcagcattccagcacagtgctgggtacataacaggtgctcaagacaagtttgtggaatgactaatgagtgaataaatcattaaccaaacaccttggatctcctactacatcatttgcaaaaaaaaaaaaatgtttaatagaaattaaaatggacccagtgagctagagtgtgtgaccctgcttaaaaacgacagagtggttctgagaagcagtcccagcctaggaacccggggatccggcctgtggacccacgggcagggcctgcggggtgcaccggcgctttcgggcggaaggcggggcctcccggccagtgaccccgccccgaggcgcctcccgggcggggaagggcggggctcgcgctgggaaactccccttccaaggccgaggcgccgctgcgcgtcctccaggcgtggtggtggggtcgtgggtcccagcccagtggtccaggtcacgggccgcacggccgcggccgccatcttgcccgcgtccgggctcctgcggcgggcggggcggtgtcccggccggaagcggctgtgcggcggccgcgctgccacctcaggtcagtgagcgcgacccggttcgcgtctcgactctcgggagcgccgcggccgcagcgaggggccggagatagcctagttgaaaggcccgggcgtctcggcggggagcgcgttccgcgctgtagggtaatcgcgccgggcggccggccgcctggccgggcctcagcgggagccaccgggggctgcgggcggccgtgggacctgcggagacctcctcggggcgcagggaacacgctacagccttcgccgcggcgggcttgtggggagcggcgtcccagcctttcccgggaggctcagccaggtgcctggagcgggagagtcggactcagattcctgctttacctagaatagcaacgtgccctgttcccgttgtaccctcttaaatactatacttcttaaacggcctgtctcccggtgagctctgttctcttctcatatgagtaatgaaaattaagaggatgaatgaaacctcacacatgttgtggactttgctgaataggttagcaaatgactgcaggccttttgtatattttaagggaaatttggatatgtgcagtgcatctcctcgaagatgctgatggtggaaatttcttgaaaccgctctcgtaatttgccacggtaagaaaagtaaaagacaacatcaaaaagcatgtggttggatcctttgtacactgagtagtattttaatgtgttggacttcactgtccagtagccacatgggattgagatgtgctataagtgtaaaatacacatcggatttcccagagttggtgccaaaaaaacgtaaaaatc

SEQ ID NO: 48183 - DNA, 2237 bp, Homo sapiens
ctaccactcctactcagtttccctacttgggaagtcagagcaacactcatttaaggaagaggatgtgtggatgaaatgagctactaaataagtctttatataatagttttcttttcctcagcttttcaggtcactgattccaagactttgggcctgtttctcgcctgtagaatgagggaacttcactttaatactggggttaaataactcgttactacgggacccaaagcggacaaccaaggcatgttttacagagaagcgatcacaacgaggaaacgaggtttgcaaaaataagtaatttcagaagagaaggaaaccagcagattagttttgtctgcgtccgtcacgtctgagtaaactaagaaatctgaaggtagatgtgggagtggtgtttataatttcccttacgtaagcacggctagaacggaggcgacgggcactggaatttagaactcagcatttgaaaacactttgtttccgtgccataaaagagcgccaaaatggggctacaacggctaaagaatttccaaaaagttccttgtgcaaaataaaggagtcgggggcgcagtgatcggaggctttccgtcctttttcatcccccgttatccaggcggggtccctccctccagctacggacttgggagcccatgattgcgaacccgcacaccttttccagcctccctacgaagcagacaggcttgtcgatgaattgagctagcatgccggcgttgatgcgcgacctgggcaagtccatcatgtccaccatgattatggtccaagactgcggctggcgggaaacccacggacgactgaaactgtgcgccccgcgggtgtctatggggcagatttctcggcaccaatcagcgaagactagcgctccagcttcgccaattaaatgcgcggaaacctaaatcgcaatcgcgctgtctctgaaaggggtggagaaggggctggatgagtccggaagtggagattggctgcttagtgacgcgcggcgtcccggaagttgacagatacagggcgagaggcagtggaggcgggacttggataggggcggaacctgagactacctttctgcgatcacaggattcccggcggtgacttgaccccggaagtggggtgtgaagctccggtgctggtgcggcgggggactgcggggccagcctcaggtacctcgtctcgcgggaggcgccgcaaccttactgtttccccattcttcccgcgaacagagtcaaaagagctaggcgggagtcggcactagctgctgccgcggtgctgtgggtgctgcgtaccagctgttcactgctgtctcgccttccctcttgccagttctgcgtgggaggcgcgggagttttgcggaatgatacgtggtgtggcgtcggggttgtgatacccgcccccttggagatgggcagcggggtcatcagtgatcttgatcactttcttcaggcttttgccacttgttggctgagggtcgatttactcccttagctgcgtcactctactttctccactttctccacctgtaagaagagagattgatccgattacttctaagacgttttttagcccaacctggccacactgcggaggcgccggttctttcaccccgctaacccctccgtgttggcagccaatagaagcacttaaggatgggtaacggggaagaaccactggccagtactaggggagacaagcttaaatcgttgttagaccccgagctagggttccccgagctagggttctcccttctgaggcgtgttttccccatctgcaaaacgaagggttaggcggaatgatttgcaaggtcccagttgactctgacttttggccatatgtttgactcaacagtttaaaccccctcagcagtctttctgtcgttgccctccacactgcgagactctggagggcgatctggaggtctggaagataaccgattcctgggagatttgggggtagtctccaatctgtccctggctcatcttgtgacccgaagccggcggccttgccaggagtattctagaatgagtgcacataaaaataccttcaaacggtacggtggaaattggacagaagttttaattgggtattataacgttgtggaaactgagtctgtgaattggcccaaagctacagaattgtcatcgttcaaattcccttaagcaaaaaagatccgatttgagacttcacgtggcaatttaagattggaatctcatgtacgataattaaatgatagt

SEQ ID NO: 48184 - DNA, 2800 bp, Homo sapiens
cgctgtttccaagtagagaaaatcactgttgctgccaaccaagtagccgtgcaataatttgtttacttgctgtcaacattttccccaccacagtttatctcatagagaattctcaagcccagccaactttaagatttcatttgtaacacagaatgattatgttatattagataagaaaggctgtagagagagaaaaatctcctaaccttgtctttctgtcttttctagacataatacgttgattttttttactctgattctgtccatttaatttttattacatgtttctcaaccatggtctttccttgttactttcaggcatagaacttcctaaatgtttagtctcagagcaagaacactcaagcttttcatgttctttggcactagcagccgtaacacattgaatttctggcagtggaatttctactcacaggatctgacccctcacaccatggccctgaattaaaaaagacattgcttctgagcatatgcaactcagcaaggatcctcaacaacttgtgtcctatgtagacctagcatctttaatatctatgtatgttgggaattatctgtcaatgtgtcacctttaggttctttatttttctacatctgtcttctgtggtcataaatgctgattataagttaagcagcagtgtgcacactacatcttatgcactaatggttggatttagtatccaaccatggcaggagtgtgaaacagtgagatggatcattgacctttgtctataggaggctcttttaaaccctactgtgtatatctccgttttttttttttttttctgataaacttaccagtgtaatttttttttgagatggagtctctgttgcccaggctggattacagtggtgtgatcacagctcactgcagcctctacctcctgggttcaagcgatcctcccattgcagcctcctgagtagctgggactacaggcatgcaccaccatgcccagctaatttttttattttttgtagagatgggggttttgccatgttgcccaggctaccagtgtaatttgttttctccttgaactcatacaagactcactcttttagccaaagttggtaagaattattaggtagattaaaaaaaaaaacaccccaaaacaaatgtggtctgatggtgaagtatcacgataaagacaatttgtaaaaactgtgaaatcatattagatcttagtataaaattctaattttctataaaaaaatacttcttagaagtcctgagcttagccactggaactggccacaagacctgatttgggaagaggtaacctgttatatgaatttagttagtaaaattgtagaaattcagatgtcatttgatcccagggaagtgtatttctccccagctattaaccagtgtcaactgtctgaaatttattgatccgaaggctcttcctcatttgttgccagtagctctccctcatacagaacaaatgactcacatgctcaagctaaataaagcactccgtaaagatttttctgcctctagaactgctcaaagtcagctctcaatagtgggcactgattcttgccaactggtttacccttattaactctataggtagggccctgtgaaaccacactaacatgtagatgttctctctttttctttcttcttctttttttttttaaaggctgcccttttcagacattccttctgaaatctgttaagaataacataagactagtcacagatttattgatttttcctgggcatttgactatgtgaagtggaaccagctatgacctaagcttagcaagctcagtaaacaccctctctttgctccaaggtctgtataacttctgtcttagtacacatgccaagcagtcagcaggaacggtcttgtggtagatgagatgattttcagtcaggataagtcagattgttttgcttttctttttatttaaaaaattattttttcaccctttaaagtcttgatgatcataatccacttcttgatggaatgtgtacctgacactttgatacactttgcaacagtcctgattggctttctgaacagattccttattatctaggaatgatatcttctatctaattattttcccaaataactgcttagtgtttattgctttaatatcagaatcctctattctgccagacaagttgcagcatttaatttgttttcttctaaaacacctatgaaacagataaattatccattttatttcatttcctgtaagttattttcttaaaacaggtatcttatgggtacatactggaaactttaaaaaatggctaatgtaaaattcattttgaaatatgattgtggcttccttttgtggcagtcctgctcaaaattttccaagtatctcaggaaggaagaagcacgaatatgtacctgctaaagcccttggggtgggcacctaactttaaagatatttttatttttttaagctgatattatcacattcatgtgacattggcacccagtgtgtaatagagctgtggttattttaacataaaatgctttaaattatggatcatcaggtagtaaactggaggatatgagatttactgtattttttccttgtcattatgcctcttttcacatggtgcatgtactcttgggtatccatcttccaatttgagacgtataaatcagagtttttcagttgcttaaatgactctctgtttgagaccagaagtgttttcagaggaaaattttgatattccctcagctcaccttcatgagggctgtgaaataaaaactttggggagttgcctggattggattccttagcaagctgaccccac

SEQ ID NO: 48185 - DNA, 819 bp, Homo sapiens
aaaagacctctttagttttctgtgatccaaaatctggcttaattttgccttaaagctattcttagtgttaatatataatgctttttaaaaatcggccaaggtatctttgggcatttgtagtccttttctgttcagaaatgtcattaacttgaaatataaagatgctttctaaggaaactggtttgcctagccagatcttttaatgtagttattttgctatgtgagctgtaaaacccaaacattgaggctgctttccacaatgccttgttgcccagacagtgatgtcatgttttaagcatgtttagtttgcaaaggtcctgcttttgatcctttagttgtcacttttttaatgcggctcctcctgaatcacaaaggtactgaaagtaatttgcttcattaaggtctgttgctgacactgttgtatttcagtcgtcattcttctcttagcctccttcattaagaccttattcaaatttggatcatggttctgctgcgacatccacgccattatcatctaaatagcaattacatattcaaacacaacagcttctccttaactgtctgtaacttaacattttacatagattcaagtgggaattaagaataaaatgaatcttttcttcgtgatttacaaccctccctttcacccttggtttactagttaatgttgaataagctacttgtagacgaaggaagacaaaattattgattgctcagctttagttttgtagagagatatatattataaattgtttctgtattaaacagttacccaagtgtcagtgacccttattcaatcacccatgtatttattagaca

SEQ ID NO: 48186 - DNA, 1637 bp, Homo sapiens
tacaacactactgtgtgtaaggcactgttctaagtagttacaaacatgaattcatgtaatcctcaccagtatacttatgaggtaggcattattttatccccattttacaaataagataaatgaggcacagagaggttaagtaacttgctcaaaatcacacagctagaacatggcggagctgagatataaacccagtcagtttggctgcagagtgctcttaactgtatgtatttttcagatgtttcagaatttggtgaaagcaataattgttctaatcctattgctggatttaaaagtaggaaagggtaaatagagatagcaaacagtgtcaataaagtatttaataagaagtaatgacccccataatactttgaaattccctatattaaaaatacaagatgaattgtaaagagaaactgaaaaccagctttaactgtgttaaaagccagttgagacttctactttatttatccatttgatattatgcaggcttctctttgtgtatatagctgagcaatgtgaatataatgctgtcattattgttttctgtgttataccactagttacattacttcagattatgaagtacagtattgagctctgtcgttgactatatctctccccaattatatgtatcatgattttagcccatattttataaatgagagataattttaatgaatgtgtggggcaaataaaacttttagagttggtatgttaaaatagggctaaagttaaagtttcaagaattgtagagagagagagactagatgtgccaatgcaaacaatggattggtgaaactgaaactgaagaaatttctgataagttagagatttttggttaactaagatttcaacctgtgtgaatctcaattttggcagaaatgaggaatgtaagcaattctagctttgcaatgtggaaaagtcagggaaactaaattagactttgcactaacacttcctataagcatatgtcaccctgatattgaatgttgtatatgagggtggagggacaggtggggacaaacacccagctcctcctgggcttgagccaaggacctttggcttcagttggatcttgtaactgccctgtttacctgtaatcagaggcaaatttaccaggagtaaatttactgggatttaggtttcaggacctctgacttgcacagacctcctccaaggctctgcgaggacctctagcaatgtgttcacgtgatcatatggttttgcaaaatttgaggaatttaaaggtatttaagcataattagttaagactgctatctcttttctactctgacggtccttctatcacatttcctcacacaggattgctttggaatgatcacaggcatttatcagatctggctaaagggaaattgagttgagaatatacaactttaaactatagtttgaaagatattttgaaacatttcaataagacaagggagaaattatagactcctaatttaggtacatagggttcattattttctcatttttgcacttattttttaaagaactgagataatttagataatggaacataaaactaaagcaacaaagatgaatgatgaaataagtagaaattatttgatatcaaaaagcatgttgtaaaaaaatagattataacaaaagca

SEQ ID NO: 48187 - DNA, 1905 bp, Homo sapiens
gaattatgaaaaggtcaccccagctgggcacggtggctgacgcctgtaatcctagtactttgggaggccaaggtgggcagattgcttgagcccaggaattcaagttcagctcagacaacacggtaaaaccctgtctctacaaaatatacaaaaaattagccaatatggtggtatgtgcctgtggtcccagctactcgggaggctgatttaggagactcaccagagtccaggaggtcaaggatacagtgagctgtgatcgtgtcactgtactccatcctgggtgataaaagtgagacctaactaaaaaaaaaaaagtaccacttctttaagacattttacttccatctgttagaaaattgttgtaatatgtttattagaataagacacttgactgccatctgctggaaaattattaaagatatgtctttggtttcaatgctcctctccttttcacatccttgtgcagtacacaaattttgtgggtgcgagtaataggacttggtaacggatcacatttcttattaaaaggaaaaggaagaaatctcaagtttggatggtagggaggttagtagtgacattaatagaactagaacttattattggggaatagatttataaggcagaatcattctttacatggaaagacactcatcttattatttattgatcccaattgtttgcatttacttagtaagaattttgataccttttcttctagaatctcagctctccccccttgtgacatctgagaatgttgaccagttcctcttttgtattccatacacccctctcttctgtatcttttctttctattctgaacgttgcttcttatccgtctcctttgcaggcccttttccctcagtttccattcttgtgcttttttatacagtgggcgctcaataaatgtttgtttaattgaattgcattgcttttgaaagatcagttgcaggtttttcaggagactgattcataggcagttagggactaagggcgtgccagaattcagaaagtagaaacctatcctaaatacagttccttgtttcgggatgtattttttacacagtaggtcactcttccttggggaatatctgtactgttgatccgttcatcattgttcagcagtggcaacaccaggagaacaaattatttacattggctgtgtcatatgggtgtgtctaattcggagaactttcaaacaaaataatgaagcttccccagcttctaacttgggaagtatgaaaagttacttaaaaaaaaatcttgactcttgtttaagtacatcagtgactgattaagtcacaacacattttaatattttcattcgaggtttcttgctaacattcttaccaccactaccactaaccccaccccatgtgtgtaagttacttttcctttcatttttcgtgggtcttgtgtgttaaggcaaagtcaagaactttgctcttctgataacttaacattgattgtgtgactgctttgtgcaaattgctatgggatgcctcatggaaattacaaaggtttcgtttgcttctgcccttcaagagagacttgcttagtgggagaagtagatgcatatgcaactgctccagggcaggcgatgacaaggatcataatatagtgcagacagagacaggattccctgtcttagagtgatataaacatcactcgaagactgagtcacatatatggacttgccatatttctttcctaaattgcacacttaactcttcactttcctgggctggattagaatttgttttcgtcgaaggcttcatgagttgaaagcacattacatatatgtaagatttaatggatttaatttaaaatgcattgaataacattaattttagcaggtttgattgttttaaatgcttttaagccggcactcttaaacgaaaatagaga

SEQ ID NO: 48188 - DNA, 742 bp, Homo sapiens
acttaagtaccttatttcatatttctcatacccatttttgcttatttatttttatagtatttaacttttatatggattagagaaaatatagaaaataactgaatttttaccataataaaataattcttcaaggggtggaaaaaaaacttcaaaaattgtatttcattgtgacccattcttttctgtttgttgtttattcagctttcatttttatgcctttgtttacagagaaacaatcttgcagatggcaattttccttgtaatcatttattgtcctatctgagtcatcgccagacatggcatttcagtaaacagtgattctgcaattgcttccaggcagatgtgttgtgtgaagttaagaacgctggctgataacctttctggtttttcaagcagcagggagaaagttttgtgtagatacacacctcgaaatcagaaaatggcgaaggaaggactttgtgctgcatgattttaaccaaatatagtgtttgtgtgatggatggaatagtaatctttttaaaagataaataatatttcttcgagtaaaggactttttatagtgcgttatacgtattttcttagaaacatcgtgcatgtgcattgttaaacacaacgttgaccttgttgtacagacatttgtatcaccttgtccactcaggttcctgtggtctcatgcctgtagctaagcaaaccaaactcctcatgcattggtttttccagtgtaaattggaggttctcttat

SEQ ID NO: 48189 - DNA, 944 bp, Homo sapiens
tggaaaacagcgtatttgtattaagtaatttgagagactttgcagttcatgaaagtgatgataatttagcattcactccagaaaaatcgaaagttttcagtacttcctgaagtagtgtttgtctcttcttcacctccctgtttaggtagtttcaggtttctctcaataataaattaattaatactgcatctacatcatagtttcctatgtatcatcctaagatattatcacctaaaatagggtaactttaggagacacgtcactgaactatctaatcatcaaaatgtgatttttactaagttgtgcattactctgtgttttaagagtcatttgtaacttttaacaaagttcaccatgtttttggtatggagagagtgaatgtgtataaatccatgtttgggcttattaaaattaatgtcattagactctgatatttgagggaagagttacaattcaacctaattatccaattaaaggattagacacatccttttcattcttcttttttccttcttgcccttctgggtaaattttgatagtgagttgtaatgatgttgcatctacttctactgtgttctactagtcttggagcctgtaacttacagctcagggagataaacctgtaggggcccagttttgagtttttgccattatgactcatctcttaagagaataaacattacatgtaagcaagtcgtcattctttttcaatttgtagtcttggaaagtgttttatattgtgaaaactggaaccgtattagctaataatttaccagcggacctgttctttttggctttaaggtgtattttgggaatcgagaatgttagttttagtttttaatataactatgtctaattttggtgactgaattttaatctagttttagcagatatttttaggttgtttattttaagtgttggttgaacttaaatttcttgtattt

SEQ ID NO: 48190 - DNA, 553 bp, Homo sapiens
ttttcatattttactgccaactttatttaaactactttctcaatttgcaaggataacaatacaatttctcttgttctttgaaaaactctatatgccacattcttaaagtattattgttctacctgttatgtaagttatggttcgattttatattacgtgcacttcttggaatgaaatatttcccttatgttgaaatttgggataatgctgagtatgatggacttgatggacatgttcaaatttcattgtagagagtgaggtaatagtgactaacatttattgattacttactgcattctgcattctgtattgaggatctttgccaacattatctcattcaatcctcacatcttacaaatagattcacttattcccattttgactgcccatcccatttcttttcattgcgtgctgctcctccttataacacttcccacagttgcttttcttgtgtttgagaataaaaagtgactgaggtacagaaacataaggtagcttttctaaggtcacacaaatggggagctgttaactactatatttatgttgtgtcctg

SEQ ID NO: 48191 - DNA, 618 bp, Homo sapiens
tgtttaatgggtatagagtttctgtttaggattctagagatggagagtagtgatggttgcacaacactgtgaatttacttaggccactgaattgtacacttaaaaatggttaagatggtaaattttatttttgtatattttaccacaataacaaactactgtcctgagttagccatgaaatgaaataatagctctgagtgtgcaccaagaagggactcagcctcctgccattctgaatggccacttcatcctcatactggggtggagaaaacacagctgtgtttacttttccaaccccatcttctattttgaaatataaccttttgcaagtgagagccaaggtcaagtgacacagctttctgctcacctcttcagtttgccaaacattgtttttctagtggagttctgggttaggtgcagcaagtgtgagtaacactatcactcatacgcccattggaatttaattagtctaccctcataatttctgtactcagtttggtatgacacatttccttactttcatctgtatatgaaaacacacagttgtgtattcaccaactatagtgtttccaagtatgtggattactctatatatcaaattcaaattacacagaaaat

SEQ ID NO: 48192 - DNA, 2139 bp, Homo sapiens
aactcagcttactaaaagagatccagtcttctggttctaactaaaacatcccaccggatgcaggtgtacttgcaaattaaagtttgcctcatgtgtcctgtgtctcaagtcatacagacggcccaggagggtggagcccctgcaacctgcctagcggggcgtttgcgtgtctgggggtgtcgggacacgcgcaggacacacacagtcccactttcctagtctcgcacttacctcaaggctgtcaacttttacgctcctccctgcgcgcacagcccccacctcacgctgccacccctcacgccccgccttcaaagtaggaggcaccattgtcattggacactgcttctctcactcctattccagaaccaatcactcgagttctagtggggagcgcctaagccaatggaaatgctcgctgcggcagctgccgggtcctgggcgctgggaggcggtgccgggggcggggtgcggctggggcgaattagttgccattcggagtgaggagtgggtagaagcggcggcggcggcggcggcgtttgcggtggcgcggactccgaggagcgccagcacctcgaggccctttctctctaccctggtccccagaagcaggggtcccggccctccttgcagctgccgggttctcccgtgcgtgcagccctgcgagggctgaggagaaggctgcgagcggccctcggggctgcgtgatccgggccgttgccctgtcagcacgatgcctggagcggtggcggcggcggctccgggctccttgcggccccggccgtgaccgccacaccgagcccagccgggcggttgcggccgttggacgtttgttttcgcagccttcccctcccccctcgccgaggcggcgggggtgtgcgttggggagggggagccccgagactcctcccccacagcgatacccccgcccctcccccttacacactcgcacgcactatcgcgccggctcccacacgctcgcgcgcctcccgccccgcgcctccgtgtcggccggcggcgtccagggcccgcagagccaccatgtccactgcctcctcctcctcctcctccagttcctctcagacccctcatcccccgtcgcagaggatgaggcgcagcgccgcggggtccccgcccgccgtcgccgccgccgggagcgggaacggtgcgggcggcggcggcggcgtgggctgcgccccggctgcgggagccggccggctgctgcagcccatccgcgccacggtgccctaccagctcttgcggggcagccagcacagtcccacgcgtccgcccgtcgccgctgccgccgcctcgctgggcagcctcccggggcccggcgcggcccgcggccccagcccgtccagcccgacgccgccggcggccgcagccccggccgagcaggcgccgcgggccaagggccgcccgagacggtccccagagagccaccggaggagcagctcacctgagagacggagccccggctcgcccgtgtgcagaggtagcgagcccaaccctcccgtcctcccgggctgcgtctccccgacggtgccctccgtggaaacttcagcctcttcgggcttctctttgctagtgcattatcgaaggtgtgaaagtggctttgggaatctcacccccctgcggtcgctgtggggcttggaggagcgaactgaaaagcgacttttatttgaccctcatgccgcccctcagagtctctcttccatcactcgcctgcttcgagaggtttttcagtttaagagctggctagctcattcgtgtgtttgccgtttgtagccggggaaggagaagctgggcgaaacacttaacacgcacacaaactcttcagcagcggataaggtggcggttgtaatctctaccgtctctttgtgcttttctgcaaagttcctaacgtgcctgtaactaccgggatagtattttattttttagagggttggtggcattagtttcgatgtaaggatatcggctggatgtaatgatatctgctagaggggacagttttgaatgtacaattgaagtgtatacggttttttccctcagtcctccctctctccctctcccccagccccccgccaccccgcctctctctctccctctctttctccccctcccctttatatattcatg

SEQ ID NO: 48193 - DNA, 871 bp, Homo sapiens
tgtaaggctgatgaatctccttctactaattactactttgctaaagttcgttaaaggactatcattctgccacctcccaaaaaaacgaacttaaaaaaatcttttgccatatatgtaattaaaaaaaaaaagtattccaaatatcagagctccatcttaatttgttgtgtactttttcagtgcttgttaccaggcttcttgtagccatattagtgaagttttcttttcaaccttgatgcaaagatactcccttgagttttctttgaaaatagactgaaggcctccttctaaatgtcttatgtgtcatttgacataagtttattgggtgagctgtaacctagagaatcatgcccaaatagctgcctgactgcattttttggtttgtttgtttttcctgatggacctcaggttacagagttttgtcaggcctcatttggtcagaagcatgtttgtttctcttgtcagcttcttgattggtttctttccagattctgcagggcagccatatggtcatttctgcatgttttctagattgcttctgtggtagggttccaggtttggttgatgagtatttcagattctacccacactgagagagcttcagttttgctctttggttttatttcagatagcatattcacaacttgtgtccttcctgtcacttatctgaagttcatttgaatttggtgattttattttacgtggcctatgtatttggctaatgtttcatcattttatatgtcaaggaggaagactattaatggctgttgaagtgcttagattatgctaacttaggaaaactaaatctagtaataattctattggatgataaatattaatgtacattagattgggtagaaaaacataccag

SEQ ID NO: 48194 - DNA, 460 bp, Homo sapiens
attaattctaccacaatctatcaaaccctgtgtccctctgtgaggtgaaggaccaatgaaaacactggcagtaacagcaggagacagaaatagctgatgagcctgcacagcacactgtgccatctcccaacgctctgaccccttctcctaacacatcaggttcagttcacctgagggatcaggggttgcttggcactggcaggctgaggcatcagctggcagggcagggtgagcagctcctatctgtttccaacattgacaaacatccacccgccccacacataccgcaaatccacctctcctgaggtcatagcctcatcttatgaaaactagaaccagtcagggtcacagcagaaatcttataatccgctgtgaaaagaaacagcgatttgccagttcccatcgtggctgcccctctgaagagctgctgctgatgtgactgtgatgtgattttctggtt

SEQ ID NO: 48195 - DNA, 1216 bp, Homo sapiens
ctgacattcactgtgtttattattaataatgataataacagggtagcttatacacagccttaaggctaagaaagtaaattgaattctcagtttcttccagttttttttttttccgcagtcagattaggaacatttggaaagtccttactctccgagtgggctgaaacctttcatatttacccagaggagacatggctgtagtttctaaggactcatccaagagatgatctctttccttcctctgcctcctcagagaggcagaaacattccataaactcacaaatgttgtaaaagtaaatgtacaaaaaaataatattaatggaactgaaaacgttacagtagagaaatcaattataataaggtaatacagttagctcttctggacttaatgaaatgtgttcaactgcattggaatgttctggtgccccctgcaggattctaacacctcacagaaatggtttagtaccaattcagatggcttagaaaaccctacagaggcaatgtgtttcttttctcaggttcaaatcaacttaacctggctcaatcacatgcagagggacaaagcaggaactcaatctaacatttaaaaggtttttagccaccataagtttgtcattagaatggaggtttttggatcaacaacagaaactatttttggtttgtgaagtttataaatctaacagtgcaaagttcacggttacatgtgtgatctctcaatttttctgggctgagtgtttagggaacaaggaagtttgcttccatgagccttgctttgacttagtgcagaaaaattaaacattctggaaagttaaacatttagcttctaaatttttactgccctggaattcctcaggaacatgactccagtatgataatgaacaaatggtcatcagagttgtttattccatagttacaggtcagcagatgtgaggaaccatcgtctgactccaataagcttttaagatgatagctgtccatcgttcctgccctccactttatacgagagtaactgaaatcactattttgatgtataatgtccctgctatcatctagtcttaggtaatttatctgaaagacattgaccaggtctcactgaatttgcaaagaatcatgctggcacataattctaattatatcacaatagctacaacataaatacagtattgtaatattgtacagacagtcctggatttgccatggtttgatttatgattgt

SEQ ID NO: 48196 - DNA, 2026 bp, Homo sapiens
gcatttcttatttcactccctaaccacagaacagttcagatctcagattcaaaccagagggccacagaaaccaatttgagattttccgaagagacttcactgaaacgtatggacaaaaacatgtttgcgatgagtcatattttataggaccttaatggccaataaatgccttatgtgtctttcttcctacattcagtatcactcccaagcaagctggtgacatattttccaggccttgataatttttataccgttaccagatctcggttactaagattcatgaacaaaaccctttcttgcgctaattttttaatgccatctaaatgaagagaacgcgattctttccaaactaactctccccaaccaggcagttaatgcccttcgccagaataagggcgcgatacttttaagaccccaaagagaagctcaggtgctttgggggtactacaagtaaaaagacagtgggaaaggttcctggagagccgctttgggggaaaggcagacataacaacaggatatgttcgtttctagaggaagcaggagctgcaatagccccggagcaggaaaggcggagtcagcagcgcccaaaggaaacgggcgcgccagggtttgctggaaccggggttgcttaggggttctcgccccgtctagtccgagactgctgagcacctcgcccccgggggaccaagctcaggcctcctggcactagtggttataaagaggtacccatatgctctctgccgcccctgccaaaaaaagggccacggaggggaagagaaaaagcacacaccaggcgccgcggcaggtgaacttgtcaacaagtcaaccctggacgcaagtccctgcccaccagggagctcggggtcctggggccggagccgccgggaaggcgaggcgcgcggtgggtgggtggggtgggctggcatgggtgccggtgctcccagcgctggggccggagcgcggaacgcttccctaccgctcccccggggctgacgcacgctctcacggcgcgcgcatcctccagaccttcccaggccggagggaggaggggaggggaaggggctgatgcggttcccgcaccgggatccgggacccgaggaggcgactcgcctatcacgcgccgcccgcggagggcagagaaggcagctcctaccaggcgtccccgaccgtcccggctgccgggcgtctcctgctgcttcctgcagcccgcccggcgcgcccccgccccgaccccggagggcaggtacctcggagccccggcccccaggagcctcccggccgcggtcggagcgtccctccggatcactcatccgacgtcagcgtcagccgaaggcgagggaaaggggcggggggagcgcaggaaccggcccttcctgcggcggccgccaccagccggaatagcaaccggcggagcccgtgcgcaccgcagcgcagcgcagcggccggggggtgcgggcgccctcgccgcccggctacctaccgccgcctgggcgccgccgctgcctcccttccccgcttctaccctccagcagacgcccgccggagcgacccctcccagggtgaccgggggaaggtgggtggcgttgacctcaccttgcttggggagggtcggggactcggggagtgagtttctctctctctactccccggggtctctcctcgacccccatctcctggggtatcccccgctcggatccgccgcccagagtgaccccgcccctgctctccggcaggtgttccacgtggccatagcgtttgcgtcacaatgacctggcggacaggtgggagccacagcgtacaccccagggttccctctgtgctgtgcgtagtgcctactgcttgcttccaggttaaatttctgtagctttagaggacaggagacttcatgacttcactgccaagaaaagttacagaggcctgctgtacctggaaatcaagtttgagcttcgagaataaaggtcatgttttaaaaacagctgtgtatgtataggtatatgtttttcatttccatatatttctgtatctt

SEQ ID NO: 48197 - DNA, 833 bp, Homo sapiens
tgtagcttatctaatgtgtgcattttctccataaggcaaatagatttctcgtacttaggaagaccggacagcacttcagcaccatgccttgggctcattttaaaaaatgaaatcaacaaaaaataaaaaggaaaaaagtgacactaagtagaacacaaaaaagacttataagagctgcaacaagaaggcagaacagtatcttgttcaatctcagctgggaacattaagtcttgggaaacaactttttcaccactttgtgcatgcccataaatggcttcaaaagcactgaaagtattgatttgggatgcctactaaatttcagtgagtaagcaaacttgcaaatagtcttcaaataatgaagatcaactgtatctttccagaacataatttttctcctggcagacaaattatctttgcaccatcagtaactgaggtgattctacgctctccgttaagagcatttagcaacgttcttctttggtgaattttacactttgatttgtgtctcatcaacaccatatttccaaagtctctttttagatttttagtctctttgcagccatcttttaaacactctgtgtatgtgtgccttaggaatccccaaatgctcttagagagaattaagaaatattggactttcatgtttgttttttctctctaatctcagctcctatctttcttgcttcattggtagcctcagactccaacttttgactttttaacccagtaagacattcccatgctccaaaccacaactttctgtttgaaatctatgctctccaatgcagatttaaaaaaaaaaaaaaaaaatgtcctgagggaaaaaagcagtg

SEQ ID NO: 48198 - DNA, 537 bp, Homo sapiens
aaccaaatcaaaaccacatttagcatttagtgaaaaaatatatatatttcaattttagagaaaaaagaacatatatttttactctcctgagaaattatgctccttatcaaggcagctgttgaaactatctgtgtatctctccaagatacacaagttatgtaatatcttaggaacacctggttaatcctctgattcctttgaaggcagattatgtaattcatggttgagcctggtaggctctctcatgcgatgagctgcttgccaggcacaagagatgacatgctttcccaatggacacagagatgactcacaatttccattactgacatagcggaacccacaggaaaaaaaaaaaaaaacaaagagccccactctttgctgacctgccccatgggcaattccaactgtgtttgcttgggagaaattctgtttgctgactgatatgtggtagttatgggaccatgttttccttttggtattctcatagttgatgatgccttcttttctaaatctcatacattctaatgttaaagtttg

SEQ ID NO: 48199 - DNA, 622 bp, Homo sapiens
catttaaaaaattaattttgtcatacccattatgaagtgtctaccattaaaggaccaaaaatagtcatttacttgtgaaatgtagaaatgaataggctgaactgcttccccaacccttgtgctgatttagctgctgtttcaactacttattgagaataccagactaaacgtctttaaaatcagccataaaatactcaaaaacatttatttgcctttctcaataacaaaatgaattcagtatttcatttgcttgttttgtagggtgtttggaaggtgataggtcagttaatgattccttattgaaagagtcagaaggaaaacaccacagtcatctgagttataactccaagtgaaaggacaacaaagacaagtcaaaggtcaaaggtgtagaacacctcattccaaatcatgtgaacacatttcacaagtgcttattcaaagaatggagctcaggagaaaactcaagtatcattgttgtaagaataacttctataggacctaaacaaaaatacagatcaaacatggtcttcatgaaaggctgaaaatagacaacccagaggctggaacaggcctacagatacattttatttggccaatagagtttttagtggttgttgttgtt

SEQ ID NO: 48200 - DNA, 2226 bp, Homo sapiens
aacaaattctttgcaaattatttaagggtgcctctataaagatgtatgaaaaatagaatctgaataagtaaacgtatctattacaaatactggctttaagcattatctctgaaaacgtaatgctaccaatgcttgctgcgtatttagggaaccggatttaagacagattaaagattgcatagacttttagctctacagcacattgatgtgctgaggaaaaatgagatgccaaagaacttaactgcaatttccacacttcgaaattttcccaaaagcaacgacgtccagacaaagtgaggattccaagatcacggacccctcttatttaccaaaaggcctggtggtgcaatgcggcgaatacaagaacctccagagatggtataacacatagggaacctgacctatgctagtctctgacccacacagcgcacatctatccctcctggaccgcacaacctgcaaaagagagcggccaccagactgttccaatattcactaactagaaaaaactaggttttttttccgagcagtgtccgtctccttcctcctgtcagacaaaaccccacaatgcatggcgtagagggtcacagaggcctgggacaactaagatgacaaacactaggcgaggcagggtctggtctgacggacggtaagtggctgtaaatgaggacgttcccagggaacagaaagaggcgcaccccgacgcaagaaggacaagggaaaacattaggagagcggtcacgaacttacgctcggatgcttcttggcctgaccgatgatctggcggagcatgtttgcggcagaggtctccgactggaaaggagagaaccgacctagccaccaggccctaagctaaaaattatctgcaatgagacactacggacttccaaagtcacccaggacctcctacctgaaggacccttggctgggagggcagcttgcggcaggagggcccggatgcgactgtctttaatagtgcctgcttagatctaacccctcatatgttcgtcctgacctggtcggaccatcatcattccacttcatagtgaaatgccttcattgccgtgccatgcatatttctgaggggaatttttttggtcgaaacgaggactcttcgattgaccagacaggcactttccaagggtgccacgtactgaggaatgcggtcggagcgtgggcgcacgggccgcgcgctccgtgagtagggggcctctcccgcggcgcctgagagccgggtccgcgcgcagaggccctgggggcgcgcgtgccgggtgcgcgctggccagctgtgactgccgctgagggagctgcgcggcgcctctgggagccgagcgccgggcgcctggagggcaggtcgggcctcttgccgctaaggtcagcggctgcggtttgagaagactgcagctgcttcctgtgttacgctgtcgcagacaagcagaagttaaaaactagtaaatgacttaaaggtgataatagtcctggcagtgtatttctgaaccctcagatcctggccctcggttgaaagttcgtcgccacaaagacctttccaacacgccactatcccccgtccctggtcccaaattgcatctttaaaatgtgttttcaatggtcgtgtagctacagataatctttcccactaccccagtcgaattttcatttgtcttttgttttgttttcttcgttgttttttttacccgaaggacttccataggacaggctttgcgggggagggtggggggattgggataaaatgtacactctgaaccctctccaatctcatacgtagcttaaagcattaatcaaatgatcaagcaagtattaataattgggactagaaatcataggagaaggctccaccggaagttacactagctctgaaggaggagcggacattaaccaggtgaaaacggaggatgcaggtgtacagggcggaggtaataacacgtgaaggtctgaagctattgaaaacccgagggagctgtatgaggtctagtgtggctggaaagtaaaagggagagcaaggtggggatcagatctgctgggccaataaccgcttaaacatcatgggttttatgttgagagcttgggaaggttgtgtttttaaatgattgctttgtgaataattgattagaagggataagcgtgagaggggaaagacctatcaaggggccattgcaatagtccataatctgtgtgacagataatggtagcttgaactagtgtaga

SEQ ID NO: 48201 - DNA, 1983 bp, Homo sapiens
gtggaggcagggaacctaaggatgtgtcactccgacttcctaagaactaaattgaaaggaaacccctaactttccatgcctaagtaacaaaaggaccagaggctactccctttgcaaacccccactttttctgcagggcagatgggaaattggctgtgggcagcaaatcagactgattgcaggagagtcttcctttgcatagaagtatcactttgtaacttcaccatctgcaagaaatcaaactgattgcaggggaaatcttcctttgcatagaggtataccactttgtaacttcaccctagcctctgattgattgctttttgcaccaatgtttgcacaggagcatgacctttgtaacttcacttcagcctctggttggctgctttctgcaaccaatcagactgattgcgcgttacttcatttacatgaggtgagcattaggtggccaataggaagcttctagagggtatttggactcaagattctgtatccgggcccttgagccgctgctcaggtcgcttccgtacagagcgtgctttaattttcaataagtccctgcttttgttgttttgttgcttcattctttctttgctttgctgggcgttttgtccaattctttgttaaaaacgccaagaacctggacaacttgcagtcacgatcctctaccggtgacaatatcatttaaatattggtagtggcttaaggtagcaaacatccctttgtggaacgtttactcagtaaatccttaaaaaacagatcagaaacaaaaactggcctcccagggatttggactcaggaggtgaattaggcgcggagagggcggagcctttggggtttatgggcggaattgcacagggtttggcggggatctctgctccgccttggcactactcggctccgctcgcctccgcgcggctccctgggctttcactcggctctgttcggctcctgctcgggaagggtgcgcgggggcgagtcctgcgcatgcgccctcaattcctgctgctctcagggctgcgctcagcctcgtgttttcacttccttttcagagctgtatccgggtcgctgctttccctattgtctgaggcagccgccctcgcgctgtgcaatttctggtctttcgttgcttctggtccaggctaataaagtttttctttctttaattttttttcttctagttttaacgggagaaattaactccccggggccgccgggttgactgcgctgcctgggccggaggtcttctccggccagggagcgctgtgggaaggggctcgagcggccagggccaggcgaggccgggggggcggggggttaggggaccgcggggctactcttgggagcgcccctgtccggctggctgcgcgccggttttaaatagcatctttcggacttgtcttcgcggccccagtccccgacctcggcgctgcctgggctcctgcagcctctccctaagtcttctccaaacgaccacctcacggattccttagtaagtgtatccgaggcctctgcggcgagaggtccatttcagccattctagaagtcagggccggtgggagcagggcaggggtgggagagtcctgcgggaaagcaggattggtggaccctcgccctccatggtccgcgggaatgaagcccgcttgttttattccctgatttttgccgtttttattgactgttacgatgtctaagtgggggattacgaggaaggtgcagaaacatctcgaaaagatgagcaagagggtcagcttcgattttagctggtctgagttggcgttggcagcatcagggctggagctgcctttgaaactgcccgtggagctgtccagccctccccaccctgcttctgcaccccaaccttctcctgaccccttttgctgagaactcagttagacaaaaattccttgtgcgaggtcatctttatgttctcttagcaccacaactctcccctgtgtttggtgtgattatgaatgacaatgtaat

SEQ ID NO: 48202 - DNA, 1592 bp, Homo sapiens
agaaaactggtttttaaaagctaatagtgtacgtagaattctaacagaagactctggatattagatatctcttgactgccttagaaaatcaatttgagtgcagtggctcacgcttgtaatcccagcactttgggaggccgaggtgggaggattgcttgagctcaagagttaaagagtagcctaggcaatgtatcgagaccttgtctctaataaaatttttaaaaaatcagctgggcatagtgacacgtgcctatagtcccagctacttaggaggctgaggtgggaggattgattgagcttgggacatattgaggctgcagtgagccatgatcacgtcactgtactccagcctgggcaacagagcaagaccctgtctcaaaaaacaaagcaaacaaaaacatcaatttaataaaaccattatggaaaggcatgaaacaaagtcaattctctttttgtttgtctatcctaaattagcataacaaatttataaattttcttccctcacattttcaatgtctattttgcattatttgcagataagcttaattttcccttgttattcaatcatttatgctttctgatttataaattcagcattcagtgcctttctgatttaatgacaatgaattgttgacttgtacttcccagtcttccttatatcacaattactagaagataaagagttggggataactaaacatactcagtttatcctgaccaaatagatatttctccatttccttctttatcacacatagtacttccactcagctatgtcaggagcctctctttagtctcagccttcacactcagtagaattttggtttcatttttttcttctgtgtgggatatgacaagatttctcttcaaatagcctattaatcctttattctttaatccacagtacccctccccttcccttttcttctctttttctttctttctgcctttactacatgcccaggcatgccacagcaccaatggcttatcagtaccagctcacattcctttccttatttgggaagaaaactagctctctagcttatcacagatgacttctaccccctctcccctctctcccttatgtgcacaccttatctaagaaaaagttcaaatgttcagagaatcgggtctagcttagattgtgcagtccaaccccagccaatggggaaagggcacaggggcaggatttgcgtcagggataaaaactttaactctccttttggtgactggccaaagagaagcacccctctgtgcagaagtaaatttgctttgctgagaaatcctttgtctgagtgtttgttttccttaagactccaagctttatttctgacattctggaattatagtttggagtcttattcctcacttatattgtgctttaccttctaggtgtgtgcacaccgtctctctttctccccgcactcccaccccgtatcatcgtgactggaaagccacaggaagttgccacatagaaatattctgctttccctatttttttttttttttttttttgatacagagcccttgctctgtcgcccaggctgcagtgcagtctcggctcactggaaactccgcctcccaggttcaag

SEQ ID NO: 48203 - DNA, 1854 bp, Homo sapiens
ccatgcccccatcccccgtcgctcccaggtcttttcatggcctttgccttcctttttaaaggcctttttccttcctttttcaggacccactggtgagcagcagctccccactcccagccggggctgggacacatagcgcaagggtcccgcacagcaggctggctggtttccagccacgcgcggctgcgcagtcttccccttccctcgccaaggggtttcactctatcagacagtaattaagcttaaccttttctccctggtggaggaaccacttgcatgagaataagaggttgttccccaggtatgtttacaccttttctttccccctcttctccgccccatcagcagcaaaacctttaaagttttcttctcccctttactaggttaggctccccaactatcaccgtttatattttctgtaaagctttaattgtgagaaaggatctgtggggctagtcttgggctgtggccaatctggtgtgctcggcgtctttttgtttgcactgcaagcctccagcatgttttacatcctgggggcatggccagtaaccacttggcaaagctttgtttagcaaccgtgccttagggagtgagccctctctggttcagtatcagcatgttttcctagccctgtctcctaaagggccccgcacagcgactgggttttctcttgtctgtgtgtgtgttgtgtgtaatgtctgtaaaaagagctctaattaatttggcttaaagaaagacaagtgcttggatcatgtattttttttaagggaagttaaaatctgtggtacctttcagttcacatgactttaatctttgagaaataaaaacagccctaaagactactggtaaaatgcaggtcagataaaaggtttgctaagtgttttgaggttaccaactgctgctctttgggttttgggagctatttgacttgctggcttcacaactggtaaggactggggacatgtggaactaaacacgctcttaagagggcaaaccttggctgcagttagcacacaattaaagcaacttaccaagctttaccttaaagttaaaaattgcaaggtgttaccattagaacatgtaattgagactactgaaaatagatttacaatcaacgtgtgtaaaaacagcaaaatttttactgtgtttgtgtgtgtgtgtgtgtgtgtgttttggtaaaaggttataagaaggcatggaaatgtaaactttggcctagggttaaaggattgttttgagttagataggaaaagctgaaggttcaaagaagtggtggaagaattgtggaaattaatcttgcagaagaggttccctgtgtgaacatattgactaaattcaaaaaaggatattattacattgtttttctgtaagttgagcattgaaacaaaaggacgacaaggttttcctaaggcgctagtctgctctttggcaaaatttgtaaagggttataaaaggtttttgcttctttaaaatttctgagtaatcattttggcacaataaataactcatggtattctggaattctatttcataatatcaagtgttttgaaccttgaacatttaacagccttccccaaatcacactttagtttcaaaattgtcttccttggcacctggctttttgaatgcttcagagggcctctgaagtgtccaggaaagagaggtaaacaggattatttgacatgtttaggtacatgggaatgccaaaatgatgctcagtcttctttaagttatatctcggtgaataattctaatatatgttcccaaattgtatgggatttctaaatttctaatgtctgagtatatgctgtcaatcgtaattaaggtagttatgttaagttattgaaaccacgg

SEQ ID NO: 48204 - DNA, 813 bp, Homo sapiens
gacttcaccgattttagtcttctgttgaagatgagaggaaaatgaagttgtctcctttggcattccttagagcctttggggatttgatttctcagctatgttaaagatagttcatttgttttaaattccatgatttgcatgtaaaagttttccctcggccccttttgaaatttgcattagattttcaaggagaaaattgaggtaaatgctgtcagtagaatgacagttttaagtacttttctcccatgttgtaaatctgtcttttttgagatggactcctgctctgttgccctggctggagtgcagtggcacagtctcggctcactgcaacgtccgcctcctgggattcaagcgattttcctgcctcagcctccagagtagctgggactacaggtgcgcgctgccacgcctatctaatgtaaatctgtcctgaacccaactcagcctgtctgtcttgccacactgcatctgccaatgcactagcagatatttcttccagagccatgactgcagcctcctacctggtgttgctccctaagtttcactttcagttatctgttcaaatgtcacctcttcagagaggaattccctagtctcccaatggaaaacagcaccccatgacttttccccattaccttgccttatttttcttcaaaacatgtatctgtcaatatttgaaaatatgtttattgactctctcccccttagaatataaattacattgtttcatgggttttgttttttgctgtatctatagcatctagaaaattccctggcatataatagttgattaatagacatttgtagttaaaa

SEQ ID NO: 48205 - DNA, 723 bp, Homo sapiens
gaagggaggtgaggatgaagtggtagaataaagggaagtagcgtctgtggagtccttcctgttaatgagttgtactagttctgtattacaaatgttctcatttaatctcaggagtactctgcaagagaaatattactactcagtttataggtaaggaaatggggactaacaaaggttaaataagttgcacaacttacgaagtaagtggtaactatagaagttgaatttagttctctgtctcaaataatcaaagggaaagaaagatgctgaaagacagcatgagttttaggcacactgtggaatcttacagagccaattgtccagttagtaattcttcgtgcattaattaggtgaaaggtgaacccccaacccacggaaagatccagccaagtaaggaactgcaaaatattgaatgactaattctccaaacaaggtaaagtttactgatctctgtgtgtgtgtgtgtgtgtgtgtgtgtgtgtgtgtgtgtatgtgtgtgtgtgtgtacacagtgtgtgcttaggactgagttaaaatgccatgcttatttgacacgtgggtcctcaactataagggctttgggaacatttaagtcatcagccacggatttgaaagaaagactttacttgtcaaatatgattctacaaagatacattttctatacaagtatagatgttcaaaagcataggctatttcatcatggtggtgcacaaagatgggaaa

SEQ ID NO: 48206 - DNA, 1074 bp, Homo sapiens
caaatatatattttgttaaaaaagaaaataaacttatatatgtaagaacctgtgtttatattttacttattcaaccataataacaaaccttgggaatcattacacatactaaggcatttattgactttctcctcatatttaacatttataattttaactaacatgatgttgaaaatcagatgcagagtttaaaaacctcacattagtaatagggctttgtcaggaatacaaacatatttgatggagtgttcaaattgtgaagatgaagtaatggaagatgtattaattttgaagcttattaaaatgatttatttttaacttgatccagtgcaatgcactgttctttcaatcaattaaaatctaatattgccatgaaagtatttgcaaaggatgatctttaaacactagtttactggattctaataagtattaaacataattttaacaaaaagcagtctgtggtaaattgaaaaactgctgcatgaaactaggttatacaggtctatttaccctggacttttcccttttgggtaatacaaactatgactctctgagagaatgactcagatactgcattcccataattactgactgactttttcacatagcatttcactggactagagaaatagatctaaatagattataattggaatgctttaaaattgaattcatgttttgaaacattcggaatttaagattttttaaagtaggttttttttttttaatttccatttccagatatagaagaaaatgcaaaaccaagcaaccaaacaaaaatgccaaaagcttaagatagtttcttcttcctacattattttatattttacaggtcaaaagtcaaacatggataaactagcaataaattaatttcaacaaagggaggggaaagtgttatttggataaatttcctgttttataaaatgtctatttaaaagatcaaaggagagtcaattttgttttatatccagatgacctaaaatttcctatagtggcagaaattgctgataaaggcaaaattctaatttttcttttttggttgttgcaaataatgaattgttcttggcagttaaa

SEQ ID NO: 48207 - DNA, 833 bp, Homo sapiens
agcaggggagtaatgcttaggctagtcttctaagtgaaaaagaatttcttcctaaagtatacatgtttcataattattaatcacttttcagcatttcttgtatgttatatcaacataagacatttccccaaactactggagctaacacgtcaccttggaagtttacacaaatatttgccttcttgtacatcatttcagtagcacagcagctctgctgaagagacaagaatggcagctacagccataaacatcccaactccattgagcctgtggaaggaacagtgttgacttcctttccttatcctaggaaaggatgtggagttgacgtatttgttcagctcctccctcacgatgcatttctctaaccctacctgtagctttggcacgcttgaggtgcctcacaggccttctcttcatagaggggatctgtgcagtctcggcccccgttggctggcagctgaatgatgacccgatgcctagactgcttcctgatactggagtcccctgcaatgaagcagttttttaacctctgtactttacactgatgagataatctctaaataccagtctgtgtgaagaaattacattgcctccagctacatgtgctttgacatccctgagaggcttcacctggtctaaacattcactaaattctcccaaagaccatttatatcaaaaacccaatcaattcatatttaaaaatagagaaaatgtgaagaatggagaaaacagttctgtaggcagttagccttcctaaggtgcagtcacaaagtaattgctcttttgtataattctttcccttgaggaatatgacagatctaattaatttattt

SEQ ID NO: 48208 - DNA, 1020 bp, Homo sapiens
agaaaagaaaagaaaagaaaaaagaaactggaggtcattatgttaagtgaaataagccaggcacagaaggacaaataacacatgttctcactcatatggtgggagctaaaaagagttgatctcatggaggtagaaagtagaatgatagttaccagagacagagaagggtagtggaaagagggggatgagaagaggatggttaatggggcaaatacacaggagtaagttcaagttttcaatagcacagttgggtgactttagttaataattgatggtatatttcaaaatagctggaagagaagatttgaaacgttcccaacacaaagaaatgataaatgtctgagatgacaaatatcctaaataccctgttttgatcattatacattgtatgcatgtatcaaaacatcacagtaccacataaatacactcaattattatgtgtcaataataaaaatggccttgctttttaatattttacatcattcaaagtttacataaagaactacctgttttaaaatccttttaattggacacaaagaaccattgaacatgcaggaaaaaatgtcagcattgctacccagccaggagagactgtagggagacagcagtgggtaggggtggagagggatttaagcctctattttccccttgatgggggaccagttggcatgaaatgtgaaaagaactcttgagaggatatttagaggtagatccaaaacaaggtatgtggtatcatatgtattccatttaattcttgtattcttattttggggttatttctgtctccattcttgatgaagtcctcagaggactcccagcacttcttggctggaccttcttggctgtgattttcttgctcctttctctagttaggagaatggttttcaatgggctcagctgcattttagttgggaggacacatcagttggtcaggactggtattacattagctggcaccaaacagatatgggaaggcacaaatatgagaagggaagctgatttctcttccagaccataagt

SEQ ID NO: 48209 - DNA, 761 bp, Homo sapiens
tgcccccaacagggtagaactagcctgttttcattcaatctgtacttttccatcaggcactctcagtaaatgtccccgatagacaataaaagctcactatggactattcagctctatccatagcaacaatataggacaactgccctcactcccaatttattctcagcttcacgtgttcctctggctccctcggctctagactaccagcctcataatgaaatgggaggtaaaatgaaactttgcatagatatgtcaccagtgcacttttaccaagaaacctcacaactcacattaggcaatgttttcttttcaaattgatctgtttcacaacacattgctttggttgttcaaatgcagtttcagaaatcaaatttgcaagtctaaaattaagatgacacagcagagaacatgcatcattcatgacgatttcacagtgtttcctagtctgatttacagttgtcaaaattaaccttacatgacataatccattatacgtttcactcaatactgcgtttccaaatcatgacactgtatcccagtcacgacatatcatcagtttaaactagtttctattgattttaatttctttcagttactttctaccttttgctttctttctggcaagatataaactttatatgagtttacgatgacatccctttaataactatttctccagaatttccaacacaatcctcattttcatattttattttaaattgcagatttggtttaccttactttttttctctgatttatct

SEQ ID NO: 48210 - DNA, 2001 bp, Homo sapiens
aatagcatttctgttatagtctctatgctacacaaatgatttggattatacttttgctaatatactgtgaagccacattcgtctggttcttataaaatgtttcagaattacaataattttacacttgaaaatttattccagaaagtttgctattccatgtagagaatatctcaatgttgtaatgtcagacatcatacttacattaatatgtgctgctacaaaggcaccattttgtagtttgtacacatatctcttattgatacagctagagcacatgtgtattgtcccatgtcaacccaagtgctgtggtcttgtctgtgagtgcacactacacatttataaaactaagtactattttcattcacatgcaaatgactatgtcaaggaaatacacattgaatttgcaagtggcaaaaaaacatgatgagtcttaagaaactcagaaagtaaagaaaaataagtgttcattttcaaaaatatcatttatggtttggcagctacacaatctacttttgttcacaaggctagtctattaaggcaagacacgtgtgtttgtggtctttagtaacatctatacttataatctgttagtctagattactctttatataatttgccaccacttagtttgtaaaattgactaaaaattttaacaaggtgctttttttttttttttttttttttttagaaattatcaactgcctagcaagaacacatttgcttcttaaatcatggtatatccacaaaccagttgaactaatagaaaatagaggaaatgtgttctaatcactttcaaaggttaagcccatgcttaacagaaaatcattaaagtacatttatcagagtctaaagaatgaatgacttatcggcaaatgagtcattagtcatcttcttgtcattatctgaactctgcagataccaaacaatccactcagctctgattcagggtttttcagcttgttatttgtattatcactgatgtaatttttccttctttctttttaaaaacatgaactgaagaggtaaactaaggagtagtctagagaaaactttttccacaaaatattcaactggcttaaatataaaaaggaatgagtttccaaaatgatttcaccattaaactaagggctcatattgaatttagaaaatgagatattcctttctctccctgagtgcaaagcaaccactttcaagtaggcctctgaattctcttctttagccataataccagtgatatctcttattccttccattgcttttctttaaatttaatcccaagtagctgtaaatcacagcagtcacagtgggaaggtaatcatagtattcgtctttgcaagatatttttgcccttctggtttgattgctgcctctcagttatggagctattaattttttacagatcttctgtttaccatggcatcctgcctagtatgccaagtgtgttggttgcttgctgaacctgtatatataactctgttggatttaggaatcatggaaaaccctgagcatttattgttaaggggagccccagctgacttttgttttgccatttgttagctaaaatcaatacattctatcattataatctctgcaaaaccttggatgtgtgtgcctggcaggcaaaaccatcagagagtctaagatcctccccagacaggagagaaaacttatttttatttttaattaacataaaatgcacatccaaaccagcagcttcaagacccaaaggaatgtgttctaaagccttcagcagtgtgcagtacactctcgtttccatatctgcatccttcaatgcttatgtgatattcctttgaaattcattcagcttgagccaaaataactctggaaagtgaaagaagcttatacaaacaaacaattttattcaaggatctctatcttttctactttctttttttttgattgtttaacacactgtcaaaagtttgaatatgcatctcttatctctttgctgtccatttcttaaaccttacaaaatatgcc

SEQ ID NO: 48211 - DNA, 1839 bp, Homo sapiens
tgtttcatgtaatcttctaagacaaattgtgtactttgactttaaataaatttctgtttaatctcctcactaaatttctggatagctgcaacttctttaaaaattccagatatcgatagtgatgcaattgtagagtagactgagctgtctcttcagtagtggtgcagagatgggctgaagcaggaaaagacactcactccctgaaacctgtttgcaaccccatgacgaatacatactttccctttcaactacaacattctcttaatgtttggcatgaccaagttattcttaaattaccccctagctctaagcaacaggaataatcttttcccattttattcctatgaacatgtgaagtttcaggtcccctaaggaattctcaatgtttttttaatgcagagagaaagcgaacccgcagaaaaggggttggtaattcctcactccgtattgttttcctgcctgtcacggcccccgccagaaactccaagcattttgccaatgggtaatgatgggcagttagtagctgcttttgttgggtggttgaaaaacaaagcaaaacaattctcaaggaaggaagagaaagtttgaacccagacatcctaaaagttgtacactttaaaaatcctccgactcgctagttaataattgagttttcagtctttccctgaaggctcactggagccccatttgcctttaattgttggaaccgccctcacttggcttgtttctgaggtgtcccacatatcacaaagctaaagttaacaaattcaactctatatccacaaatgtcatgacagtgagcatattgctttgcctaaagaataaagactgagactaaactctttgcttgttctttgctagaaatctgtttgagaaactcctagtagaatgaaaatccaggggttaaaaataatgcacttcatcatggaagtgcgcgttgccctcattacagagctgcgagagaaatattccagctactcactgttgcctcttagttgttatgcttttctttcctaattgcatcggacatgacctatttgcttcctaagaaatcatactttttaccttaggataccagcataaccaagccatccaaaagcaccggggtccctacagaagcccaccagctccttaatgtggccccagatgtgaagatggggaaagggtaactccgtcccacttaccagtcttccacagatagagggtgggcgcctccgcctcgccctgcgccgcagccctgccggcgcccgggcgtagcagcagcagcaggagcagcggcagcggcagcggcagcggcagcagctgcaggacgccccggcgcggccccgcagcgccccggctcccggacgcccagcgcctggcttgcagccccatgccgcctgcagccactccagggtccagagccgtagcacgctcggcagggaatttttctccgctcttggaacgtcttttcaaagagtacagaaagcaaagctctttcctgctattgttcgcttcagatgagaaggagggagagcgcgtctaacaccagggaacaatagcgtccgcggtggtggccgtggccgctgccgccgccgccgccgcctctggcggggatgctgctgccgctgccattcctcgcagaatggcaggtcccggcggctccggaggcaactgtcctcagggggccccagctgactgagcaggtctgctaggtctgggaggcagcgcagcccccgccagctggagggggaggaggggggcgtgagcccaaaggagcagagggggctggaggcagagggaggcgagagcgcgagggcgagaaagggggcgagcaaaggggagaggggccagccaggc

SEQ ID NO: 48212 - DNA, 2453 bp, Homo sapiens
ttccctttggaaaatatgggctaaataaaagcggttgaaaaataatgattttatcaatgtcccttgttggacattcagtttatttaaatggatacacctcatacccaaatctttttagagttctcattaggtttaggatacttctgaaagggtggaattgctggaccaaacgatgtgaacattttaatagtcttgatacatactgactgtctgccagaaaacttaggagttttaaatctccgacaacattgtatgagaaagctcattatctcacatatggatctacagtaatcctcttaaattgtatatcgttctgacttgtatttcctacttttacatagcttcatttcccaattcctgttagaattccctgattctaacaggatcacactgatcctgttagaagagagaaatatatgactctcacttccttgctcctgtgactgtaagaatgcctaccattcattaaacgttaaactctccgcaggaatgagactagagtgcccttaatattattaccggcatctcattgatccctcaaaacgactccttgtcgttgttcttatcttctaagtgaaatgacctagacgttgggggagggcagccccaacccacagcgaagagcttaagtactgggatccgagacgggatttcacacacctgtaactagcaccagagttaaggggtggggaggggcagcgtgggcaaagcgaaacgaaaccgagcaaaaacaaaaactacggccttgccgcttgctgtctccttctagttggccagtttctaaattaaaatagaggtagctttgctgctgtcagcggcgtgtgtacggaccagtttattccattcctaaggaccagactgtcagcgacaactcgcattgcgtgagcgaggaggctgctcagctgaaagctgaggcagatggtgcacatttataccctttgcaaaaggaaatggtctgatatgggaaataggaggagcgactgttcctaggtaattcgtggctacagtggacactttgaagtctgggggacgcgaaggtaatgaaacctgaagagcgcacaatctcacacgatcgacgcctctgggctcaaacaggaggaagaaggacgcatgcgtcacgcgcacgccaggggtgtccctccgggagcgctctgcgcaggcgcggacgcaggttacagcagcgcttggcctctgctgatgccgtcgttatcctacccctcccccgtcccagctctacggcggccgcgcgctccaggccggtcgctccaccccccggctcccgggactgtggactccacgaccctgtcctcggccctgtccgcgccgaagcagcccgggactgcgcagcgccccgcgtgccggtgagcgaccccggacgtgcagtccccaggtccccttccggagcgaggctgagcggctgcgccgcggcttgagccgggcctgacaaggaggggaggccgctggggtgctgggccagccgcaggtacggcggcggtcagggctggtgatcgagttgctgtgtcgcctctaatgaggcccagccagggaacactcggcttcggcccaagccctacctctgggttgcctctaggccctcacaccttgagcgccaggtggccctcttccttttgctgttgatgaatgttcttgccgtggtgccgggatcttattttgcagctttacagagtaggctttgtgctaggtgttgtttatggagcttttcaaaggcgcttgtttccttagttctcaagcccttttagaactaaaaccagtgtctacacagaagatcaggagccatttaaattggagtgctgtgatatattttttctctccaaactgagtctgatatccatgttgactttcagtaaactaaggaaccgctataataaataacactgagcccacagaggttgcagaagagggtctagcaccccttttttaaaccattgagtctcccaagaataaaagtggttacacttgtcagttctctaaggaaaatctagtagagaaggcaagggattcccagtttctcacagagtctggcacttgtccaaacacctaccctaaagcagaatcgatcatggcagctattagattaggacagaaaacaggctcaaacggagagccacttgagtctgcctttctgtgtcttttttctcaacgcgctccagttaagatgcagcttacagcctggctgtgttgactgagatcccagaaagagtgcccttaaggccttgctgataaggcccaatgatcccaattcatctagtgttccgcatagaccccaaggttacagtgtgtggggacagtgatgttaagtcttccctatcctacctgtggctgacaggtgttgattaagacaatgattttttagaagtcataaatcatttgtatttttgatgtgggcagtgatttttataaatacatagttttttttttttgaaagagtgaaa

SEQ ID NO: 48213 - DNA, 597 bp, Homo sapiens
aaaaagtaaaagtaatcatatatcaataaagtactattttatctaacaattattcatattacagctacagcaacttcattcattctccccagaacaacccagtaagaaaaatgaggcacaaagattctaaggcacacttaatttgctcatttattcattctataaatcttttctaaacgcttatcaattgcccggtttggaactagtggtagaaactatgagatctgcagtcctgtttgattcttcctttgatcctgcacaacctaaagagggcgcacttaccactcctatcttgaatcttccctgaaagcttgttttgcttttcgcaacacaaccttctgtgctagggatgacctacattcactacaagtgaaagtaagacctacatacagtcctgctgtcaatacagctgagcagttgcaactccttcttcctccacctctgtccaagccctcttttagttctgtagacaaagatcacaatatggattcatactggcctggattgtaagcatagtagagaagcagtctcccctgccagagtaaacgcacctgtacctggcaccatctcttctgactccctcccaacaattaaaga

SEQ ID NO: 48214 - DNA, 2175 bp, Homo sapiens
taacctagaacgaaaggcacagaagacaaagaagaggatggaaacaaaaatgcaagggagccagcagaggctggagtacaggaaagttaagaattaaactctcccgctgcttggaaaatgcagctttctgcaggtagagccacctagtatgtatatggccacaaagggaattttgaagggataaatagagattaaaaaaaaaaaaaaggctagatggctttttgtgttgtattttccaagtcgttaactgcaaacgctagttttaaagagaactggacactcaatcaaaatactcctgtctcactccagcacatacaaatggtgtagttgaatggtatattggaaattatatctattgcaattaaaattgtgtgagcaatttgaaagaaaagaaaaaaagaaacatccctttcatctttcagagtgtatttccttatgtgtcaaactggaatatttctatctgtggccagttccccgggatgctgctagaaacacgtgagacagcgcgttcatttgctctacaaaaagcgaatgaaggcgcagttaccaggccagtcaacccaggctgtttaaggtcaactactgggggacttccacgtcacctcgatatatacgtaacgcgtgtgtgccgtaacccgtgaactatggaatccctaaccgcgaatcacgtggctgctgccccgcggacgccctagacgacgtgagggaaggcggtgccgggcggggcctgtgccaggctggcgggccgccgcagacagagctacccggagcaaccgttcaggggtgaggccggaagtcccatccgacctcgcgggcagccagcgctaggccgattcgaactcgaccttgttttggcgttgctaggagacgcggctcctgcgcgccccctacaggccggcgcccgggcggcgcgcgggcagggggcggggactgtcgcgtggagctgccgggcgagcaccgttagggcagcctggcgcgcggcgcccgccaggcgcccagtcctctgccatcgcccacgcctccctggtgccagggaacaggtatcagcgcgcctccccagcggctgggagagacgctgaatgaagaagagggaaggacggttagtcaggtgagccgcggcggggtgggcggccggggcggccacgccctgccgagggagaagagccggtcgtgtgcggagggacagggtgaagggatcccacttcggggaggatgggcttatcccggcgggcgcgccaggtgggatctctagcgcctcaggggcccgcgcggcaacagccggcaccctcgggcccgcggacaaagggttaacgcgttggcagtgactgcgggccccggatgtgagagccttggcttgacgccctggctgcgctgcaggtgcgccgggccgaacggagccggcagcctggcggcgacctgaccgcccgaggctccccttcacctgcagcggctgctcggctccctctgggaacgccgccttttctaacttaagggcaacaggtggtgccggtggaccgagagagagctcagctccgccgcgctgggagcggcagttaccctcaccaattagggagcgggggcgggagttgcatggcttccctgatgcgggtgaccaatgggatttgggatcatgagtggaccgggaggagtgggcgtggtcggagtctgagtccaaggtttctcgtgcggcaactgccagagctgcttggagagctaagctggaagggtgcttatccctgcgtagaaacgcctgccaatgctttctcatttggacccagactccagatcgggaggtgagaacgttgttattttgcaaggggtaggaggtaatagtgatcttgggtatgctgttaagcatgtggaattagattccgaagataggactatctgctatgagttttctgccagataggcactttgtggttacggccacttagaccagatactggtgactgggttctttccagaatgaggtctttgaggtttggggacccaggagaaaaacgtacatattactgcaatttaagtaaaccagataatttcaatcactgttattccatcgtttgtcttggactgtgtgtgttttcatgtacgtttcatatctcgtctggtttgtttagcgcagcaagttatagtaagttcttcgtgttgtttattttagcaaagtagagcaaa

SEQ ID NO: 48215 - DNA, 1150 bp, Homo sapiens
tcagaaaggaaagatcatgcttttatcagtcatgactgtagtccaaagacttctttttctgctctatcatttgtctttttcttactgattaagaaataacttggcctatgtgatttaccatccctccttgatatgagacctttcttcaagatcagtccagcaggttttattttactttattttttccctgaatgtgccagccgagtttagacaacgtgcacttgccaagtaggccttttagggagtaatcaaatatactagaagctatgatgactaagtaccctcaaattcaacccgagtctgttaaaattgtctcaactgtaacctttataatatgatcctgagtcactgtgggtggtgggggtgggggtggggagagcacaattataggaattccccaaaacagaagaaatctagtgagagaaaaaaaaaagagcaaatgctcctaattttgacaattcaatgaaagtttgaaggatgataaagattcacctttcctttgtatcttcatccatactaagcgcatcacagaaggagagctggtttgtacaatctatctttctaaaagaaagtggcattcatgctaaaaaatgagggggagaagcctctagctgcatgaactagaataatctttacttatttttactactttagattctcaagagtaattttcaaacggaaatctactgagggttttttttttttttggctgggataggccttcctgtctagcaatgaagccatttccacttaataattacagggttgttatggaaattcccttttaaaagtattactttaaaaaattgtgcaatgttaccgcctcccccctcccgccgcaagaccctaaaaaaaacttacatcacaccaagaataaatgatgtgatatttttttctgtaggattgctgccgttagagagaaatgaaagcaatattttagcagcctgttgcttcgcaggataaacattgcccttatcattctttgtggattgatttttgcctgcttgatgacagaattcttcacatgacagctaaattgttttgattattgaaaatatcacaagacaaaatatggtacaatcataatttcttcccttttctctctttaatccaaattatacatcaaaaccgagaacatggccaggcgtgg

SEQ ID NO: 48216 - DNA, 1970 bp, Homo sapiens
ctgaatgtaggaaagataagagtgaaatttgtctaaggctgatctcctgcaagctgatcccttagaaagaactgcttcttgcaaagtaccatggaaagcagttatgactttatgtttctggtactaacaagctactgaacttggaacccagcttccccatcatgccaaggcaggggctagtgcattcttgaccagaatcttggtgtgatgaatcctactatgaccttcctatgccttgtagctgtaattttaaggcttggatgcctgattatataaaggcctagtattccgccccacagagctggacacaagattctgccatgtcacacaagtcttaaaaacccctcagcaccacacatctgggggacatctggcttccagagtcagttgtctgatcctgtgagatggctgtgcattgccccagaatgtgatggggcgacggtgacagggttacctgctactgatcctgaatccataagctttctctggtgaacactgctccagaagtcagatatatgccctgtttggctgattcccttctttgcacaacgatattcaggttgctttacctctttgttgtgtaagatgttgctgagataaattcaaatggtgaatagtttcttgaaaatgaagcagtttgttaagttctttctccaagtggttaagtgtcattgaactcaacctatatgatacagaatgtactgggtttgtcttatggtaataacagatctgcttttaatcttgagggggaaatatgacctattccttaataatgataatgaaagatatatgtagtaagggaaaatctaaaaggtattatgagagtcacacggggaaaagaaattacttttattagcagtttctaatgaggctttttgatggctttaaggatgaatacaatttatgttcttaaagaccaactaaatgtcgttctacctgggagtgggaaagcagagggaaataaagtagaaaatgagctaggctggagtggatgcttatgggacacatagtagaaaattgattttgtaagacaagtagcatcaagaccatagattgccttggatgaccagctaaataatttaaatttcattagaattagtctccaggatgattaatctggcagtgatgtgtaaaagactttggcttcggaagatttgttccaaggctgacgcaatccaggtgaaaggtagcaatctgtcagacctcttggtttgaacagaggaaagcactaacagggatctaaaactacatctaaatctagaaaactacatggagggatatgagaagcattgtttgacgtagtgaaggaaatatatgaataggttttaacagggcagcataatagtggcccttttcagagttaattctacaaggagtatgaatacactgcatactaacagtgtgtcttggtaagctgtcctgactttgtgcttatacaacttgaatttatggtattgaaaatttacataaataaatgggtcaacaaacttggttggaccccccgtcccagccccagtgcacaggcactcattacagaatgacatctggctttgcaattttactgattattatgagtctagttgcttccaaaaagaatttgatatacttatgattaaagacaagcacatgattaaaatcaaggtaaaggctcaaacaaagtcactgtgattcagaacaaagtttctctctgtgttttcaggtatccaagacaaacattgttatgataaattacagacttgttaacaaattgtttgatacatttttttttttctggtccttggtgctatgagaaatatactgcccattaaaaaggcatatttgaacaaaaatggacagtactgtcaatctaagtttctctaaaatgtaaaatggattttcatgtagttacttcgtatgataatcctttatgaaaatcagggaagaaaagtgaattataattctgcaaagccacttctgtgagaaattagagt

SEQ ID NO: 48217 - DNA, 828 bp, Homo sapiens
aaatctttctctctgcctatatcatgtactagactagttggttaagcatatacaaacataaaatacccctctcttttaaaagtgagcatccagccacacttttataactgttacacacgttaataaccatttgttaataaacactaagtggtttttgacaaaaaagctatttttaaccactttaaatattttgaaatgaactacttctccaatggaggaatgtagaagtttaagtgaacttagaaaggaatgtggcattttaaacaggtacattccttctttcgtgatttaggtggcctttagatagaatgtaggtcacagtaagaaaaaacactgcctttttacttaaacaataattaagttctagccttcctcgtaacttgaccttgcacaagtcacttaatgcagagtctgctgtgttcacctttaagatgggacagtgacatctgtttttctcactttacaggatgagtgcaaggataagtgaattattgtaggcgaaagtgcttggcaagtagttaagccctataaaaatttcaaggcagacatgatgttagctatgtcaacaatagcttgtttggatttcttcagctggattttttgctttgccagcttgttttggctcaggcaataattaacctagaccttaacgagagagttggacttggaataaagaccacaaaacagataagcagatatgtattccaagtcttcagtggtcagaaatagctgccacctgggtagttccaggacatttattaccctatcttggacttggctggaaataggttaccttagattcccatccacccactgtctttgtggggg

SEQ ID NO: 48218 - DNA, 1897 bp, Homo sapiens
ttttaaatgatacatgatatgaaagaaaaaatattttactaaaatttctggttacaaatttgatgtaaaaatcaacagcttaataataatatgttatatacttgcaaattgctaaaagggtagattgctaagtactctcaccacaaaataataagtatgtgaggtaatggatatgttaattagcttgatttagtcattccacagtgtataccaaaaactgtatacaatttctgtcaactaaaaaataagtttaaaaaatcaatagcattcgtatacacgaacaaaaaaatgcattagaaaatataaaaaggtatcttatttcaaatagtaaaagataaaatatattggaacaaatttaagaagacatctaagggatctaaataaaaaacattttgactctagttatggacttttataaaggaaagctcaactaagtagaaatacattgttcttgatttaaaaagcgtcctgaaaatgtgtcagaaatctctaaattaattcattaaattaaaagtgctcccaaacaacaacaaaaaactagcattaaaagaaataatttgacaatttggtttcagagttcatttggagacgttataatgcttaaaataattttccatatctctttcaaggatagaaaaatagaacagaatagtataaaatagctataatttcgtatgagaattcagcataaaatttgatttcaagtatttatgtatgtagtattgaggcaaatgttagttctttggggaaaaatattgcatttcttctgaactctttttaaatttaaaaataaaattgaattcataatgaaccaggggataataaacattggtgaatagattttactgaacagtgcatcacagaaaccttttgagatctggcacgcaaacatctgtattactttaataacacatatttttttatttaggaccatattataacttatgtaaatataacctgtggctaggcattcagttacttccatattagaagcaatgctaaaatgaacatcttttcacaaatgaataagtgatatttgtgggagaaattaaattgcaaaagagtatgatgtactcacatttttagaaaatgatatagtcacatttgtcttctgtaatattaaatttcaacttcaaatgttaagaaaaaattttaattgtgtttgtgccttggatagaaagtgggtttgtgaaatgaaagtgacataccattttattgtacattaaccagtgcatgttatttattaatgaacttgttagatagttaaagggaggatgtctacaatggaagtgaggagagccaactgcagagcgttgtggatctgtggtcttatttttacagaaagataatttgaactcaaagggattggaacaaaacgagaagagttataaataaaaaagaaaaagggaataaaataacgctcttgggaagacatcaaagatatctggatttgtttctaattatttttctcaattagctaaaattagattcagttccaggaaatatgtcattaatatttcatgacaacattatttaaattaataaaaaaaatatatcttgtcaaaattttaatttttaaaaccacattatttcttcccttcctgttagaatctcacaactcttttagtgtacaacatggtggctcacagtctctaaaaagtgtctggtaaatatatacgatggagaaaaatacaacaggaaagcccaaccaaaattaaacaaggaacaagtgtttgatttgtagtgcatatttcatatattctttaaaacaaattactaaaaatgttatgagattagcaattctgtcatcagcgaagaaggagtctgggtttttatttatgtaaaatccatctcttagataatatggttttatttaaagtttacatcaaaaacaatt

SEQ ID NO: 48219 - DNA, 555 bp, Homo sapiens
acaatcaaagcaggatatggaaagacttgaagcatccccacaaagtgcacaggcccatcaacacaaggcagagcccgcactgccacaggcttaagaacagcttctgatcaaacacaaatcaaacaataacatgctctaacctgggagctgctcctaggaggataaatataaaatagaatcacactagttccagacagtctgtatgactgtatatgcccaaagctacttccttcttgacaaagtttggaaagataactttcaagatacttggctgtggcaaaaacacagggcaacaaatataaactccctgaactctgatagcagcctccaggccaccagcccttgatgagtaagtggcttatgcaaacccaaggatgatccctagggaatgaggccaagagctaaaacaagggaaagaaatctgtgcagggacatcagaggctgcacacttggagggaattagaatttgcagaattggtttaattaagtaattaatcaaataagcaaaggacccagcaaacaagaagaacaaccccccccaacagtattcagtat

SEQ ID NO: 48220 - DNA, 895 bp, Homo sapiens
aagccagtcaccctgttgcacgccctccaagggggacaagggaacctttcctgtttcactaacattcttcacaaacagattttgaaaaacatccattcagctaaaatgcatatatccttatgctaagaaggtggcaagatattttgaaataaaaatttaaaaaacaatgattatattttaatcattgtgttactttaaagcaccgattaacaaagctttgccaggttgaatcactcatctttgactgaatttccattttcaagctgtttctcactgaactttgtaacttcacatgactcacagacttcaaaagccgccttcataattgcttttctctccaatacattatatatgtacattacatataaaatgtcaagaaacagatattaaaggacaagatttgaagatctgaagtgaagaaaatgaatcagttagtgatattgcacagattatctagtttgatttacatagatttttttcaatgtgatttttgtgattgctttcaatgagatccatacctgccagtcctgggtgacctttctctctttttctttgtgtgggagcctcagcttctctagcacacaaaggttgtgtgaggcccacagagtgtggaatgctttggataatgggagagcagtctaatcaattcgctactgataggatgaaagggagactagagaggctgcttttgaagttgtctcctttgtggatctgagtcatccacagctgtaggattccagtctgtttgttttaagtcttaaaggaggagcaggaacaccaagttttacataccatgtttatgttcttctgccagtttgagtcctatagagcaaagacaaatctcggcgtggcatttttagctctaagccaaatgttcagacgcccacatgcctta

SEQ ID NO: 48221 - DNA, 478 bp, Homo sapiens
aaacattgctctgaagttcatcaaagtaatgacttgcccagaaaaattactgctaattaaattgcctgctgctttcatttctaccttatctaataaaaaatccaaccaatgaagtttggcattacattttaacttttgttaaatgcttgactatgatccaaactagctaagcggcgacttcaaaggcaaatgttttgtggcagaggaaggaggcattgcatatgcattcagttctgtttcttcacgaataaaatgtacaaagttcaacaaccgtaacaagctgtagtttaactcatgcaaaaatattaagatgacagcatattcacactgtcctattatgcatccacagattatagtttaaggatcattagtacaagtacagcacaatggttataaacaggcaccttgtcatctgatagaactgattttgaatctcagttctgacattgcatgggagtatgacattttgttgttattt

SEQ ID NO: 48222 - DNA, 1565 bp, Homo sapiens
aaaagaaacaaaaacaccccatataaacaaaaagtgtcagcatttgtctcaacttcattcttttcaatgtggcagacaaacccagccaaaaactttgagtgcagcagctgctgctgccctccatctcctcttccactcatgttgggcactttaatcagaaaaaggggtcttaaaaacaaaactatgccttatccaaatcactgaaaggtaagctcattttgaagactgggcttctagaagcagagtcgccctacagtggcaacaaagcagataagtatctgcaatcccaacccccgtgccccctcccttctcattttctccctctccccacccccgacggagtcaagtttataaacagcaactttcaaactgatcactcacattggtgaccatgtaaggcacttgctggtcataaaatccatccatgctgctgctcttcgcaaatctcagctcagtattttatattttgagcatttagctggagatttcctcaggatctggacttctatcaacctagaggggaacaagatggcttttaggcttaaaaaaaaatcatgaatgaagctcttgaatttgcatagctaattaccctccgacagtcccattcacaaaaataaccctccctacaccgcctccttcacctggatccaaagagagccaacagagttcacaatttacatattttcggtagtagcaaaaatccgaacaagaggcgatgtatttatttacactctcgatgtttccctgcgcggtcggtgtaccccgggcagctctgattcgcaaacgtgtgcaaaactagcaatggcgatcaacgagacttgctttgcacctaacgggactaaagagacggagacacctctttcatcaggatagtttttgcgacccacaaccatgcaattatctggagagacataaaaagttgttggaaagacccacctgaaggccacgctaggcgaaaggctgcaaaaacttccctccaaatttaataaaaacattaattatagcccagcacttcccccttggaagccgaaagcgcctctgacagagctcaattcggtggtttttcctctacttctcctccaggggcctccaatccaaactgatggatcgctgcctcccattggctccgcgtctctttcacaagatcagatttcgggctgtcaatcaggcggcttgctgccccttcccgcgggtctccctcgcccctctgccctagggggtgctcggccggtaggcgctgggtcctcagcctggaagcgccacggagagactcgatttcctctgtaacccgctgcttattgttaaggcgcctggggatactgaaaccgtgtgtttcgagtcgccagttcccattattggggtgttaggtccactattgggctggtttccttaaagtactgttgtgcggttctggtatacccttagagccgcgatccacaaagcccgtaccgccttattcagctgccctcccctcaggatctccaacctctctactcttgccctgactaggagctcacctcgctctctatcctcattcccactcagcttttggcccaatttatttt

SEQ ID NO: 48223 - DNA, 626 bp, Homo sapiens
gatcctcctatgggactcagaacagtaaagcgtcactttaaggagccagtgtccaacagcggacgggaggccgcggggataggaccagggactcaatgctgttgaaattcatttgtgaccagaactagtgaccaaaagacgtttccggcagctgttccgcccgttaggaaacgtgctgcagttctcaatttctatttgaaagtttccttccttaaatagaacgttatggagacacattaaaatggagtgtaagagcgcacagcactcaaccccggacctgggcaggagaaagatctacttaaaaaagaagcaaacaaacaaacaatcaacacttattactgggaaaacaaccaataactatggacagcaaagacagaccccgcgcattcccggaaactactaaatcggagttcacaacgcgcgcacctataagcattttgagcgggaactgcattttaaccccggccaaggagagattccaggaagcgcctgggccccgaggctgaacagtgaagctcatgggtactatctgagggtgcaaccaagcagggggtcaataacaagggtcctccaccaccctgcactcctggaataacccagcgcctgtaatctgagcaacagtttcc

SEQ ID NO: 48224 - DNA, 569 bp, Homo sapiens
atggctttcctactcaggtgactattctgcaccaaacaggctaaatcagtgacggctatgtccctgtactggattgtcacacagttcacattgcttgccagtttgctgagctgaaggaaaagattgattgccagtctggtaaaaagctggaagatggccctaaatacttgaagtctggtgatgctaccattgtcgatatggttcctggcaagctcctgtgttgagagcttttctgactatcctctgagtcattttgctatttgttctatgagacagatagtcgctgtgggtgtcatcaaagcagtggacaggaaggctgctgatggtggaaaggtcaccagagttggtgaggaagaaataaaaggcatccaaactgggaagaaggtagtcaaattgtccctatttgtagatgttataatattttacataaagaaaactctaaagactccaccaaaaactagtcaaactgaaaaacaaattcactaaaattgcaggatacaaaatcaacatacacaaatcagtagcatgtccataggataatagtgaactcgctgaaaaagaatttttaa

SEQ ID NO: 48225 - DNA, 2320 bp, Homo sapiens
cttaagggaagatttgcctgaggaattcatgtgtaagcaacaactggaagcatgtgagactcatatccaggtgaacaaggaggtgatggtggtttcaggaggagaaacagcaagtgcaaaagtacagcaaaaggtgagatgaaatctagtgcttaaatctacctagaaaccgttcagtatggttgcagcacagaatttcagggcatgtgggagaaaaggcatattaggcttaataaggcaagcaatacctgggcatatgaccttataaatcatgttaaagagtttgaacttacataagggactgtgggtccccactgagatattttttacagtaaacaacataatcagatttttgatgttgagaaatcacatgaacctgctgaaatgtagtttctatacccataaaataggaatagtgtcgtatatcctggttgcctcattggattgctgcaaagatcaaatcaaataatatatgctaaaattcagcaaattctaatatgcaagtaatattataatgcataaagtttatttattgttgcaactattttttgtagaaagtgtgtgagccaatctctgataggctaatagattgtactacatgacaatgagtagtaaagcacaactcatatcagttattagcaaacattctattaagaaatgtgaagaaaacctaagtattagggtaaaaatgtatgagatggaatttataaatgttggcaataacttttaattaatcttttattatactgtttctcttactgggagttgaagaggttgatcatgttttcttgctgcccaacactttttaagcaacttctatgtttcaggaataggaaccctgcctttagagggctacagaagctctctccctctgcctcctttgaggtcaacatgtgatccatcagtatgtgatccatcaacatatgatccgatagcacctgatccctcagactgtaatctatcagagtgtgagtcatcgtgtgtgggatctttcaaagtgtaatctgccaacatatgacctaagctttgccagtcgggtgcattggtgtgagatgtttggaatgcagtggcttgaagagggagataacaggcagaaacagttctggccaggatggcatggagacattctgttctctgagggcatggagtccgaagtcctaggggtagcatcctgtgcccagcttctctgtggtgaggtgttggactcatgcacagaagcagagacattaaggttacctgtgggaatgccaggcaatgtacttggtgagtggttcctggctgtatggcttttaagcctaattatctgtcctttggagagattttgggggtaactaatatcagtaaacatgttccttttctcctcccacaaatgagagtggattctgtggtttacaagtaaaaatcctgactgataaatgtgtcaaaataaaactgttttttcatcttaaggtggcaacctttttttactcctttattgtacttgggaaccagggcacacaaaccatgaggatgagtatataaatgtggaacaaaagaggggaaggaaatggattccaatactctatcttcaaagtgaactaaaaaaatgtaaaatgaataatccccaaaattatatatgacttgtcagcacaatttctcatttgaaccttgaaccagcatctacagaactttgtagatgaacttctatagaagtttgtttgtaaagctctactctatgatattctcagtaaagttttacagtgattaaatatgcaagcttttatatgagttctgggtccagattgttgctccttaagttattaattgtgtgactttgaaaaaagtatttaatctgtataagcacctgtctctccagtaaaataaaacaaaatatccagtgagagagtatattcaacacatttagtgctatgcttggcccaagacagacctttaatagttgctagtactgctaacaattaaaataaaacatttacttgagcttgaaaaaatatttcagggatggaacaggaatagtggggactagtattcgggtttttaaactgctggtggaagtgcagtattagaaggccttaaaaacttgaagaaaacaaagaccagtctaggataaagaagtatattctacttaatcttcatgtttgaagtaggaggcaggaaggattaatgggggttcaacttctacttcaaacagtttccctcccttttgctgggttgcaagggattgtaaacagcctcaatttctccctctttatacatcttcttccctctttcttctgtgttatgcattgatatttctttatgtttgtgtgtacacatatactag

SEQ ID NO: 48226 - DNA, 2104 bp, Homo sapiens
tccatctttctcactttttatcttttctttctttgtccattgaagtctagatggtgtccctctattgcgtctgaatccatggtcctgtccatacttttgtaataataaatacctttgtaaataaacccttctgaggacatcctaacttgtttgtttcctagtaggttcattactaatatgcaaatattagctttcatttggctttaaaataaaataagctttatttggaagggtagattcatatgaaaacaagacacatgtcccagatgaaacttcgtgttcataacacttaagccttcaaagtgttcagattatgtaaaatttgagagaaaagaataatcagtttcaatacgaggtattccagtattcatgtgttcaaaatagagaagaggaaaagaaatggagaaggaatttgaaatattttccaaacagatcatacacttgacctctagcttaacttagctatgatacttgaagtcatatttacaaggtcatagttttaaaaggagatacatcttgatcaagattactctatttgtctctacactgaaaccatcttgcaaaagcattcaatagttaaataaaaatatctttctaatgaaaaactagtgaaaaccacaatgatatttgcttaacctcataggtgaatttgttggtggtctaagatgtctgccaacaaaagctctttttgtgctttgaattgaccaaaggccaaatgctaatggaaatgaatacctgatctgctttgaaagtgaatcctgcctacaatgaataagagatggcttgaaggaagataaggggaagctgatcatacttttgtccatttatggactttctaaactaaaatattacattatatcctttgagaaagaagctgaaccaccattcccgggacagagtttttttttatagctttattgaaatgtaatccacatatcattcacccatttaaagtgtgaaattcagttttttttagtatattcaaagttatgtgcaaccatcatcacagtaaattttagaacattttcatcacttcaggaagaaaccctgtatcttttagatattgctgctgtattctccaatcccccacctctcaccctcagtccactattctcccagcaactaatgatctactttctgcctctgtagattttcctattctgaatatttcatacaaatggaatcatagaatatgtagtattttgtgatttccttctttcacttagcatgtttttaaggttactccatgttctagtttgcatcagtactcaattcatttttataagtgaataacatttatttgtatgaatataccatattttctttatccattcatcccctgattggcattttgattgttttgacctttggctattatgaataatgttgctttaaacattaatgtacaggctttctgtagacataagctttcagttttcatggactctgacctaagattggaattgctgagtcaatgttctaaatctatgtttagccatttgataaacttgaaagaatgttctctaaattggcagcactattttacaatgtgaccaacagggtataagggttatgatttctccacattcttggcaacacttagtgttatctgacatttttattctaatgggtgggcagtggtatttctttagggttttgatttgcattttcctaatgactaaggatgttgagcacctttgcatgtgctgattagtatctcttctatacgtatatataccatttctatgtgttctttggataaatgtctattaaggacatctgccatgctgtaattgggctatttattttttgttattgagttgtatcattacatattatagaaataagtctctatgagatatatgattccaattattttctctcacttgtgttgtcttttcactttcttgatagagtcctttgaaatgcaagttttaaattttgatgaagtccaatttacatattttttcttttgttgttcatgctgttggcatcatatatgagaatccattgctgaatcaagtttatgaagatttacccttgttttcgtctaaaagttttatagttttagatcttacacttacatccttgattattttttagt

SEQ ID NO: 48227 - DNA, 2288 bp, Homo sapiens
gaacataaagttattataataacactaaagaagaaaaaaaacttgaaacaacatatacattgagaaaagaacaatttttctgttcaacgagaatcaaattttttacagctgatcgatgtaatatagttctgtaattttcgtgaaataattttagaactgctgggaaatctcagctgaaggaaacaaagaaaagttcataaaattttctaaaaatcaaagtcgtgaaattttttccccctatgaattatatattagaaacaagtaattcaattccaactttctctttcctgtgatagtgaaaaagcttataaaccaacaacttaacacatgaaagccattttaattctcacaccagcacacatctcacaagaattgaaaataaatagaaaaatatgtggtgaaaacagtcgtgtagacccctaaacattttcagaatttaacattaagcacttttttttttctcgtggtgacttttctttttccctttcctaagttgtaatgtgatgtttatcctccacttaatttcttggcaatgtggtagtggatcaataaatcaatctggcatattaaccctagcaatcattttggaatgtggataaacttctttctgttattgcttaaatttgtgctcttcctgtaaatgaggttcattttataaaccacaggtaaagttccatagtccagcgttacacttgcctagcacatttctacatgaatcatttgtgatatgctactactttgtttaaaatatatacacccacaaatgtaagtatttatatgcatatatattatttatgtataaatgtgaaggtgaaattgactccactgaaacaagcaacatgggctataaatggtatgctcaatgtattcatgtttcattcttcccttcctccattcctccctttctccctctttccttccttctattacttttgacttccttctggtttgtgtattgtcctttattccttcaagagacaggctgtgaaagcgctaatatatgaggaatttattctttaatgtagtgtgttcaatccactaacgtccttgcctaggccaccaaataggcattaatgtgagagcacagtcttgagtaagtatagataatatatattttattataatattttacagttactcaaggtaattttaaaaatgccatttgaattttcattcatatataattcatgcttttattttgaatatgaatcagaaacaggcctgagagcaacaaaatagtttatgtagtagaatcaataatatgattacctaagatatgcaacaagatgctaaaatgcattgttatcttggcaccgaaaaatagatcatcttttttaatttgcctgtttaagataacataaaaaacaagacgtttgttttttatttttcttgataatctttgcagtgtttaaggaatgttaatcattcattcattcaatattaatgtaaacacaaaaagtaatcaataatcttgtccctagtagaggtgataattattaaaggccatttatattactacatatgtcactaaaacttcacaatattatttttgtattaacacattttgaatatgtctattagattggtgtttcctatatatacacccatatgacaaatatctctcgggttggtgaaaggaaaatttctctgaaactcataacccttttatcagaaataagaattaatgaaaactgtttgatatggtttggctctgtgtccccacccaaatttcatgttgaattgtaattcccatgtattgagggagggacctggtggaaggtgattggatcacggggaggatttcccccatgctttctcatgatagtgagttttcataagatctgacggtttaatagtgcttggcagtttcccccttcattctctctctttcttgctctgacatgtgaagactgtgccttgcttcttcttctgccctaactataagtttcctgaggcctccccagccatgtggaatggtgagttaattaactttcttttctttataaattatccagtctcgggtagttctttatagccgtgcaaaaacagactaatacttttgatttttttacttagtttccaggaatttccaggctacattttgggcttaacaagaataacttttcttagagtacattttctgatttaataaaaataaaacagcaatgatcgtagcaaatcattctgaaaatggtacaggacagagggttaaagttgttgtcttctgtagagagaagagaggtggacgtgaagttgaatctaggcagggtagttacaggcaatcctct

SEQ ID NO: 48228 - DNA, 849 bp, Homo sapiens
cttctttcaggttttttattcttcttacccagatcaagtctgctgttgaaattttacccagatcaagtctgctgttgaacccttgtggctcattgagtttctttaagatgaatatttaaaattcttttgtcaggcagcttgtagttaccaatttccttagggttggttactggtgctttactttgatactttgatactatcatgttttcctgattattcgtgattttatggctttgcttgatgtctgcttatttaaagaaatggcagctctttcagtcctcatagactactcaggaagggaaaactcttcacaagtcagcctatccagagattctggatgaggttcaggggcaggctggatgttagaatactccaacaggctggcttggtgcctgggtcagtgggtaaacattgctggcacctgggcccacagggctcaaccaggcgccaggctccacagaaacaggccttgtccctaggccttgtctcaaggcctgaagccttggaccgtggggcaggtatgcctctggaatgggcttagaacttaggtccatggggtttaactggagcttgggtacacaggagcaagtctggggccagagtccactggcattggcatggttctgtggttgacagaaagtggagtactcgtttcactcttctttcccatgtggaggatatctctctccatgttgtgctatatgggcttggacaaactagtgttgcgtgtaaggggaaaatgttctttctgccctctttaatgtatgtttgttctcttatttctgtgttccactcaggtgctataatctgtcatccagattccttagctcttgtgaagatatctttgca

SEQ ID NO: 48229 - DNA, 689 bp, Homo sapiens
ttagaaactttacttggatgtgtatgactgtatttcccgccgtagttagtttttaagaaagaatgtttcacctaaagccatattcacctttccagagtaaaaaatcaatatttagccttaaattaataaactatgtttttgttattattggtccttttgatactgtatctctttccatttcattaaaattaaataacttacctgccatatttattatctgaatactaatttattttcccatttaatttttttctttactctttggtgtttctttgctcagaccaaacctagtcttgatctagttgcactgtgctttctttgaagttcaaatgcatctaatgaatcatggcagtactctctatcaccttacaggcatcaaagtaaatcagccagaacagggatagaaattccaaaggtccctgccacctgtgctgcaacattcactccaagtaaacacttagtcatctctttagttgtgaacagtgatgtggcccaggagcctttcaccgaaggtggcccagcacttgctgctgagttttcatgcactttgcttgcatttatcgccaccatgaaaattacccaaggattgaaaagtctatcaagtatagaggagagaaagctaacaggttcacagatgcagataatttagtgttttaatgaaaccctggattagataatgcacttctctc

SEQ ID NO: 48230 - DNA, 718 bp, Homo sapiens
taagtataacattgaagaattagcagaataaatatgaaatcaaaacttagaagcattttgagatacttttggtattctgttgcaaagtatctcaaagtgaaaacaatagtgaaatcatcactaaaaagaaaagactaatatataacaggtttttaaaaaatattcagctcaaaaggtcattcttggttctgagattatatttatcctgaaataatactaaatcaaaactataagctagtcagttaagtcagggaacagaattgagcctaacatacttctgtttttgctcatagaatgacctttgaaacctctctgagctctgctgttttttaactatttcccatctgtgtacagagaaaaatgtattactaagtcacaaggcctatatattcccacttcctcatttcccagaatttatgggaaattggttctaatagttccacagtagaaagcaagaagacagaaaggaaagagagcgcttttccaacagttacaggcactgacagcctatgacaatatttgagtctggtttgtttgtagtttcttccaaatgtgtgttcctgaaaaaaaatcatacgaaggagggtgagtgagcccaggtaaatgacatgtatgcagcagctccagagcgagtgtacagacatgtgtttgggtggagcacagtgctgtatctaagagatgttcaacaacccagtgggtgaatgtagttggcagctga

SEQ ID NO: 48231 - DNA, 783 bp, Homo sapiens
aaatgttatgacatttaagataatgaaacccttcatttattctactatctggtatgagttttatttcacatataaggagtcagaacagatgtccaaatattgtaatgccaaaagaaagttagggcatatcttgattaataccctcagagctgcctgtagtgtctctttaaaactggcatggtttacttcaaaacaactattcaaaatccattctaggaagcctagctagacaaagattcccaagacaaaacgaaaacaataaagcttagtataacccttttagcaatgtgagttgcgtattattgacagaacattcattgcaatcagtaaatgattaattgcaaatttgttgctaaattgaccacacaaaaaaaagagacaagcttcaggctactgttaaagaggaaaaacttatgttaaaaattattggaggcttcttgtagtgaattaattctaatcaatatactttttgactacacagtggaataatgacttccttaaatatcagaggtacccattattgtagacattcaaattaataattaacatactgacttgcatttttaaaaaatttacggaagtagctttttcttttgccttacctttaacaaataaatagttcatgtttcatcaaacatgtgcataagatttgtttttgaatttcaaatgtagattgtagaagtaatgcccatatggtcaaacttataataattgcctgaagcaatttgttcttgggtttttatgaagataaacctcagtggcatattaaaaatataaaagttt

SEQ ID NO: 48232 - DNA, 1042 bp, Homo sapiens
tcaattatagaaactgttctttccaaagactgagcaaagaaaactatgaaatcgaggaggagaaagaggggagctgatatttagagcacccatcttcaaaacacatttcaaaatgaaacatgcacatcctattgactattttttcagattattcttcagaactcttaatttacatataattcattaatagatacctatttatgaatgtgtatatgtatatgtgattatgtttgtgtatgtttgggacagggatctgagggaagttggtaacttgaaaaaatcacccccttcaaagaactcagtataatagactgatacatacaaattttatgttcataaaattaatctataatatttcctgttatgcctattttatctccctataaaaacgagagccagttctagaaatatatcattgtatagttagcgtattgctgctttccagaatacaaatatagcactataggtaatgaaagtatattgataataatatttagaattaaagcctaggtctccttttcaccatccttgaaaaagatcttgaattaaaaaacaaagaggttataatggaatttgttcttgtcttttgctcctttaaatatccattgatctcatgccaaagtattttctaaccaggttaaagtccaattctgtactcacgttaggctaagattcaattgagttaaaattttacactgactgccagtcaaccttatcatgaactttcattatgtgcatgtaattaattgggtccaacgaacaatatcagttctgagttatagactcttttcccccgaccatataattagaatataattacccacaggatatcagaatgatgcagaacctttcctctaaatgcgccctcattaggaaacaagtctcaatgtacacttattcaatcagtgtgaattaattaaaatgttactgaaataaaagagggtagcgataaagagtatctgacatctattaagagtctatcactagagatctgcatgcacagtttatatttaaatccttttagccgaaatagaaactttgc

SEQ ID NO: 48233 - DNA, 1495 bp, Homo sapiens
cactcattgactttatttttacccattgactttaatacacttccatttaactatcatttattgagcatatacctgttgaaacacacacacacacacacacacacacacacacactgatgtaggtgcaagggtacaaaagagagcaaaataaatccaattaggagatggcaagaagattcatgatgcagggtaagcctcaaatgtggactagactcaatcaaatatacactgtggggaggcagggggttgaaacccagcaattgcacattgtaatcaaagggatcaaagtggaaaagttcagggtttgtctgatgatagaaaagttaacccttgtgactaggacatggtttgtgcatatgtgtgcaggtcacagccaaagcaagcctggcagagtaggttggggtcaaactgtggagtcagatcggtgtatgcacgccaagttaagggtttcaattttacgcattatgaaatcaggaactatcaaaggggatttttcactctgaatcagaagagaaacagaaaaaaaataagtatgttagttgataaggttttaagtaagatgaaaggaagttgcaagaacatacacttaatgagtaagatgatgattaaataggtaggtgtttggaaaaaaaaacattatctggattaatttttaactagaaaactagacaagagaaacactgagcactgaaggccagctgaggttttgagtagagctataacccaaagaattatatttttatttcactaagtctctgccactcagtatagtataggagcaaataagttgaatgtctgaaattaagtgtgaaaaactaattgacatcatggattatgagatcagtttaaatttgaaaggatgggcaaccaaaagtcagcaagcaaattcaagagggagtaaagtgggcaagagtaaaacagttttaatttacttttatttcacctaacatgcatttatgggaagtaataagtgtgaaggaatgtatgtgaacaaatactagtttaatctaatcctcatagttatcccatgggacagagactatttaatgatctcaattttacagttgagaaaactgagtcctgaggaagttttaaaaatgaactcagatcactgagacagtgaattctcaacctagggtttgcattcaatcattataaatcaagagtcaaggtttttaattattgtactatgcaataattaaattaaaagtaggaaagtgagaagttaagtgaacataggctgggatcaaagtaaaattgacagtttagttttggaataatagcagttctcgacagttacaaggcttggagtattgtaacagaagtgaatggctgaaagaaaatggaggcaaagccacaggatttgagggtaaaagagaggttgttgactttccctaaagtactatggagcacttgaagttagaagggcaaatcagccctgagaccatgtccttgttcattcacagaggctgttggtaattggtaccaacaagga

SEQ ID NO: 48234 - DNA, 1223 bp, Homo sapiens
aactaccctctgctatactttggatatttgagcctctaaaccttatgttgaaatttgatatccaatgttggaggtggggcctaaagggaagtgttgggtcataggggtggatccctcatgaatggcttggtgccttccttgtggtaatgagtgagtcctctctcagtcccccaggccccacggcccctgtgctgcttgtgaaaagatgtctgcaacctcgcttccctctcccttgcttcctctctcaccatgtgatctctgaacatgctactggctccctttcacctttcaccaggcatggaagaaggctgaagccctcaccagaagcagatacgggcaccatgcttcttgtacagcctgtagaaacatgagccaaataaacttctttaaaaaaaaaatgacccagtctcaggtattcctttttagcaacaccaacagactaatagaccttgttacctcatcagcttactcatcagctctctttatgcagtatacttgaccaatgccagaattaaagcaagtacccaaattaaagcaaaaacaatgagaatgtaagaaaacaaagaaatacaacacatgaccagcagacttgatcatccacagataattatgtcatcattgcagagactatcagctgactaccaaaatcctttctgctttcttttacagtagatgggcatgttatttttaaactctattacatttttcaccctcccttgcagggatctgtgaccatgtgctgaatttcttataaagaagcactgtaactgtcctagaaaacgtcccacatatacttatactttcctttttcatgggggcatgttgaagatgacagagattcagtcagcttgggtctttgaatgactctatggagtagagacaacctccttctcatccttgtgcacacacatttttctggattgattgctctgtgaacttcaaactttgacttacatcagaatcacccaggaaggtttgtttaaacacagattgttggccttcagtatcagtttctgactcaacagatagagggtggagctgaagaatttttatttctaacagctcccaggttatggctacagggatcctactttggggagcactgccttagactatggcatagaatgaaacaaatgtctatttttctgagccattacattttgagtctattgttaaagagctttagtcttccctatttcattcggaaatgattatggaaactt

SEQ ID NO: 48235 - DNA, 1061 bp, Homo sapiens
ttattattctttcagttacacacaatgtttaagaagaaagtcaactataacaaatgatttagttaaatcttggagagcacactggataaaaattttctcttgcttcccccttcccccagggtttccctcctgccatctcaaagcaggatgagctagttgacattgagtagttaaaatcaaacttaatattaagaatatatagttatatttgaaatatataaataaaagtgttactagaagtgattatccagtaacttgtggtagcacctatcttaggtacttattcatcatctcaccatggattttctccttattttccttttaccatcctgctattctccaccagagggcaggcaggggcaaggacaaggcaaccttgtcaggcaatctggttaaaaaaaaaaaaaaaaaagtttgataggacaggaagtgaaaaatattgcctaaaataaggtttgaagattatctgccaattttgtatatttttccatatccccatctctccttgatatggaaaaatgaggattggcacttattgtgagcaatttgagtaaagtattttccgtgcatctgggttcactggtgaaacatgaatgatcaaagttcaacatgttgcatcaatttcttttcacctggcaaaatgagtttttgtgccagtttttaaaccttgtgttttctgtagttacttcctgtgagtcgaatggttatattaaatatgagtaacaatttataattttactctgacagaaattacttcaaaattacattcctatatatatatttatatgatttggctgtatatctgatctagaatttgtaaagaagatctggattttactgtagacatgcaactaatttactagggtactatagttatataagcaactcggtttctactgtgtcattataaatgaagactagaattctagagaaatcatacggaagattctgtgaactgtacttgtttttcctccagaaaggcactaagaatgtgtaatgaatcattagtaaaatggcactatgggtacatgaacgaacctaaaagaacaaatcttttttta

SEQ ID NO: 48236 - DNA, 1838 bp, Homo sapiens
tgtatttaggaaaatacaatgatcacttttctacatttctgtagtctatgcttacttgaaaggtagcttttgttaatagtcttccgttactacaaatccattacattcatttcatgcctttgtattataattgatgctcattttggcccacattccttttttttcccccacattacgtaacttagttaccaccgaaaatcttaaggaaatgaaatcccaaggggatagactagagaaaaacagtataccctggacattgacttgaaaactttcatgaagaacctaagctagatctaatttgtgcaggtggcactctctgctgtaagagtcgaccaaaatatattgatttttttacaggtttttttcagcagctttattaaaaaacgccaacatgaaaatattagttacaaaattgtagtgcccataatgttttacagagtatggcattcaggggaattaaaaaccataaaaatgtttccaaatttatattggatactctcagatgccctgtaacttgaaatatatcatcaaagtaatctgtgttcaaatgtatctgcagtaactttattacatatcctattataagaccttattgaatattcaaactgttttttgtgtgtttattagttaaaagaagcattgccttttcaattttagtttgtagaacatgctagtgcaatacatattatacatatttttatttccaacatgtactcatgatatcaccccaggaagtggacactggcagctgaggaattgatttttcaaggattactaaaccaaaatcaacataaaagtccgtgggtcatatcactaaactaaacactatatatttaaatatatgctttgcaagtttcagtaagaaaggaatgtgtctcttacacctttgtcgtggccatcaaattgctctcttgactcccaaagttatttatatagaacttgcatacataaaacaagtaagtatttatcttctctaatatatgcataaacagaaaagactgtgggaccacagcagggtccccaattacaagtcagccacaacttttctgtgtgattattggctacagtgaatctggaaaaaaatattgctgttggattttaatgtctttgtatgcttttagacatccctgagattagaaaggcactatagaattttgcaaataaacaacctttcttcctagtcacacagcatgttctcagcaaagaaaaacacatgtgggaaacaagcaaatacaactttcaaaattaatttgtgtcaggaatgaagctgtctccaactctactttcagtttgtaaagggtttcaacacttgatatttctcttcgtcaatatatctacatgagtttctcatatattttttcatgacagtagagaaatcttgagaaaaccatgctgtaagtcacatattttaatgtacacagtgtctggctacatttttacccaggaagcactcactcatgcccaggcattcaaatgttaatggccactatttcaaatttaacatggaggctcacatagcttaaaatgagtaagtctccatcttttgtttctatgaatcagtataatttatttagagattttatttaatacaactaagaaaaatcaacaatgcgaactgtactcaacattggttagtatatcaacagttggatatttagacacagatgaccctggcttttcttttggtctcattcaactatttaagctctattaatgatgtagattttagttctacttggggagaacatattaagttaatatattaaacaaagtagttaagtgaggggttatgagaccttacttaaacaaatatgaagtctaagcattttggtggtttg

SEQ ID NO: 48237 - DNA, 2221 bp, Homo sapiens
catgaagcctaacttccctcaagacacaaagaaagaggggagaagctgtgggagttatattccctgctttctattagcaaaattaatttgatccccttttattacatatgtgaaacaatagccatggagtgcccacaactaaaagcaattcacctaaccaatacagctgggaaatgattatcaagctctggaaagccctggattgcagaaaatagcacctacattttcaaaaatgttctcagaagaccttgaatcataaaccaaagttccttcctctttctcttctcaatcccccttaccccttccaccctgcaatctcagcacatgactctgcaccctggaatttaaactgtctaaactccatcctgtgggaagaggcatataaaatatgtacgtatatagtaagcttactttatcacatgaagatggaatactgggtagcacaggggcttggaattcccaaatactagatcccttttatgccttaagtttgaatgtaagaccaggaaagtgatctaaatgtaaagagacattagaatcctctaattagcaacctgcatatagagagactttcctcctattgtcctattttcttcatgaattcccccaaacagcagttttctcttgggtctgaagtatatgtttcagtaaatgaaaagtagcttacttctctaactagtgaactgattttctgtgtgttttacctaatatttttctctcatcactagaaatttgtcaatgttcagttactacaaaaaaagctgctaagttactaaattgctatttagtattaatcctcattttttacaaaataaaattcagttttaatgttaagattgaaaaataatcaataaatcagaaataaatgttatttggggattgagaattagaaactaattagttttcaaagtcatctccatctgagtctacccatcaccaggaatagaagtgtgagagtgggcatgacattcactctttcagtgtctaaggataatttaaggtatgagataattaagctgaatgagccctaaaacgactctcacgttgttgtcattaagaaagcaagtgacatttggtgtaatactgtcgttgaaaactcctaagagagcaagtttcagaataagtagactcatgtaatacactcatacaaatctgccaatttatattattccacaactgtcattatagctgagtgttctgatttggccagattatacaaaactaaaaaaaaattagatatttttatttctaataatcttgttttatgagccagaaaataaatcaatatttaaaaaagattattacaaatattcttaaaactccaagaagttacaaataaattaatgtattggatcatatatatatatatatatatatacacacacacacacacacacacacacacacacacacacacacacatatgtaaagagagtgagagagagaaatttttctgggaaattttgttatttatttacttcaaaatctcttcaactgaatccaggagtttgcactgcccgtctgtaaagctactgccacttttgctccatctagtggaatattgatttttgcttggtaataataagaaagataatattacctttaccgtctgcaaacaaataaaatgcgtactactagttattattgttaaatggtatcacattcataaaacaatcacttactttaatttcttcttaacagcaaccataaaaccataaacctttataaacacaatgtgatagatttgaaagaaatgaatttgatacattatttactttgcaggaaatgtattactcaattgaataaacacacaagtccagactaataagcagtgaaccttgcattcaccagggaaggttcatctaatagcagtttctgaagttacgcaattaataacaaagacaaagtctatttattagttttctaatgcaaatattaagaacaaatgagacattctctcaaatgtaattaacaaaccaacaagtttttaaaatttattcccttacatggggattttaaataattatttctaagttaatacatttagtattaataataaagtactattattaacgttacacagattcatttatttcttattttggacaatgaattgctgcttattaaagtcatcacccaaaattatatacattcatttgttaggtctgatttgccaaggcaacatttagcctctcgtgccaaggcccctagtataaaaacc

SEQ ID NO: 48238 - DNA, 1879 bp, Homo sapiens
taatgaaggattggaaattgagttctgcttaaacaagcaggaaaaaaatgtgattatttttcactcattaacatttaagtcagtagcaggatatttcacaagttttagatacgtttgcttaaacaatagatttggtaaatattttgttaaatcaagtttaatttttttacagtcacatatgcaactaattgttagaaacgcagattatctgcatgatacactgtgtttatctagaatacatagacatatatttttataagtaggactagtatctgactaggaagtctgcctactggatttcagaagagcaaaacagatgtaagcctgtccagaatctggttcttaggacagatggacttttattacagatcatggtctgtccaacaggcttgtaaacaagacataatattgtccatcgttaatattttccttgagataaaggtttgaaagaggcagcatgtgtcttttctatcaacatggtaggcacgctattaatctttaaggtacctgaaattttatgtaatcctgaaattaagatcctcaaaaaaaaacatggtttttcttcaaagtctgcacacaacatttctattacatgaatggcgaagtggaaaaacacgttcgctttgatttccacttcttttgtcagaggccacatgcttatttggaattattatccaaagcataattcttcacaaacgaattagcaaaaggcatactaccatttgtcttgcaatcacctatttgaaggacgtggcaagcccctgttgctagtgtagaaaatgaaattagtccctgggagaggatccgatcattgccgtgttaatctaaccctcagctgttaatgatttgcacagggattccccttgatgctgtggcttcaactgaaatattgttttaagaattgatgtcaaattcttcctttttttttctgaaaggggattgagaggaatggatccacaggctcgcttttccttttctgtttatatctgggtttgggatttttttttaatagcaaaaaataaaataaaaatatttttcaccatagttttatataacaaaacaaaaaaatgcattttcagataatttgctttactgggatctttcagacaaggctgtaaaagagaaaattccttgaaaaactttttaaaaatccacatttcataatttagaattgttctttacatctacaaggaagaaaggagtaatttgctattctcatttaaaatactttagaaaaatattctccaaattaaagttcataaccttttacctttctctcaaagggcaccagagttaacagtttgtgttagtttaaggactgttatgagtagtgggtgaaggaaaagaacctcatgttctatccctgaaggactggtttgttttggtttctttttttccttctctctctctctctctctctcccccctttcccctttctctctgctttttggggtgtattttttgtaaaaatatctcttttattcttgttttcctgttataactctgtacctttttaaaataacactgctaagcaaaaatattgtattgaggatacagtttgtatttctggtacttacaatgttatgataagagaacaatctaatttcatttggaacaaaatcaaactttaaaaggtaaaaaaaaaaattctgaagagttcattcaatttgctgtcaaattcattgtcaaaatgcttaacaaatgcattccaattcagtaaaatatatgacccataatcgtatatacagggcaattttcagttattgggtgacgtttatagtttatcaataatctgatttccataacctatacacttaactttctgagaatgagctaaattaaccaactgggtatttttaaataactaaatctacatcta

SEQ ID NO: 48239 - DNA, 1775 bp, Homo sapiens
tcaaagagtagagacaattttctgcttagaattttagagaatatggtaattttacatgtttgcttaaaacatgattcagattttattcatttggttttgatttttgtttcacataataagagatgttttgaaagctccactattggtgatggagcattgaatttggtttgatattgcagtataaacaataataatttatgaagatatcagtgccactttttttaacttaaaaactcagaaagaaagtgtaatatctaatcttgaaaaagatacggattttactcatttggaagctaatcatgagttttgaagctttctaaactgaactctcaataacatattctatgatgtcattttttttctatttctgccatgaactagtgagtgttgtaggaataactttgatagggtggggaacttcagtattcaagttctaattctggatatttccacttccaatcatagccaggaaccagaagtgaaatgtgcctctgagcacttcagagtttcaaagaaaacttgggtcaaattcaaacttaggaagtcagagctggacctggtcaagctgcatatccttcattctgctgaactactctaccaaatgaaagaggaaatagtttccctggaaggggtggacaagtgaaagatttaaaaatgaaattgttacaaagtttactgatgtggtgtaactatttgtcattgagcttccaatagctacatttacaatgccatggagtccaggaaaactttaaacttttgtttttgtcatattctggagtgacatataaaagagggaatttacaggtgaagatggctatggattgtaagaaaattcaagtggaaattctacttttgcttcacgcctttaagaaactgaattattattattagaatgtaatcatttgaataatgaaagtgaacaaaaccctaaggagattgaccttaccatttattaagaaagcagcaagaataagagtagcctcttccaataaagtctcaccttttttacataatcaggcacctcttctaatgtttggaatgaagtttcactgggtttcatcgtgtaaaacaacatgcgaaatccctgggaaactgaaacatcctgctgggcttctgggttcttcatttctgcccttgtctgattcccagctggagaatatttaggattcaatgcttgaagcctgaggctgaacaaagaggacgagatgtgcagctcagaacaagctctttgtcagagaacagctaaaaccaaagctccactgagagcacactcaacagccgattctgtgtagagagacaggaaaatacaaggatcaagaacaagtacagagttcagtgggcgctgggccagaaacagggcatgtgggggagggaaaagaggactcatacccaaatcaaagtcatacagtgcagtttgactgtaggtggagcaagttactacttaaaaaagaagagaaaaaacatcataatagtgtctcggaaagaaaaaagtgataacgcaggtatatgttcactctgaaaaactggatagaaattcaagcatcaagtcacatagaaaaacctttttttctcctcatttagaaatttacaatgtgttcaagcttgtagtttctttatttcctacagagactgtgtataggcgagctacttaataatagcttgaaagtcagtaagcactgaatatctggctccttattgcctatctatatttctgtatctgaatcatgttattaccacttctgaatgtttgcaaccagtttaggggcatttggctt

SEQ ID NO: 48240 - DNA, 1615 bp, Homo sapiens
gaaataacttcaaagggatgccaaagagaaggtaaaatgatgtacctatattgtcctgtctgggaagtgaaaaagtgaaattgtacaatctggttcaaacaatggaaatatttaaaaatgttatgaattagaaagtaagaaactggaattttcccacctactgacttcagagtgctttatattgattacatttttacattccatttgatgaaaattattgcagtatctcaaggaattaatgatatctgtcaaacttgggtggaatcagaaatttagcccccttttaaagcaggcaatattctcacttcactaggctattcctgacccctccttgcttcagaacagagaatccccagatgcttcctgtttgaatttctgagttctggacctgaactaaacacaactcataaagtataagctggagagaggctagacagaacaatgtgaaataagcctccacttactggatttgaaatgctattgagaactgagccaatgcaacttatttctatcatttaacattatcttggaatattaaaacaagctaacaaaaagagaaaatccttgaaaagttgactttcatattgtttttcctgggcaaactatatcaaaactggcactgctatacttttagggatttatatgacatttactattagtctggttaccaagtgtagcacagtcttggtgcagagtacgccaaaccaaaagctgccctttggccagccactctaggttaaatgtggtttcacttttactggtgttgtgtgtgtgtgtatgtgtgtgtgtgtgtgattgtacttaaaaaacaaacatggcactgacatacctaactgaaaatcgaatatgcttggatcgggtcattatgactgagccaacttgcttggtaaatcttcaaagtcaatgataagacaaggcctagttaaaaattattccttaacatgctacattgacaaaatacatgtagtcagatttatgtaggttttaacaatgttaaatgtaatagctgctattgcttttacctcaatttcctactagtttctttctgggaaaactgggtattccaagtcaatagcgtgccactcacagagctgtagctcagtttgggaaagcagctgcagactgtcagcctgttaattggggatgaaaaaagcattgtcatcatcattctggaagattattcaaggatcagacataaagttctttctttaaagtcaaacaaaactaaattaatttagaaaaaaaactcatgatattgagctaccacacagaacccacaggctgatgccaaatgccacattagggcataatgggaatccctagtctctgatgttgaccagatgtaaatttcaaaccgcttactagttctattaatagtaacactctgaaaaaaaaatgcttacgttttctgatcctttgtttactcatgttttcaactgaactaattatatcttttgaggatatttatttgctcaatgaaccatttattgagacttatagctatggttgttgtaaagattaaataaaatgatatgaagcaagtagcaggcactcgaaaaccataactattttcccttccttttcttgaaaattagcacttaccaccagcctgtaa

SEQ ID NO: 48241 - DNA, 1344 bp, Homo sapiens
gttctgtaattagcttacaccacatggacatgtactattaaggttcgtctttcttccagtgtgagcatctatttatttacaattctctgacacattccttaaaatctgaattcctagataatgtcttcttccccaataaagggaaaattttaccatttgaaatagggtgctatttaaagaacgctgaaataagaatgttaaaaaaaaaaaactgaaacttttttttctcatgcgctctgccaagttccattgcaagttccaaacattgtgcaataatttggaaatccagttaacgatgggaaaaatcgagccactcagagtcggcaacttgcaagagaaaagtcaagaagcggcacccgcacgcacgcctgcccaacggacgctgcatccctgggcgcacgcccctccctccccagcgctgggatggaaggtcacgcttcacaatcgatttcacagccacttgtccttttttatcaaccttctggtaaactagtttaggactttggagggcttagagctgctggctgtatacgcattgctctcgaataaacacgtgtccccaaatatcaggaccaaagcttcaccgccgaatttggccgcaggaagccacagagggcaacacattcccatcttccctgctgccaccctccagtgcgagaatctcccctagtatctctccgccccttttccagcccggcgcgcactctcgagggtgcctggcgcgcccttacctgagctgtcgcttttcctcttgccgccgcttcgcttctccgcctccgcaggtgacagtgcctggcggccgtagtcccccggcgcgcacgcggccccagtcggggtgctggagcccaagctggaagagttggagcacaggacgggcgggctgctccccaactctgggggccctccagagtcgggctggaggcagaggctgtgccgagccgcactcggtggggaagacatctgcgggaggtgccagttggtttgcagagcctggtgctgctgctgctgatggtggtgatggtggtggtggtggtggtggtggtggtgccccctgtgatgctggctggcaaacatgccctcttcgttggggtatcccgcgattatgcaagatgaggaagaagtagagagctcggggtaagacatatggtcagatcttccatggagggcgagagaggattgggagaacgggtgcaagccttgcgccgtggcgtgagggctgcgcaggcagccaaagagcgggtgttccatagcatgcaagtttcgggttccaggcagaagacttcacggcggttccaaaggccaccaccctctgtcactttttcactggaaaccgtgtgatttttt

SEQ ID NO: 48242 - DNA, 749 bp, Homo sapiens
ccttcaactttttcaaatcaagaataaatctcttggactataattatagatttgttggtagttgctcacattaatgatggcattaaaccatgtacttaaaaaataaaattaggtttatggctacaagtttgaaattttcttcctgttttgataagttctttagttttgtttctaaagatgcctaatactttttccactctatttttaaaggtcttccatccggatagaagtgagtacttctaagctacattattcagaagtgagctcagcttagataaatagacacggtgaaactatctaactgctggggcctggccagttgaccctgggaacactagcccgttatgtaaaagacagcagccaacatcctccagttaggcttttccttagacagagatgaggaacaggacctaataaacagctgttcattcttgaatcctatgtaaagtacccactatggtaaagatgggaagggaagccatctcttttccatgatttattcaactttatcctgccaatatttttagatcttatcactgaagtggaatgcagagaaagacgggtagagaaggctttgtagaatcctggcatgtggctaatgctaagaaagacaagactggagacgcgctgttgctttcattgctttaccacattcccaaggacgggtgaaggcctcacagttttgttcagctcctgggcagcgcatgtgcttcagtatatcttccttcccttcccacatgagtatgtgt

SEQ ID NO: 48243 - DNA, 2462 bp, Homo sapiens
ggggaacgtgccacttcccttggactagaacctcactagcttggttttcaaaacctcctgcaaaggcaatgtatgctaaaggatgacatctatctggaaatgcaaacggttcgcatcaattcaaggcttcacaaactaccacagctccccactggcttcagagaagttcaaacaccttagcaaaattatgtggatatttgtaatgccgctgcttcccacccctgcaccctcgccccaagctccacctcattactcagtgctaaaagcaaagtaagttaatattataacataccccttcatttcacttcctcagctcctcacgactgttcccctagtcctccttatcccattccctgtctccttcatttccccaactagttaacttcagtgccctttctaagataaagggggtatgacctcaaattcaggcttaaagccctttccaccattgaaaggttattaaattctgctcctctcccctcctgcagcacctagtaattagcgcagcctgtctcacagaaggtgctcagtaaatgaatgaaaaaaacgaacacacgccctggaaacttcagtgtgcacgtacaactcaatccacgcatgcgcggaggcagagccccaggaccgcgagactatccgcacagcttctcctcaggccccacagctagaaccccaaatcgcctagtcccaacccatgcactctctaatcggcgccacacgacgggccttccccacaacctcatctgcttggggacgtaaagggctctgtgggggagctgcagctttcgtgcccatctgttaaaggccagaacttcccatctctgaaatgcgggagggaacagagctcaagcttgaataactgagcgcggcccggcagtcccccaagtgaaggtgctagcgctagagcagcggcagggcggggagcgggaggccgggccccagggaaccgcggggcgcgcccggcgccgcattacctctccagggcctgtagggtgtagctgatgagcggcctctccaggatggggcagaattgcttcggggtggggacccccatcctctccccgcaccccccggcaggcaacacagctgccacggcttgcgggtggcgcccgggctcggtcccggccacgctctgcagggaggcggaagccgtgtggtccgcgccgcgctgaccactcaggcaaggacccggctccgccggcctggcgctgcccggcggcccggcctccatggctgcgggcggaacggcgagccccgctagcctcgggccgatgcgaccccgcgctgctcccaccctcggccggggtcgcggggcgaagggcagaccacggagagggacgcagagcgcgcaagcagaaggcgcccccctcagccgtcggagccccgctgttgctgccccgcaggggacgatcccgacagctacggcagcagctgaggctgccgatctgccctcgcggctcggctgcggcctccgcacccggtcccagcgcctgcgggagggctgacttgcccgctctgcgcttcccccgggcaggcccagctgtcgccgcaagtggaaatgtcagaacgccctacatatctaaagatcgcagatactcaagggccatgagtatgcaggagaggtcaggcctctgtcccatccctccctgctttaaaatttcggaagagattgggattcaagtcacaggatgggacgtagggtgcgtatgcacctcgattatctgaattccattaagctctggaggcttcctggttccacctggggtaaagacagatggattagcaagtgttattgtggcacatcaataatccaaactgtggtggctctcaaacttgtctgcactttggaaccacctggggagcgtgtcctgacacgctcagagattgggatttaattggtctggtgagcaccggactttggaatgtttttaaagatcctcgggtgattctgatgagcaggcatgttttggaaccatagggtcaaagcaatactaattgctgaacaatcgatacaccttatgtcatttagtccccagaagaactcaactattgccatttccctttttacaaaggggaaaagacgttaaaatggttaatttatgtaagattgcacaactaatggcagaggagccttaaggccctcatacagaagtaggccaaagttgaagaattccaggcctaaagcatatcttaccttatttagtactcttgttgctggtgaggtttaccatgaaagtatagtgagaatttggaggagagcactattgtattaggtccctggaatgtaaactccatgcaagcagcaacatttttcttttggcttgggttgtgtgtgtgtgcccagctcctggaatgtaacacaagcttaatatgtattgaatgaattgctgattaaatagattaatgatcattaaagtgtataatcatcagtaattcagtcttaatccagtggcttatgattaata

SEQ ID NO: 48244 - DNA, 2685 bp, Homo sapiens
tcagcctggctactaagtaaataaaactggaaactgggaagccttatgctgcaatgactggcatctctgccattcgaggacaaacatggctatattattattgagtttaaaatcaccacattaattgcccggagtcgcacgcatcaccatccctgcaccgtgagggtgcagaagaagcatgcagtcacgctgatgtcacctgccaggtaacgggactcggcagggaactcctctgggacgtccactcggggactccggggaaatatggcttctggctcgtcctcggggctccccgctgggactcagcactgcggaagtggggcacgccttgggggagtggacaagaaagcgcgaaggagcgcgattagaaggtctcatctgtgcaacgtgggccgaggggtgggtgtggaggcctcgccaatttccttgtctctctagggttcctgaggctgtcggggcttctggaagccagggaggccctggatacggaagtctcaatgcagcaaattacagacctagttctgtacccttatgaagaacccctctccctaagggcgccctccactcccaagcgggggcggggatcggcaaaggatccagatcattcggcctgcggaagtctaaagggtcatttagacacccgcctaagaacctgaaactaccaggactgaccgcggtcaaaatccctcgggagcagtgaagaattcacacactggggtccacaccccgggaagctcgcattaacctaaggcggggcgtggaaatccgtacgtttccaaaagcggatttagaggccgagcctctgtaactacccctcttgtcccagcactgcttctgcctccccacctctccgcccctgcaacctttcccagaccaaagggagaaacgctctttcccggttccaggctgcaaaccttgcagaaccgcagccaaaggtcacccaggccaggagcgccccccgggctccgccacgccccccggccaggctggccgcggccgcgtcgcagcccagcacccgtacctttcccgatgacttccagtagctccttctcctcctgggtcagctcgcctttctttatgtgaaccattgctcccgccagcttgaaggttattccctttcttagggagtattaaaaaagaaacgatgcgtctgtattgggaacgccagccgcaatgaggcaacttgagaccaagacactgagtagccaaccgcggaaacgcttcgcttctctcctccctcccgcgggctggcggacagcgggcgagctcgggcgagccaggcggacggtctccgcaggccctgcggcggtcaccgcctgccgcctgtcattggccctgccgaggaggaggagccgcaggaggcggtagcgagagatcgccattggagcaacctgggaggacaaaaccaaatgcagaaagctggaggggggaattaaattcctcctacacgttccgctcccctatcctgtccggttcaaatatttcgccacatgtaatattgaaaattctacagctggcagttatgtgctcagcgacggctttctggggcatgcagaggccccaggttgtcgccgtacccccaccattcccccgggagtggcgcagtctgggcgggggcggtctaggagacgggggcggtacgggaggcggggctgcgccgggttccgtgtgtctatgtcaatgtgtctgtccttcactcctccattgtctgccgccactgctgctgctgctgctgctgccgctgctgctgcacgaatcgccgcagcccccagccttgcgcgtcgtcgctacctcctcggacaggtgagaagcagcccaggtgaggcaaggggcgccgtgagggttgcgagagtagcgactgccgccccgccggggtttccatcgggcaggagctggcggggaggaagcatgtgcctcctggggcggcttcctgcctcgcggtggagaagcccccgctccacctcatcatcacggcgcgtacggggtatcagtgccctgggatgaagacctccgactcgcaacgtttggccgcctcgggagaccctgggaccgcgggcgggcgggcgggggccagccacgcggtgggaagtggcgggtgcacatggtctcgtgcgtggcaccgccagatgcggctcccggggaggctggggccggggctctgggctaggtaggggtcgcaaggacagcgccccattactagcgagtcagtgagaacagactcgggagaaggtagtttttacgctggtgatcctcgccctccccactacttgtcatctctttggcctctgtggaagctgtagaagaaaacctgatcgcccaatgttgcttgttaaagatgtttggaaacaatttacacttgcactaatacttcgtttatgagagacagcctgtgggagggggaaggaagggcttctttgctctgctagagttctcggttctctttgtaactcagatcttgagatttatggaaatagggagtggagggtggggaggttggagagggcggagattaaattggtgttgctgcctatatatagccttagattagcctcttaatccaaccttcattcaactgtaatatgtagcctggagcttcgaccataggtagatgggggtaaatacaagtgtgtatttcagaataagatttgcttgctaaaatgcgggaatcagtcatttctccagggt

SEQ ID NO: 48245 - DNA, 780 bp, Homo sapiens
aaacatttatttgtctagtcactagccgcatttcaagggatcagtagtggctactatattagatagtgctgatagagaacgtttccatcatcacagacacttctattggatacaatgcgctagaataggagttcacaaaggacctcctgggggtccaatctggtccaccacttgttgtgttaatatgaagttttactggaatacagccatgaccatttgtctgcatattgtccatggctgctttcacactgtaacagcagaattgagtggttggaacagaaaccttatatccctcagagagagtaaaatatttttcttttatttctttacaaaaaatgttgtgttccctgctttagagtatatatgctcataaagttgtttgaataacatatgcatagcacatgttagtaatatagcatgttacgtaaggcaggttatcatagttcaaagatgagtcataccagagcagtcaaaaatagaatctaagaccaaagtgctggataattagacaggagcagtcattcccttgtagggacaactagaaggtaagtcctctggtagatcagtttctttccaaaatggagagaactaaagaagagtcccaggtaagactgatcagtctacatcgaaggtgctaatccacttaaggtgggctgggtaactggaaggattagtgcacagttgctatgagatgcatctgtgccagtgtggctcattgtcacacctgggcccagagtctcattgcaagttaagggaccgaatttgaaaaagatgctagga

SEQ ID NO: 48246 - DNA, 873 bp, Homo sapiens
gtctgacctgtccaggtcacaattatagggcacatatcttattttctgagagaagcagggattttattttattttttattgtttcacttattttctccctttcatttgcctctacttcgttctcttttaaatctttcacatgttttcattcattacttgcttcctgccttccttccctcaaacaaggccaggtgcttagttttgaaatctcattcaaaatggtgccacgtcatctgccagggccaagaatccagaggtgctgtcatatttctccttgccagcgtggatctcctccgagccccgccctccctcctcacctgctcctggggaaactacaccaaggccgccgctctggcctggggctccctcccacacggccttggccctctccccctcgccccgggaccgctccgcccctcccggatcccggtcggcggagcgcatttatttgcatatttctacctttgttccctgccagcggccaatcagcgcgcggggcgagacgaaggggctgggcggggctcgggctcctgctccggctcagctgcggcggccgcaggttccaaagcgggtccgagccgccgccgcgcgcgcgccgcgcactgcagccccaggccccggccccccacccacgtctgcgttgctgccccgcctgggccaggccccaaaggcaaggacaaagcagctgtcagggaacctccgccggagtcgaatttacgtgcagctgccggcaaccacaggttccaagatggtttgcgggggcttcgcgtgttccaagaactgcctgtgcgccctcaacctgctttacaccgtgagtatccccagtccgttcctgctcgcttgggggctttgcacctgcttgggagctctttg

SEQ ID NO: 48247 - DNA, 602 bp, Homo sapiens
ttttccttcctttagggagggcttccctgactatgcttcataaactcaggccaggccccctagtattccattccctgtcccattgccctgcttaatctatctccacagtatttaaaattttttgtatatatttatctgtttttattgatgatatctctttcccactataatttaagctccatgaaagaccctatatttcaagggtccagtagaggcagatattatgcactcaatgaatatctgttgcattagtaaataattgagaaatcattgtcattatcaccatcatcatttttcctctctaaaaagtaagcagggattgtacctgcctaccttatgtgtacattcctgacgtgaatcatagttcttggcaaaaagtcctctgtcaatatttgtcaaaggaatgaattttttcttttttctttttttttttgagacaggactcttgccctgttgcccaggctggagtgaggtggcgtgatctcagctcactgcaacctccgcctcctgggttcaagcgattctcctgcctcagcctcccaagtacctgggactacaggtgcctgccaccatgcccagctgatttttgtatttttagtaga

SEQ ID NO: 48248 - DNA, 1297 bp, Homo sapiens
tcatctataggtagagttagtctgagaataggcttatttctgttgtaaatgatagcttcacttttgctaaaaatactttttgattcacttatttttaagactttgctacatggtctgtcaggccctgggtttctggatgcattgtataattagtgtaaacttggagaaacttgttttgtttttaatgatccaaatttagttgcttttagtcacagaatttctgtaaatacaaacttatgtcagaagaggcttttatttactttgtgattcaactcagcatgtttatttaatatgcaatgattcagcttactggctcctttagaaacttggagtgtgtgttctcatgatggctgaataagttgatggctttgatctgaactgtaaaggctcagagggcattttttccttgcaaatttgcctttggaatttctctttcttttctgttaggaaagtactattgtttgaccgtagggccaatctcatgtagtttagattccccatacttgcagaattagagtttttttcttcattatgggatgctttttggtgctttcaaatggaaaaagcagagttgttccaggcactgacagaaatctgtgctgttgatttttgtttccttcctggacttcccaaaggaaatacaaaagaagatattgatattaatctgttagatcacaaaaaaccaatgtacaactaaatgaacctagattaattttttcaaagcccaaacaaaagaaagattaacagtacatagttcttttttagacaagactgacttgcacagcctgtcccctgagtcactaggcttcccacctcaattagtctgcatttgctcattttcccactctaacatttcttagtagtaaccagcttctatcttctctttgctttacatggtcactcttccttttgtgatcatcccccaaatatctcttatctcagttggcactcactgctgtcatttatcctctctaatcacctgaactcctaggtgttgggtgaacctgtcccttaggctaccgtagcttgcagagacttggctttcagccttaaggttcaacatgctgctggagttccttccattgcctccatcttccaggcagctggaagtggaaggaacaagacatctcaccaccaagccagctttctgtaagtaccctgcttaccctctcttaccagaacttcctcaatggccacagctttctaatgatcatttgtaaggacagctataagagaggctgtaaaatgcaaccttcgtccaggggcattgcaacctcagtgaaaatggatttctatt

SEQ ID NO: 48249 - DNA, 734 bp, Homo sapiens
gaaagcaaagctgctcttgtcctgaaggaaagtttgtgactgtgtattctttgcagaaagtaaggactatggatctcattaaaatgtccccaacctcaggatactatcagtataaacattcttgaaggggaacatatattctgggtctgggagacaaatcccatctggtctaccttggatggaaggctcccctactctgtagtggttggttgttttgttgtgtgtggacagctgagagtcatttcctcatctttattccaaacgaagctggacactcccttttcatttttgaaaagtaatctgtgtgagaaggcagccagcatgtttacccactgggcttggagccagacttctttccctggttcttcctctctctgtttctcaatctcccctgctctaagatggccagatatgaaaagctgccaatcgggatgccagaacatcaaagagatcgctcatgagagcacacaaagtcccatttgttcagcacttggacggagatgccagcagcttccaggcagagggagaatcgaaggtttgtcttcacttgacttctcgctcacaccatctggctgatggagaatcctttcatttcttcccgtggctggaccaaagggagaatgactgtgaatagaagtgccttttcaaccttcacttgtatccatttttaaaaggacaaataaggtcatctctgcttctgaaattaattgttaagatttctttaaaaaattctt

SEQ ID NO: 48250 - DNA, 1353 bp, Homo sapiens
ctactacgttaatagtggtaattgtaacaagaatgtttgcatatgtttaaacttatcaaattgtatactttaaatatgtgtacttcttcataatatcagttatgcttcaataaagctgttaagaagttttaatttatttaaatttgtgttaacctgtcactttgtgagggtcatctactttttatacaaagtcactgcaacctacatacttaattcttttgtactgttttgaaataagcatacacttgcagacacatgtttctacaacattctttgctttcccaataggcaagttcaaactcagaaggcgaaagtccagcggaaagtaccggaactgagggaaaactatttgcctaaccacccacaccactgaatgctttcttggaatctgctgtgtgtttaagatgatatcctacccacacacatgtaacctttacctttttgcaaaccaaatctgattctacaaggaaagcacaaaaataaaaatatttttctctcaaattatatcagatttgtttctgctcaaattatctcagactagttttaaaaattgtaaactctcccatatcaagcatctaactatccactgaatttggctatgcaacttcagtttttagagaaggtggtaaagtctctatttttaagggggaaaaattaagggttactaagaaatatagaaataaaactggattttttttttttgctttgttttacagtgtttctggaactttctttcttttcattcctcagtagctttccggactctatcctgaactgaatcttcttttgtgaaagttacctttgacctgtgacttgactaagcatgggctttttacagtacgtggtgcttgatcagtctatgaattcaacccaattaacattttctctgtagaaattgctgccattggctcccatgacatcatgcttgtgtccctcttttagtctttctgacaacttttacccagtcttattactccctctttttacttcacgtattgtttaattattgcttcttccatggggttccattccaaactctcttctttttcgtttctacatactttccctggaaaaattcactaagccatgaataaaagtatcaaatggacattcatgaatccaggctttcagtctccagccccatctacctgcctgccctgacaatacaaacacttgaatgattattacataaataaatatatttctaacttctgccactgttttccaaaaccacagaagccatctttattttggttggccattttatccttggcaataagcacagtccctggcacatggaaggctctcaaaaaatcatcttaggtgttgaaggagtgacctctttttggcatc

SEQ ID NO: 48251 - DNA, 677 bp, Homo sapiens
attccttaaattaaacatctattatactaaatttttggtatagcacagtgtgtaattatttgtaacttactcacatgtatagtatagtattggaattagtgtgctgtagatagactagatcttagaaaccatctaaacctgggattttaaataggtatcttttcttgtgttaatgccgtcgaagtggtagtggttgtgtggaatattgtttgagaattctgggactgcatgtagattaggaaaaaggaattctataattgattacttgtgtaggcatcgacccagcatagagaatgttggcaagtatattaggtgttttggcatctctaatctatttcaatatcctgaattcacagaaaaaaagagaggcatttatgtaacacttcagagattgtgcaactcattcacatatgctggcacagtttcttttcaacagttttgtaaagtatgcaatatttcgaagccctagaaaaaaaacagctgcttttgtccctggctggcagtgatcatttgtggatcttggatctgaattccagaagctccacaatattattctcacaacagcacatgccaaaagatgtccccactggtagccactcattcatattgcttctgtctacattcaaatgtcaggtaagattcatctgaccaatgaaacctggacatttgtcctccca

SEQ ID NO: 48252 - DNA, 389 bp, Homo sapiens
ctcttatataaatatatcaagatgtttaaggattctgatatagaaatgaatggtatagtacttcaatacttagaaaaaataaaatgttttaatttgttcaaaaaacttctagggtcttactattgatatcatgataaaacatttcagtcaaatgagttagagggtaaagcactaaatctcgtgtcctgagagttttccagcctgcttaggcagataccaggaacgtttgttttgttcctgaacacgttaaacaccaaaaaatatcacagagttaagcattaactagacagcgatttcaagcacatagaaaaacattaggaaagaacaatcaagaaatccaaagaaattttgcctaaaattaaaccctatagcgtaggtcaaattttatt

SEQ ID NO: 48253 - DNA, 2567 bp, Homo sapiens
aaaatcaggtttttttgagagcacatagctagataacaaaactggcacagagttccagggttgaagacagagaaactgagaaacaagccatgggacctggattatgtgggtcatacggacaagaatgcatgcgtggtatcttctcacagtgttcagggacttgttattgctgtcactgtttttaaatgtgatttctgtacagattcactcagtgtgactacatctggattgttcaacattgttcagtatttcctcttatgaccttaagaagaagaataattttgtcaaggaaagtgctaaattaatagggtatttttaatgtacttagactttgagaaatttttgatgatttctgaaaagtttaataatgccatcttaggcagagaatagtttctcatacatccatgaagaaaaaaaaatgaattaaaactcaaatcttaagcaaacataaaggatgaatttatttaatatcacaaagagtaaattaccatttgttcaatggtaataattgctttagagggggaaaaaacaggatagaaggactagcaagtgcctgaagggtaaggattgtggggtgtggtttataattttaaagtggctgtttggcctgcagggtggctcacgcctgtaatcccaacactttggaaggctgagaggagagggtcactggagcacagaagttcaagactgcagtgagctatgattgtaccactgcactccagcctgggtaacagagtgagagcctatttctaaaaaaataaaaataagttaaataaatacataaagcaggtgttcaaggaagtgaactgcaaagtgacatttaagcaaagacctgaagaaggtaacaaaatatatagaaaaatatttcatttttactttcctttcagaagcagataaagtaattgataagtatttgcaaagagcaatattagaataattcatttctttaggcattacctgagaaagatgtagacagactactggagacctgtaatcacctcgaaggctggacctggatgaatcttctgtaagatcctagcaacttcagctttgttcagggtagttttaggattctatgtaactttgttccccctttttgcgaattaggaatgtagtccttctatgtttgtatacttaaggacttttatttaataaacagaaacatcccattctctgggcagtataatagcaacaagaacagtgtacagagtcccagagtggaattgaaagccaagttttgggctgagtggccccttagtagccttaggactcagagcaacacatttaatttatctgtgtctccgttttctcatctgctaagcggtaagtagatatcatcgtcctcaaagtttttttgtaagttgcaaatgtttatgatttccaaaattctgttattttaccacttgtttctgagcctttgcctgaaacagagggcagcaggatagcaactgccttgtggaaagttctgtgggtgactcaacaggccaaacaaggaatcgggaacattcctttatacctgtgcccatgtaaatcctctccctgagttttcagctatagtcatttattgcacaacctgttagtgaccttgccaaagtcctccttatccattactcaacccgcgtgccaagctgcttcagctcctgctattgtttcccaggagtttatagctgcccttcattgctcgaagctgcactttgaagtgtcctcacacttgtggttgtcctgttttatctcaccatgcccagattccgggaatcctaaggtaatccctcatctagaaggtcagtgaaaatttggtgtggtaggtcttactgaagaattaaatgggccgggcacggtggctcacacttgtaattccagcactttgaaaggccaaggcgggtggatcacctgagatcaggagttcaagaccagcctggccaacatggtgaaacccaagctctactaaaaatacaaaaattagctgggcgtggttgtgcatgcctgtaatcccagctactctggaggctgaggcaggagaattgcttgaacctgggaggcagaggttatagtgagctgagattgcaccactgcagtccagcctgggcgacagagccagactccatctcaaaaaaaaaaaaaaaaaaaaaaagaattaaatgaagactggctgtattctggcagtgtaatggtgttatttatttactttctttgattttggtgcaaaaggatgtttgctgtttagcagtgctcaaaagtccaaagttcaatttaatattccatttactctttcctgcttttacaaagactactgatgaatatatcaacccatattggtcatctttcttttctgaaacaaggaagcagtattgtggtatagcagaaagagcacaggtataatgtggagatgaacaaattggatttgaattacaactctgcattttacttggctgggtatgtggaaaggtactattgctgctacaactgagtattgatggtaataattttatgcgtgtgtatattcctcactactacctgataaggtttcattttctttaaaatacagattgtaatatccatttcacaga

SEQ ID NO: 48254 - DNA, 1060 bp, Homo sapiens
attttttctttctaatatgctacattatacttttgcatgcagcatgaggggttagggtcagggagagagaaaatgaagagatttctgtttatttctgttactcagctaagtatcagaaacaccacagggggttaaaaaggatgtctacggaggtgcttgcctgagaagtcaccagaggaattgtgtgcaaacacagaaaccctttggtaacatgagctgtgtttccttgttaaattgaccctgctgtctgacaccctctgttgctactgttacatcacagctaggtcaacatccagattcctttaccaactatgtgagaatctactaaaagcattctctaataatacagtcagccctgggaaagacatctgagctttaattaagcaatgtatgtgggggaaaatttctggtatcttgtttaatagacaggtgtaacatattcctctctccaaatatgcttttagatgacatggggtaggtttagagagatttataacaaaatgaaactgatgtggcagtagaatttgttagcccattcttttatgtttctcagcagagatctttacgtggtaaaatgtcagattagggctcagcgtaatgatttttggaacatgataatgttatttcagaacacttcatttagaaaaatatctttgttcgaatacttcctgatattaatttaatttgctttggtgctcgtgggttataggaagtgtagctgcacacttctttgcacttgcctcacaaaacttccaacagaaaccaaccaacacacatctcattaatcttcttaacactaagcagaaaagaccaaattgaaaatacggcgatctttccatgaatgcacatcaggactggtttgtttatctctgagcaggcatgtgtgatgaaaacagtatgtcattatgtagcttcctaagtggagagctggaactttgtgaagaacaaggagcctgccgtgaggttggaagtttttacttctttgcgctatcatttctattgctttgactgtggtatcttccaagtgtcaggagttacttcttccctaaaagaactctgg

SEQ ID NO: 48255 - DNA, 3596 bp, Homo sapiens
atgtttgccatatgtttatcatctaggcatatgttgaactattgtgtatgtttaataaatacttaataagaatatgaatgtatttattagatttgtttagaactgtactcagaataggctgggtacagtggctcatgcctgtgatcctagcactttgggaggccgaagcaggcagatcacctgaggtcaggagtttgaggccagcctggccaacatggtaaaacccccacctctagtgaaaatacaaaaattagcctggcttcatggtgggcacctgtaatcccagatactagggaggctggggcaggagaattgcttgaatccaggaggtgaaggttgcagtgagctgagatcgcgccactgcattccagcctgggtgacagagtgagactctgtctcaaaaaaaaaaaaaaaaaaaaaaaaaaaggaaatgttttcagaatacactggaattttggaagacagacaaaatgaatataagcataaaattagattaaatactggcagctaactgcaggccccagtcctgtaactaaagctaagaagacccctccttgccccaacaaaaaagaagtgtgttttcactttcactttcacattcttcacaatgttcaatataaacactgaagttatattgagtagcaacttttatttgacatttaattttttgttttatcatgaattttctaatttcagttgagttttttgctatttattggcttagaagtgttttggctttcatatgctagacaatactttgagtaaatacagtgaaggactgtgagaaagttaaatttgtggcacttttcatctaaaacaagaaaaaatggaaattcccaaagaaagatgagtaactctttaagccatttctgctgaatggatgtttcatactaatgttatggggaagtattaaaatactgtaaaaggaactaatccaagtattagtgtcttagaagaaaagccactgggtgcttaaaacatgggtggagatttcttagtgtgtattgattgtttatgaaatgtcaaaatactactaaagtgtatgagaagaaaataaaagctactagcatttgaggacacatttacatgacagatcttacgagcgtatttcctggaaatgtttcactgattgatttcatcactcatttatttattgcaacacttattcaatactttacataagttaaattgaggagattcaaagaggagctttgttctttggcctaatggaaccaatacagtgcttccttgtgccccagtgcttcagagttattagtgaacatagttccttccatttgtactttagcccctctcttaattttcagaaatgaatccaggcagtaaacaaggctgactaacagatagcaggatgcactcacaattgagatactgttattgagccaatttccctgtctgacacacccttctcttagaaggatgtctttctgtggctcctacatgaaacaagtaaaatgattcccaacaggctcttctaccagggtacaaatcacacccaaacatgatggcattgggcaaagcttaggctccaacagagattttctattaaagttagattgagttcaggttgggaagcatatcctctgtcaagccaaggagtggcttggattttatctcgtaggaaataggaataggttctttggaaaaactgaaggatgaataggacttgggtggataattgaatgggttcttgggtgaatgaactgattgaaacgtgattatggaaaaatgtagcattaaatatgtgcttttcctgagaaattttaaattggtttaaaattagctaagcaatgaccttggaataatggagcttagttcaaagctacaattcacaattgttgtcaactcttcactttaaaaagtgaatattgttcagatgtgcaaaagggttacacaagagtcccaaagaagtcacaggccagaagtgtagctgatgggtgataggaaaaccaggtctgtagaaaaatctccctgttcattaccatcctcctgagtttctccttccaacatccttatgttctacttgcgtattcttatcattttgcaacctctttacttctgggcaaataggaaaacaggcagctttatctttggagttgactctgaggaaaattcttctggtgtcaaaggaatgatttggattaaaaatctgaggctgaaacaattttaatgtttatttaaaatgaacttttccactaaacctgtctcatcagataacaacactaaatatcatagcttacacacacaaattttatttggccacaggaagaaaatagggaatagaattcagtaatcagaatataccacactgatgatactatcttattaccatcagtaataaaatcaaaatattactcattcttcttcctcagaattcactcacagggtttgcatagatcctatgagtcatggtagcatcttcagccctgggaaactgccctctcttttttggctccacctccaccaccccaaaaaccacacggagagatggagaagggcttgattaagaagctgcgaagttgccttaacattgttgttttcaaactcacactgcagacacaatgctttgcgaacttaagataatcatatttcagatagagataccagaggccgtttctccagcaggttcctgcagtggtttttatgtcttgaaattccaattcaagattggtttgagccctggaaactgagatattagaacaatcagattatctcatcaaaacagattgagcatacttttataactcacactgatcttggctacaaaaggattttggtagatgattaaactttagaaagtgaaagtaatatttagtttgatctttatatgaggcaataattctatcaattataaggatatttcttctgaaattttcactttatctttagtacctatttttccccagtatttttacccatatttccctaaaattgagatacctgggctaaaactgttttttttcctttatatgtttctatgcttcgctgtcaaattaggttcaactgataagaaaaagcaagtataagagcgagcttttgtttccttagctgtactccttgaacccacttctccatcaccttcccaccacccaccccattgacaaagatatttcagaaaaactttgaagactgtagatctgatatgaagtagtccaccatttaaagcattctccagggtgcaatatcgcccctaacaatgggtcagtctttaggggtggggggagcatcggttctcagcaggcaaaatcttagctattaaattggctgtggccctccagaaaatttatgtactacatatctgtacatatacaaatatgtgatgtatctagggtaataaaatttcataggagctttggataagggagaaatagcctaaaaagatgctgtaaggaagcagtagtaaaacttaaaaaggttaacaaacactgctttaaagactatagcctcctattctcttctaaaagaattgcatagaaacagtccctttcctagtgcccgctcatgagctcctttattttgtccttctctgttttcctaatactgtgtttctatatggtttgaatatcatgtattcagat

SEQ ID NO: 48256 - DNA, 489 bp, Homo sapiens
ttaggttgtctccaaagacagaagtaatacgcaactatattggattggatgtgctaaagacagctgagaactaaatatctgccattaagtccccagagctcatatcagaaatggcatgttgtcctcatagagatgtggactcaacggtttggtaaatatttttatgtacatgtagactcagaggggacatttggcagtcatgctggcagcttattttcaaatagtccaaagagtaaaggaatgtttattttgaaattacttttcggtttaagtactttaaagcctagtgttacccaatcagaagtatgtgtgtgtgttgaatttaaagcaatacattaaaccttcttttctttctagagtaacagaactaacaaacattaaaggtgtcttttgctgccactttaaggctgtttaattaaaattagaaagacaattaatggggaaataaaccagcattcacagagagagtgcaggcctgccaaagtgaaa

SEQ ID NO: 48257 - DNA, 816 bp, Homo sapiens
cctctcctctctcttaacctttggagtctatgtcctgtagcttataatcatcataaaatttggagagaaagctttcatgattttcagatgtcccacttctactgatgatagtgaggtagaaagggtgtctcctacataaaaattcaacaaccagaaattcattttaatttctactattatgcttttttatttatttggaataaaacagagagatttcacagactggaacatatttactatgctaaaacctgaagactggtgcaaaaatgccagaggaagatgataaataagagtcctaatcttgattagacaactaccagaagcactaaactgcctcttcctgaagtttccatgggtctgggcagtggctagagtgctttgccattgctggatgtgtcctcagtcagagtccaaagttccttttgattgttgtttcaggaatcttccttaaaaaatgagaattataagggaaatggtaaaaattcactcctcttagaatattagcttttttgacactgttaattggcaaaatttgttgaaggagaaatgacagctgtttaaataactagactgcattcattttaattattgcttttggcagggttcaaagagtttaatctttcctaaatccctcggtaatgtctgctctctaaaaggttcagttaccctggacaagatcttcatcagctacttgctatgcactggcaatgttacttgatatagataagctagttgaaagggtaattactagacaaagaaatgtaagatatatgctaatctaagttctcaaacagcttcttaacaaatatttagatc

SEQ ID NO: 48258 - DNA, 1415 bp, Homo sapiens
agaagggtgactttacatagggctaatttggaaagcagcaagagggagtggaaaagacgaggcagagacagaggtcttatgatggtgacccttgaggccatttcacagaatttggtgacactgtattatgaaaaaataaagaaatatcaaccatagagagatgaattaccaacagtattgggttttcttttttcattttcatgctcactctacgtatatttttgttcctatcagtaaaattcttcgtttggttcaaatgtagttaaaatagcttagacaaaggtcaacattgtccaagattcacgtggttgtatgtccctttttttccttttggcataaaagtgctactcatattaaaaatttttgaataaataacagaaattaaaaataaaataaaggtcacccacaatcccaaaacctaaaagtgaatgttattaatatgttggtctattcctgaagcaggtttgtttccaaagtcctgtttgcggttatctcacctttgtgaaatgaggttaaataaagcaggcagcagattcagtttagaaaaaagacaagtggcagcagaggtcatactgatactcagagttcagatagtaacaggcatgctttggcttaaaagttacaattcatcagcaaaaaatgttgtggtcagaacagtattgccagagaagtgttttgatttcaaatattgctaaatcttatctctctgagtagttgtgtcaataagagataaggtcctgcctcactttggaagtaatagctttaagagaaagagaccctcaaggaatgagccttgttctgatgggcagaggctcccgtgatgggtggtgatgcttttggccctgacagggtcccagctgggccccagtccataacaaggccatggcagggaatattattcattcatatcatttgagacccagtttttcataacgatcaacatcatatttcctctaccttctctctctccaactctcagacttagaagcctataggttataacctgctttttgaggcagtactgaacttacagaccttagaaccaccctccactagacagtgtgagacttgtgcttcaggggctcagaacacacaacatgttcgtcacttcaaccctaagaacaagcaaagacattgaaaacaaagtaccagcagacgccaagtcttttaacaagaggagtctatccatagccactcaaataagaatacgctgatttgaagaatcttctgctgggaaccggggatgggaaattagaggtagagatgattagaccactcttaactgttctctcattttttcattttacacaataatgagacttttcccttttgcagctcctagtgtcaaagaactgattagactgaatgatgaacataggctaggggaaattaaagtacattgattttatctcagg

SEQ ID NO: 48259 - DNA, 1777 bp, Homo sapiens
ttcttgaaactcttccataatttggcttccatcatcctgaacaacaaactttccgaccaacactgaccactcctctaattataacttatcctcttgtctcttttctgtgggtatttctaaagcttactggtcttgttgctctcttctcttggcaaatttatctatgctgatggcttcagtgaccatgtcaatgttaatgatccccaaatcttggtctttattcctgatcactcatgaaccttctaatcttataactccacctgttctcttagatctttgctatatgctaacttatgtctaaagccaaagtcattgtcatactgactaaattgtgctcctctccaatataccattttaaaaaacactagaaatttctttttttatatgtcaaacatatagtcatctttactcctactttaaaatgtatttgaagaaaggattattcaattgtattatttattctttgttttcttggtaaatgccttcctttctattatctgttgtcattacctgcatccattcacccacccatccatccatccactcaccatcatgccctggttaatcttcctccagataaacctacttataagtgatctgtacaaaaaacccgcagtgccaattttcacttgattaagtatattaagtgttcctgaatatattaagcagttccatctgatataactgttagttctcatctgcttctaacttgaattctctctaaattaagcatcatgtgccctaggctgtgctctgttacaaaagggtgggatcggtacagttgatagcagctgtactacgtcctttgtttgttcttatttgggttgggagcagttccatggggaataaagaaggtggagagaaacatcccactacaatgatagtttatttaataatgtcctcatgccaaggtcatcctcactcttatgaagtattaattcaaaatctctagttgtcatttctagattttgccaaagagttacttcccttcatgaggcacagcttccaacaatgtagagcccttggctgctttacttggagagtctggcttctgtgccaaatatatgtatcattctgtgtactttctagctgcagtctctttaaaagccaactgtgggtaatcatctcagggaataggcatctatgttgtaacccttgaagaatgttagcaatcttttatttttctccataattttaaagtcttgtttcataagcttatttattctctgacttcatttggcaaatattgtttgacaaatattcttgagctactaccattggataccaggtattttgtttggttctgagaataaaatgtgaaatctaataggcccacactgtgccttcatagagtggggaggacagataccggacaaacaattacaaagaagtttgaggagtataatgagggaagtacagagttctgtggaagcacttggtattagcatagctatctcagttccactacttgctggcagagagatcataataaagttgcttaaccactcaaaggttcatttcctcgtatgtaaaactgtggccaataatagcacctgcttcatagattatttttattaggattaaatttttaaaaacacatttagcgcagtatttggcacatagtaagtacccaataaatgttaactgcaataataaaataacattaattttacattccaaatcattttattgcattaatttatacttctaaaactttaaagtcgttttttttaattctcggcagctatattttttcacttctgactcaaggctttta

SEQ ID NO: 48260 - DNA, 2959 bp, Homo sapiens
tttgttacatctccttcatttttctgatccaaaatttagtagcctactatatctcacccactgtccttctttcctccagctatggtagagaactgctcctccaactttatgtacatttgaatcacctgggagttcctgtgaacttcgggttctgatttaataaggacacccaaagagtctgcatttcctgtaactctcaaaagaagctgtggagtactctgaatagcaaagcactgtaagtgctgtttctgttagtatctaatctattagtcctaatctcccatttatgctttggcactcattccctcctgctttcggtatcttaatatctatcattccttcactcttccctcaggttccctacatagtttatctctaccccctctaagccgctcagtatcgcccattaaagaactaaaccaaaactagaaaaccctcatttaacccttcactccccctacatacaatctgatgtgtctctcatccacagctaaacttggaagaaaaattgcctgcttgaggatgccattttgttatcttcagctcaatcctgtacccacttcaatgttatttgcaggcccattaccccaacactgcattcacgaaagtcatcagtgactacacattgagaaaacaagaatgacattttcagttctcaactaatttgaatttctcaacagtattcaatattgttaattactcccaatatttttccacatggtcctccatgacacaatacataatagtccccttattatctatattcctgtctattgtaaagacttcccccgcacaccaaaaaaggtcaaggaaactcctagccttcaagtctcaactcaaatctggccttctgaagccttcccaactaggaaaatatacagtcccattggttgtctaccagttgtctaccagttaattgtaattcttagccacaagttagctgacccaccgtctctcaaacaggtgaagttaagctcaatatttggcatatcttgatatactttgtacagtctagctacaataagtttgcctatgcacgaagatggctaccggcgggggggggcgtccttacgtcctacgtcatcacgtgccgggatgagggtggggccctcaaggaagacggaatggaatccagatgggcgggggcaagcaggacggggcggggctacgcgggatctgggcggggcggggccggtgaggggtcgggggtgctcctgctattcagccggtgcgcgcggcggcgggaggcagtggctggggagtcccgtcgacgctctgttccgagagcgtgccccggaccgccagctcagaacaggggcagccgtgtagccgaacggaagctgggagcagccgggactggtggcccgcgcccgagctccgcaggcgggaagcaccctggatttaggaagtcccgggagcagcgcggcggcacctccctcacccaaggggccgcggcgacggtcacggggcgcggcgccaccgtgagcgacccaggccaggattctaaatagacggcccaggctcctcctccgcccgggccgcctcacctgcgggcattgccgcgccgcctccgccggtgtagacggcacctgcgccgccttgctcgcgggtctccgcccctcgcccaccctcactgcgccaggcccaggcagctcacctgtactggcgcgggctgcggaagcctgcgtgagccgaggcgttgaggcgcggcgcccacgccactgtcccgagaggacgcaggtggagcgggcgcggcttcgcggaacccggcgccggccgccgcagtggtcccagcctacaccgggttccggggacccggccgccagtgcccggggagtagccgccgccgtcggctgggcaccatgaacagcagcagcgccaacatcacctacgccagtcgcaagcggcggaagccggtgcagaaaacgtgagtgtcccgagcgcgtcctcatcgcgggggctgggcgctcaggcacgcgggtgcgggaggcagccccaccccgcccccaaatccctgcgatcctgggattaggtccattcccggcactgcccgtggaatcgaggtttggaggccggctgggagacagaggacttggattctcccgttttcaatgattgcattttaaaaattgtcctcccacccatcctcttcccccgcaccagtgcatacacaccctctcacatttgcaactttgttctttctgatttggtcctgatttgttgacagctctgatctgccttgggctaatggattagttagtataaacctgtcttgaaatctccttccacttttcatatccgcatgggttaggttagaggacggtcttaattctcattcttcgtagagtttggtaaggcgagatgttttaaagagctaaacacatgctgacttttacgaaggggctgagtgcctctaaaggtactttttggtccccaccaactggctttgtgttgcgctcatatttacttatttggcagcaattttgtagcgctcatcgtgaccatatcggtaaagtggatagaagtggtagcaggtgggagtggatgcaacggacaggatacggtggaggatttgtattcttcagacatctttttcggaagcttgcttatcacttttggggtggctttagggtctgtaaaataaaagatttagaactgcatttgagagaggttttcattcttaacatctacctctaattcttttccccttcaaagttttcttctagttgagtgagtacaaacttgcttttgtcgttgtcggttgattttggtggaatatttgtgtgagatggccaattttttgtgtgtgtcagaaaaaactatccgtgctcaaaacatttcctgttgtgaggtggttgtattcatgtgtttattccaatttttttatttctagatctctgagttactttacctacatgtgtttcaagttttcgtaaacaattttaagaactcttaaacg

SEQ ID NO: 48261 - DNA, 1681 bp, Homo sapiens
gaggccttatcttttgatgtcttactgtggtagttagggattttagtgctgtcttgtctcactttaacctttttcaccttcctgcatcctcccaatatattttatcacaattttggattatatacacattagtgttgtattatttttgactgtatattgtttactgtttagctaagtaatatactgtgattatatttgccttcctgttctatgctattattgatttcttttctaccatcttcctgtttattagcatctgggtttagctgtcacttaggttcatcggagacagagtttgtgtttctggctcctgcttttcttgttttggtgtggttttctggaagagaagggtagttgcagaaagctagatattctgccgtcacagaaacagaagtgtcttgcctgtatttaagacccgatttagatgccacatctccatgaactcttttgcagcacctgtgttactgagcaatatattatgcttgattttgccatgttataaaatatatttcctcctagtaggaaaaagaatgtctttaaagataggactattatttgtctttgaaactaccagagcttcccagtacagtaccatgcacttagtacatatttgagatgtactaatttaacaattaactaccacttaaaatttttttggtaatgttttagtgattctggtaaggcagatacattttatgcgggttcgagggggaataaaaatgtgtgtttgcgtagaagaagggggaggggaaacaatgagttttccaggattatggaactagtagtggtttctaggccatatttcattttcctgatcttccctgctaatgtcttgtgctagaaactatgctgtttatatctcatcatctctcctcaggtatagcaaacaaaagggaaaggaaagaactcatcacaattatagggcagcagcaggagggtggcagaagacttctgactcattaaaagtggcttccagccagaattctcagaagtttttgtagatgtttttgactcatatagggaaataaaatatccagctgtgttcagcctgacaatgaagttggggtctatttgtgctatgtgtcacctccattacattaagcacatagtttatgattgtaaatatttgaaatttatattcagagataaatacggatgcactgaagctgggggaaggaaatgaagaatgaatggggttaagagttgggctttattgggtgtaggtagtatggtagggggattttattgaggaatacttcagatttcctagctgttagatggagagtagcaccatagtgctgagaagcgggtgcccaactccaggggaatgttgaatggaagggcacagggtcaggtacagggactggaaataaagataaacaagttatgggtaagtagaccaacgcagtaagagtagattaaatcaccccgaggaaaaatccgatagagcaaactcagtactgtgagaggcaatctcttgttaaaaaacgtcactttgatctcataggattactgaaaccatatctttgcatgtcattttgaggttttataatgaatattatataaaacagttatatttatgagtaaacttggttaattttttcagctttgcttcaaacactggctacaaatgatgaacctcatagacttttttgatggagatgttaaaaaggctttcaag

SEQ ID NO: 48262 - DNA, 2395 bp, Homo sapiens
agctttaacaatctgacattttaaaagcttcaaatccagtacatctgaattgttaagttctgagggtacttcttagccctgaccttaattcctctgtgtatttgactttcttcctctgtgtatttgactttcttctatgacctccaaaatattctaccctggtttttttccgtctatcatttcttctctgtgtctatgcctcttccatagccctatacctaaatgttggtattactgaggtctatcctcaagccacttttttccttttctggtacagctctcattaggaaatgtagttgttcttctgagctacaaatcgcagaaccatttgcaacctctcctcactcaatggtttcctcttccttacttcctatagtgagttagtttagttcagtgaacatttgagtctggcttaaatctctcttcaagccagtcctttcttaacctcactgtcactgcctttggtcaggttgtgatcattccttttcttggcacttttggtcagcaaacattaattgagaatccactctattatgctgggcattaaggatacaaaaatgatttaagcttacatagaaataagggtgttaggcaaacaagtataagcaattatgttacttgacaatggaaatttgctctcatgttaaatattttgtaagacacatagtaatgcattagaaatgtagacaattttgcattatgaaaagcaagcctcagaatctagtgtgaggctgaatattgcaaagagccagcacaagacaggcagcagtaccacatggagggatacctttatgttactattagttctccctgtgtcatagcatgttgccttgtttcagcgtttgtgtcactctcttctctccagtgtttcataatcattactggaaagccaccaagagtgcaggactggattgtgtacacactttctatttctgtgaagttgtttgtatggaatattccttaatggaatcattatattagacatttgtataagaagtcaaatggggcagagttgctaatccattgtgaggtaggtcagggaggacttcatgaaagtgatctacttgagcggggacttgaaaccaatgggacataacaaggaggttgtatgaaagcactaaaccacatgttgtaactgtaagtaatttcttagctctggggtagaatagacaaaagcggcttcaatagaagaaatgaagccagaggggtaaatgaagctagaaagatcatgaaggattttgtgtgctaagctaaggaacatggacagttcagagctactgaaggagtttaatcagaggagtgacacagtcagatttatgttttagaaagaagttcctggcatcccggaatcctaacttcagcgaaccctgccctgctttctgtatactctatcaccagagtcagcttggtgaaacacaggctgatcttgtaaatctcagctcaacacttaagaacagatgcctaagtccgatttctatcgttactttgctgtctcctctatcttgaacatttttgcatcagacacccacatagctcacttcattttactcatgtctgtcctgaaacatcacatcagagagaccttcctaggctgtccaaaccagcatcacgtctgtcaccccttagtttcttaccttgctttatttttcttcttagcactcaccgccctaaaagttatatgtttatttgtttatttctccatcctccacctaggatgtaagctccatgacaacaggagcttttgtatattttgtttacctgtaagtgttctgtgctgggcacttgataggtgttcagcatttgttgaaagaatgtggccccaaccatccttcttcttttctctctttcaccctgtgcctctcccttcatgtgggggaattcttacagttcactaatccttagttatgcctcttcatgaaatcctgtccctcactcaagatccatctcagataccaccttttctgtaaaatcttttttcaagcagttgctgcttctgcttagctcccataacactttttgaatagttaggagaaaagtgtttacctgggctgtacaggatgtgatggatataaataaatacttgtcagcaagttattaattaaccagtagagaattacacaatgaggtagacaagcattataggtaaagtttgaaattcagttggttaagtggagaagtgaagtaattaggtgtgacttgaaatttgtttataaatgcaatatgattaggggaaaatagctaggggaaccatcaccaatttctattatatacacagttgtacagacaacctggagaaggtatctgttgatacatacataaacacacacacacacacacacacacacacacatcattttaccgatgtattaccttttttgtagaagtatttactttt

SEQ ID NO: 48263 - DNA, 2001 bp, Homo sapiens
agtggagttgtgatcgtgccactgcactcctccagcctgggtgacagagggatacctagtctcaaaaaaaaaaaaaaaaaaaaagtgtttcctattctttactcatggcttctcagccatgtagctaaattctggaacagctcatgtgtacagtcaatgacagtaagtccgcttacaatacactccacatcactttgagagagaatgttttactaacatttaactgacaaaaagaagagagaaagagcaattaatcaatcaggtatttgcctaaatgctgaacaaaagtgatctactaaaataaccacttgttcttagatctgttgtcttgctgttaagggaactctgaagtaaaacacatattaagtacttcaaaattcacttcttgttcacagattctctaacattgttaagatgtgacagcctgaaaacatgtcatgcagacactagttatttactgtactaatattaataactggaggccctggcacagggccagagtgaagggaccttttctatcctcttttttactgaaagggaggaaaaggcattctctcagttctaagctggaggtggcatccatcacctgccaatgaacaagatctgctgctacgcagctgccaacaccccttccattcacactcagctgatatttattgtacacctaccatgtgccagatactaatctaggcaccgccacataatttatctattttatttttacaataactcggtacatttgggcacaaatggagaatctaaggaaaagggtttggctaataatgccaagcctattttacagccctttgcgcttaaaaaaattttttaagagaatttgaatggattttaagtattcattatgttcattacattcattacttacttccttgcttgatttctttatgcaatagatgtccttgaagagtttggaagcaaattgcagttttgtaagttgactcacttttgaaatgttttagtgtggctccatgatatttatgactcatgcagcaaatttgcctaaacaaaacaacctttagtaagatgactagccactctatctgatttttaattctgaattttaacttagtggtttccttatagatgaacatatataacattttctcaagtcatcaataaaatctaagccaacagtagtttgcattttgacagcaatgaagtaaacttagatacttggtgtaggaataaatattaaccccaatagttcaaccaatcaaatgaaatgtacagctgtatgtcttgaatgacgtcaatgtttgtattagtttcctatggctactgtgacaaattaccataaactgaatggtttaaaacaatgagaattttttctcttatagttctggaagtcagaaatccaaaatcagtctccctgggctactgtcaaggtgctggcagggctggttccttctgggacgtgggaagaatctcttttcttgcctccatcagcttctcaggccatctgcattctgtggctcttgacctcattctcatgtcatcccaacctcttgcctctatctgctgtgagtcactctgatctcctgcctccctcctataaagactcttgtgattacattggcccaacccaacaacccaggataatctctcacctcaagatctgtaacttaatcacacgtgcaaagtctcttttacaaagcaaggtacccatattcactggttctgagaattaggacttggctgtctttaagaggccattattcatcctatgacaacactgaaacaaaactcaaactaaacttagtaaaggattggtacagagccaactaattacctaaatcagtttaagtaattaagaaatagacctggaaaaaatgcagcgagtgatgaattttaatccaatctgccaatacaaatctgggactttccatttttataagaaacgcagcagtgagatgaaaataatccttaaaacatcactgaaaggccctgtaattataacctgctccctggaaattaaaggaaaac

SEQ ID NO: 48264 - DNA, 674 bp, Homo sapiens
agctggtgagagaatttactaggtgctgaagcaatgagaactgacagctgatatacaggggaagagctccgtttcagtcacattgaatttgaggtgcctttaagaggaggtaatcaggaagaatttgcaacagttctttaaaccccggtggatatcagagctaatcatgtatccgtgggagttgtcagggtaaatctgatgactgatgccaagaacctcacataaggaggtcaggtggcatgagaagagatgatgagtgagaacacaagctgagaaagaacagtatttagaggatggactgaaggacaagtgggggagtttgaaaatgcggagctgtagaggtaaaggacactgagtatatctgctctggtcctttggggactttccacagcactagcttcaccttggttgcttgccaactgctgagacagtaagtccagattttagtatttgacccacgctgccttctccagatcatgctccttgatattacctctgaatttgctgaaagaaaaacatttccactcaaatatcacttgaacatgatttatgagtaaaatgaataatattttactataaaacatacagaggtgagtctcataacgatattcagggtggccccaagctatcttctttttttttatttttaaagttttcaaaatattttcaggcca

SEQ ID NO: 48265 - DNA, 2079 bp, Homo sapiens
acaaatggttcttgcaataagcgacagcggtattaagatgtatgttcaggatctcattggatagaggattaggaaaatttctttgttttaatgtttcttagtagacctttttagaaagaagggcagtgtgaaaataatatcctaagagctcataacggcaaatgccaaggtttgtgtggtgtgtgtgtgcgcgcacgtgtgtgtgtgtatgcatgcctgtgtaatattatgagataatacaagggagaagggtgattcatggaaagagtggacgaaggtttcgaaagctaccgagtgagaaaaggtctgatgagtatttatttaggaattatgatgtcactggtgaccttagcaggaatagaatctgtaaaatgctaggggcaaaacggggttacaggaaggtgaagagtagacagagacttccttttccaacagtattggcagagtaaatatcctgaaaatctatcctgctacaaagcacctaaaagtagtagatacaaaatgaaaaacacatttaaatgcatgcctgtgttggaaagagtaagggaaaccattggagttatcagaggctaaatgttctgggaaggaccaattcagagaattgtaagcagtgaaatcatctatgaattccaggggcctggggcttcagttgtgacacagatcaactcaggtcggcacaatgggagagttagattcaaattctggaacccataatgaattacatcttcagtgaaactgcaaattaggaaaaaaataaaaattaaaaacaacctgccctgaatgaagaaacaaataaaactggtgaattttttgagcatcttgtgagaatttataagtcggagctagtcctcaaatggccctaggttagggtctgtgatggttaattttgtgtgttaatttgactggattgagggatacttagatagctggtaaagcattatttctgggtgcatctgtgagggttttctggaagaaatcggcatttgaatcagtggactgagtaaggaaaatctgccttcagtgtggatgggcaccatcccatcagctgaggactagaatagaatgaaaatgcaaaggaaaagcaaatttgttctcctccttcaagctgagatacccttcttctcctgctcttggacattagaactccaggttctccagccattggactcaggcacttgcaccagcagttcctgggttctcaggcttttgaccttgtgctgagagtcataccatcagcttttccggttctccgtcttgcagatgaccttctcagatttcataattgtgtaagccaattctcctaataaatctctcttatatatctatccatccatccacccatccatcctattaatctctgtacaattctgactaatacaggattccctatctcaccgactgcattgtctgaaaaagactcctgccaccctagatttgaagcttccttaactgcctgacagaagcaaataattttctctagatgaatcaactgtcaacctcaaagaacttccatttataaagtcccaacattatcccagaatctaaaattacaaaatgaaagaagaaataggagtcaatttcagtagaaacaataaacaagagaatcagccctagataatgaactagttacatttatactacaaaactggtatttaaagttaaagaaaaagaataaagttggaaaagaaagtcacatacatgaatgaggaagaagtgactataaagatgactaggcagttctaataaaaactaaaaataggacattcagaaatgaaaattacagtacttaaaattaaaaattcaataggtatactgcttagcctattagacatgactgaagatagaatgacaaacctagactataaagctgaagtagttggctctaacagaacacagagaaacagagggagtataaaagcagtagagagacataaaaaatatttgtaagatacaacatatatccaaatcagaattccacaaagaaatatcagagaaatgaaagagagataatttcagagggaaaatgtctgagcaattccagaattccagatgacatgaatcttcagatttagaaagcaa

SEQ ID NO: 48266 - DNA, 1212 bp, Homo sapiens
ttctaaaatatatatttcagaaataaggaaaatgctttcagaaaaactgagttcaagaagaaagggtgagcgaaaataaagtggtaaatgtgagtaaatctaaacaaatgttaaatataatactcaataataatgtctaattttagagtatattaattttttattgctgtgtaacaaagtaccacaaatttagtggcttaaaacaatacaaatttattgaccttaagtttccatgtgtcatgagtctgggcacagtttaattgggttccctgatctggtctcacagcctgtgttctcacctggatggccactgaggaagaatccacttccaagctcattcaggttgttagcagaattaatttcctttaagctctacactgagggcccagactttttgctagctgtcagctgcaggcaggccaccccatcccatagaccttctcacagtatgacagctattttcttcaagccaccaaaaggatttctctccaggatgtatatgataagtaattattaaagtggcatcctatcacttctatcatataaaataacttaagggagtgatgtcccattgtctttgccgtatttcattggttagaagcagggcacaggttctgtccgcacttaagcagagaaaattgtgcaagggcgtgactcataggaggtcactttagggcgtgctcaccgcagagaaattggagaaacaaaaacaagactaagtcagaaaggtcatgctcagagttaaagcatgctaaagtccttgtaggaagtgcaaatagacacagattaattataaactgtattaagctggaaaggaaagtacaaaataagatggtaggaattaatcaaaatacatcagcaatcttaaagacacaaaacatttttaaataaaagggtaaaaaaatatattgtggctatattattatcagataaaatagaccttcaagtaaaaaagcataattcgagttagaggatgactacataatgacagagtaactctctaaattaccatctaccaaatttcacaattcaaaattgtatatagtaaatattagcagagattcctgaatcatcgtgtgtgcttttgagacacagtgcttggcaattcagaagttaaatagacaaaatcaaaaacgtatcttctcacaaaaaaacagtaatacataaaaaatgttaagaccacaacatacttgaactaattgctgtacgtag

SEQ ID NO: 48267 - DNA, 604 bp, Homo sapiens
aattttatactcttttaatgaattctttattttcctgttctgtttattttgaaatgaaaactcctaaaatatttttctctgtacacctagttgtacccagaggagacaagagatctagaaatatccttaatgcgtacctgaatattctttctatcccaatatgtacccagtttttaaaacatttttcccatatgtaagtgttattcaaaagttttcctagaaaagtcatattctgggcatgctatgtttttgctgaagtgtctaggctttgtttttgtcctgtcggggatatgacttgtgagttttcctttatctgtgagagaaagttgaccttttgtgctaattccatttcctggtgagtcagccttctttcttttgggcttgcctattgctcagtgccaactcttacattccactaattcagcacctgtcccttcttaaacaggttgttcaaacccccatgctagccccatctttgacccagtgacttctttgggtggccagttatttaatttttcaaagcctctgttttgacatgtgaaaaaaaataaaaataacattatcctagcagggcatattaaataatgcaaatgagggtagctac

SEQ ID NO: 48268 - DNA, 697 bp, Homo sapiens
atgaggtgaacattataattttgcaatatgaattggcactggcacagaagtgatttaaacaaccggctttacaaataaggagactctcatgtgtttaatgatttcttttttaaaaaaatgagaataagggctaaatgtaaaatttaggggcttttgctaagttggtttcattttaatctttccctttaccaaaataaactagtacaaagaaatgcaaatatttgagtatgtgctaaaataaacattgcatcaatcatgtttgaggaggtacagaggtaaggaggtcaaccgcctgactggaaatgatgggtggggacatgatagggaaaatacaagaagggaccttcacggccaaaacctcagggctccgctctcctgaaatcaaccatatgggagcctcaaagttcagaaatcactgccaacagactcctagcctaggaggaaaaactgagcttgaagctcagttgctgctcacagtagcccccaaagggtcccagttaacccctcatttattagtctaacaattttattatcttagctaatttacatattgtattttatgattgtatgttgctcttcaagctattatttttaaactcaattttattttctttaatcttcagtttctagttttcatcgttggctctctaacgtttatcatttgttattaattcttggcttttactttgccatttta

SEQ ID NO: 48269 - DNA, 2048 bp, Homo sapiens
gataggcctagccaataatacattctttgttcttatgttttctcaggttgatttggaagttaaccattcagtaaaactgagctgccaagttgtaacgaaagcaagtctcgtacaaaattctcccacacttacagttatataaacattcattaacaagcaggcaaaaaacaacctgtactgtagtttcactgaaatgccagcattgtccttttaagtgatcagccgccccaccaacataaaaaaataactgaaaccaattatgacagccttccagaagcagggcctagtaccctgatagttagctccagacaacttgaaaaattcataaatcaatgggtggccacaggaccatttagggatcaagccttgggcactattttaagggtatggtaaggcctcactggtttcttattccattggcatataaatatgcagaatgtctctaacatgtttttaaagaaatcatttctcctgaaaacttaaaattttgccaagcagtgaaattatcctaatttataagtcacccacttcaccaatacaagcaaatttctgctcaatctgctaatttccatacggattgctaattgaaacacaaaaaacagaagcacttctgttagcctcctgtggaatatggacttcctgatcagaactccagctggctttctttggacttctgtactattgattagcacttgggtaattgcttaacctaaagagatctgcataacctatataaagggagttataaacattgaataccagatgtttactcttcttccacatgattcctcttcttacccttgtattttctatgcattctgtatttctatggagatgactggaagttccgcacagttctggctctattcacagttcaggttacattcagcttaggtccatcaacacttattttggtaaatcacagcaaatgtcaaattcttcaaaccaaaagaaaatccccagtctgtacagagtgataattatttctttttatgaaaatttcttacatactctgctgaaaaagattatcctatttttatgtttttgatggtagtctagtgtttcataatctcaaacttatttcaacagccttacctcattgctcccagagccaaacaaggtcaatgagtagtcgttggcaagatactctgcattgtttacaatgccgcagctatttgcaatgatacctgcccatgtcgccatcaacctcaggctgcctgcatctttgccagcagccgtcagtggagagaggaactagtacttcaaaggtctcagtacggctcataaaagagcagggggttgacccaagccaagatgaagattgtatatttgtcagttatgtttgactattttgacaagctaatccatagaaactcaagataactgagaggaagtctacatttaatagccccagagaaggctacagataaatgtaaaagaaaactaaagatctccaggggaaaatacttagtatctcctccccatcgtagaagaaaaaagggaaacaagccaatagtaccacttatgatttaaagaactgaccacatataacaaaaatgttaaatatccagggaacaaaagtgaaaaactgaaggagggaaagaaaccaagcattcaaaagagatgatgagtaaggcggtgacaagctaaaggcactgcaagtctggggcacactgagtgtgagaagaaactctgaagggtttaacaggaaaccaggatttccaggaaactagaagccagttgaaaattgatgcacatttcaagccatttcaaacaagaaaagggcgaaattaaatatgggttcaaaggacaattatacatccaaaggccactgccccaacaacttggaaatccttatacacctagatgagagttcttttgcaattcctagatactaaaatgttatccaccccagtagccagtacctggctgcagagaacgtgaagctattatcagattttatgcttatacccaacctgtttcaaaaacaatataaggttccctacaacaataaaatattgcaacatgagaagagaaataattcaggc

SEQ ID NO: 48270 - DNA, 698 bp, Homo sapiens
cattcattgatgttgttcgagttgaacttgcattccttttatcataaagaacaaagacagtagtctctaataaacatcactaaatgggcctccagcatctacagaacagtgtctacttccaaagcaaaggatagtcaatgactaaggattgcaatgtaaatatcgaaattttctaaaaagagggctcccctaccccacaatactgagcgttcgctgcagggattaaggaaggttggcatacatggagaatggatcttccctattatgcatgtccccctcgccaagccattggcctagctgctcaggattgtttgaaaacttaggattccaggtggaattcgcccctagtcaatttggaacaagtaaacagaaaaccaacattcctgtggtactctgcttaacaaatatactcaacaggagtgtttgtgtgtgaagaatgtggaaagaaaataagcaatagtcacttaggaaacatatggttctgaaaaacacaggaaccattccatttccccacatttaccaggcctcaaatgtacacacacacacacacacacacacacacacacacacacacatatatatatttccagagaaatctttagttggtaataaggccatttgaagaagcaggcccgaatgaaggaggtcccattcctgacttgcaggagatccttgggactcacagttagacccggtag

SEQ ID NO: 48271 - DNA, 1097 bp, Homo sapiens
catttagcaaatgaacgaataaatgaataaccctattgctctgaaaagcaagagaataaatatttcagggactactaaaacacttttagcacttaaaaaaattcagtgaaattaatcaatgcccatgtaatggactctcagtgtgtgttagtactttgtggccctgttgttggcataaaatagctgctcccttaatccaatatgcactgtaaatattacgtgtactttatgctatctacaggtcggtttaggaaatcacgcagaagaatctggtcattagccaggatgtatggcacgagatttatggctgagacaggtgaatctgaccattttattcgacataaattaccagcttcagctgtaagcaaaccacttatctatgttgaatagctaatggacagtttataggatatcttcttgtttcccattctgtgctgtgctatgtaatgccagcaccttcacaccagcaagttggatcatgtggttcatatcggatgacttccttgctatgatttaggtgtggtttccaaataatatagttccagaatatggcttgactccaaagactgagaccagcctgatcacacatctttaccatatcccttattagaagcaaaaatgaaccctcaacagtgatcatttcaaaagtttgatttgaataaaagagaaatgggtgggactaaattcttcaacactaatcctattttacctcccgggattctgtgggtgtttgggcagtaatgtaataacaaatatgctgatatgtgtctgaaaagaatgttacatgaccatgagtcattatgcccattgcttcaaggctgtttaggtagctggcaggaagtagtatgtgtctccagagcataaaattggccgcaaagtaggtagggcctatgaaaatactgatgtaatgtaaacattgtatttctaaactatttacaaggtcatccctaccctacatgagaggtcagctctaccactaagaggtcccacatggacttctacaatattctttgggttttggcacttttgcagcacagctcacttctgaagtgtgtgggaaaggccgaataaagtcatcaaaagaacccttgatttag

SEQ ID NO: 48272 - DNA, 718 bp, Homo sapiens
atttgtattcccttttcgattagcaacaagaacagaagaaccaattttgcagaaagttgccattctgcagaaaattgatgtgaacttagcagacaaaggtaaagaaaatagaagtaaaggtaactctggtcacggagaacaaattcccgatcacagcaagcatactgaaagccgaggctaaaccaaccttgcaaatctagataaacagtaaatctgggaccaaagggcttttaactgctgaactttatctgatatgccagcaaatgtacacagaaactgaaagaaaaggctggaaggcattcattttgagatcagacctagatcaactgagcggtcataggtcctcaggcttcattctatcagcagcaaacagaaagcctatagttacctgggaaaaggagcttgtgacaaaataattgtccagaggtcatgctcattcacagtttttcctgtttttcctggaggagctagcactctcttgccctccaagggaaagcagcttatgacatattattttggtatattagcttagataaaagaacatacagacaataaaataatagaaatgaatgacatatcagaaccaaggaaatgagaaggaaacttatatgccagcttccagggttaatgcattccctgtaaatgggcacaattttgagtccaagtcttttggcagttggggcaaaaaggtaaacataattatttacataactcccat

SEQ ID NO: 48273 - DNA, 425 bp, Homo sapiens
ttactccacagctagtcttggacttactagagaaaagggacactgattgagtccctagaacctaaagcctagggaataaaaggaggcaaggagcaggggtccttccaaagtcagagctgcattgctgggaactgctttatcaattggcccaggcagcccaaccctcggtacaagaggcataggaggactcccttgcctctctttgtacctctcagttaggtttaccaatagctcagacattgttgatctgtgttgtcattcccatttatcactacagtgtgagtcattgttttcccatactgcttctttgaagaagcaatagatgtgatccacacccattttacactggtcagcagcactggaattgaggaacaaccaaggacagttacacaacaaaatttttggtaacacaggcctaatatctg

SEQ ID NO: 48274 - DNA, 1601 bp, Homo sapiens
aggagaaaggagaggaggggagggacaagctggtgtcctttggcccattacgtgcctttaggtttccagtggttctcaggcttgctactcattggaattacctggggagctttgaaaaccctggtatccagggacaggacccagacattagtatgtttttaagctttccaggtgatcccaatgtgcaaccaaatttagaactttaatacaactgcctagcctaggatcactcctggaatgtcctgggagggcattctccagacccggttatcacggacccctggagagggtcaatggtcatcacagagtgcagggaaattccctgaccttgtctcgttaagcagtgcaagcagcagcagtttcacagggcacatgacccccatggcagccaaaaagggaattagccacttcagcggagacgttgcttaaggcaaaggaatttccccttgtgctcctcatttgcccaaacagaacacacggtttactcatccattctgaagaaagattttgagttctcaaggatgtagtcattgttctataaagccttacaatttaaagtgtgagcccaaaacaggagttttgtcatctttgggaagcttggtgtgaattcagaatctctggttctaccctagacctgcccaaaactgtgtaaatactgctggactggatggaacacaggatgtattagaatatttttcctgtatttaaatgtacacaagaaaggaagacatgctcatggattgacacatcttgagaaagacttgggagaaaaagacaaaacaaatgtgtcaaaaagagagaatgtaatacacaaccttgcttcatttgaaactgatttttgttgtttgtttttgtttcgttttgttttttacttaccaccaggaaatagctaaattgagtaagaacatcttaaaacttaagggagaaaaactgagtgatcaaccaaaacctcaagaggaaataattaagaatttctggggggaaaatagtgatagtctgtgaatgaggaccctaccgtattagcgcaataattaatgagcctaaaagacactggttaccatatgactttccctaagcctcaatttctttaggtgtaaaacaatacatttaaatgaataatcattgtggtctcttcttgctcaaaattttaccatttgaagatccttgacattgaatcaaatatccaaacccaaatgaaaataattgtgcacagttttaaggattattttaccactaggtggcaatgttgattaaaaaatgtgagaaaccaatgtaaacatcattttattgtattttgtggctgacctaaatctgttttccaaggttcgggacatcaaaaaattgaagaattgcactactatgcactcgagaccaagaactgaaacgtagatttggaaaatattcagtaaagggacaactggaaaggaaagaaaagcagctgcctgaggttgacagagacagtgaaacgcagcaggccaagcatagaagctcacgggatgaatgaccagggaggaaattcagtaaacctgggtagccaaaggattccagatgctggtaatgtccccaaggagattgctggcccttcatccatgcttggtacc

SEQ ID NO: 48275 - DNA, 517 bp, Homo sapiens
ttagaaaactgtcacgttatttgcataacaattctagggttaacattaaataagctgggcaaggtggctcatgcctgtaaccccagcacttttggagattgaggcgggaaaattgccccagccaggaatacaagaccagcccgggcaacaaagcaaaaccccatctctacaaaaaaatttaaaacattagccaggcacagtggcatgcacctgtagtcctagctactcagcaggctgaggcaggatgatccctcgagcccaggagttcaaagttacagtgagctatgattgcatcactgcactccagcctgggtgacagaacaagatcctgtctcaaaacaaacaaaacattaaataaaaatggtacgaaataaagtacataaaataatccaaacaaaaacattcaagtgttatatggaagccccaaacaaaacactgctttcacaactgctaatataacaacattctagcttggttccttcaatggaacaagttttgacatactgagttcattagc

SEQ ID NO: 48276 - DNA, 2522 bp, Homo sapiens
aaatgaacttcaaacaactaaaaatacgtactgtagaagttacaatcaaccagtaagtatttatcatatgccaggctctgtgcttagattaagtacaaacagcaaagtataaagttcctcaaagttagtcacgttccaaggacctgaaatttcaggcaagtacgtgctttaccatcacttttcacaaaataaaagccactcacctacaaatgtttgtatttcctttttggcccatgtaggaatacttcccattgcccactaaaactgtttcctattcagttcagcccataaaaatgcccaatccggtcagttcctcacgtcaggatcctcacagtacttaaagtgaaaggcttcgaaaaaggtatttcatcaaatcacaaggttcagtattttatgttcagtgacacctacacctgcagatactacaacacataactgggctaacctgggtcaagtacctagttgcaccgatttagttcttccccttaaagtgttgctagtaaaggcaaactctacttcttcaaaaagtcggctttttgcaatgcccattaggcactagaaaagggaaattgattggttcgtcatagttgccctacttccatttcaggtccaaagaaaaaaactattccatagggagtaacaagggggccacacgcaaatcaaggtggcagatgctaaactgaactttgtgatgaccacgatttaaccgaaaaggtgatggatgtgggggagggggatgacccaactgagccatacatgtgcagcttgagataaaaaagtccacttcatgaagcagtcaaagtagagggtgggaaacaaaccggtcgggccgagcaacaaccccagggtgctgaccgagctcggaggcggagggccctggagcccagggaccagagaaaggagacctagggcaaaccataggatcacaagaaccagcagtaacgtggaaaggccaacgctgccacagagtagcgtgtaaggggacacgaagaagggagcgatgagttagaagggagtgacagcaggagggagaccagtgccaggggcgagtggcaagtggcaactgcgaaaggcgaggcactggcagccggaggtggtgggactctgttgagtcagcacagctcctactctgagggcacttgtaggatccccgctgctcctcgggccctggagcccacggcgaagggtcaggcccaccttccgtacagatgatgttctctgacgggctggcgccggccccttccccatttcacaggtaaacactggccaccgtcgccgcttacctcagttaacattattacaccccggggaagtgaggtcctccctagcctcgcctcatggcaacagccgtagcagcagcgaaaactgctcgggccgccgccaacggcggcaactgctccttcagtcttctcccgggcggcggttttactcggcttcgctggcctcccctcggcccggtcgctcgcgacggacgcgccgccatcttggaagagcgacgtccgcgtctcgctgcaacgtgcgttcccattggcgggcgcaggggctgctggcgtctcgtgaccgtctccatagcgccggcgcgcggagaagcggaggtaggctgtcggcagtcggcttggcgctgacttgtaggaccccgggaccgggcgcctgggccaacttgggaccgctgggagtgcagaggggccccagcgcccgagccttccgggaatggacgtgcgcgcccttggggccggcgcatcatccaccgcccactagcgttggcccgccctggggagaggagaaaatgccagaggccgacacttgactgatggcgctgcggacctcgctggtcttggggacaaggcggcagatttcctttagaaaaacttccctctcgcgtctccctggccccgcggcgaccgaagagttggggttcggctttcttctcctgggatttaagtgttatttgaaacagctccctgcgcggcccttttctcctaaactttgacagaaacttccctttgtccctaccaatcctcagtgagttctttacaggggtccgagacaggttgtagatatgatgcggcttatcggctttaccccgatcctagcggagttaggacttgctgatgtaattggccagcacctgcctaacaatgaaggtttagttatgctacaagtaatgcacctctaaaaaaacgtaaaacaggctttacgttttacctgctatctccacaggtttactagctgcttaatacaatatgcttgtatatcaaggtgagcaaatttcagcaaatgtcattgtaaatagtcccaacttaaatggaattgaactctggaactcaatgtgcatagaagtccctgagactgacgccattctagatctaccactagatggtttgcgatgtacggaattaaaggcagtcacttctacctgaattgtgatgaaagtagtttacctgaacatgctgggaaagtgtgctaccctgttttgtattagaaaccagtttccaagtaaattgaaaagcaaattttcagac

SEQ ID NO: 48277 - DNA, 582 bp, Homo sapiens
catatggttataggaaaaatcagaatttccataaatttctgctattcctcagaaataacaggtcaaaatccttcctgagaacccccatctcttcactgattttgaggttatatcttattcttttccttggtgacaatacaaataggggatccacatggctctgtatgtgtgtttttaaaaattgtccactgagaagcatttcgtgcccagaaagctcctgaaagcatcatctcgggcagggaggaatttgctccaccagctggtgggtgttttgcaatcatcgagcactggttataggtcatggccaagtcactcacatgtgatcattggtcaatggtaaataaaataaagtgtagaaccagcagattacattgaaaagttttatttgtgtgatcaaaaaaataaataaaataaaacaggaatgtagggaaatcctttctaactatgactcaaaatctagaagcattaagagaaaatattttactttgcagctcttattgccaaagggatttttatccagtggaaggctgacttcaccagagcaagaaaaatcagccagaggcatctgggatgaatcttgca

SEQ ID NO: 48278 - DNA, 1894 bp, Homo sapiens
acctgtaaagggtatctttctaaaaaaagtagattttccttcaacgtttaatttggtctaagtcaagtagaacagaagcacagttaaaatagattaggaatggtctggatctatttcaatattgttacctctgctttgtggaaaggatggggaagcatttagcagtaggtaggtaagggaactggagaaaggctgttagctatgattttctctgtttttcatagagatcgtgaaccaagtgcctctctcttgtattcatattattaacttgaagtgaaggctcttttagaacttgttccctttccttgttcctaaggttcacccttgtccctcatctcacctgccctgtcaattgtgcttaacatttcttacccaagcagtatgagtcattgctagtagttcagtgaagcaaacagtttctctttctcagaaacccaaaagaaggggagcagagtatcttcgccagctgaagttagaagtcttagaacattttctcataaacacaatattgcacactttttaaaggagtatgaaatacagtattcatcacacaggcatttactgtgtacctacaacgtgccaggtatttaattcaggtagatcatgggtcaaatcacacctttgttaggcggctggagaatcataacttcccaagaaaatatttagcatacatagcatacacagtcgtcgttgggttagcaactggctagattcgtgacatgttgttacaaaaaaatagttgtataaggaagtatttcatgaaggtgacacatctattttttaaaaagggagaaacagctaagagctatttttcctcacacattatgctttgtgaatagggaacaatggtggatacacagagtaggttggacaaacatttttgagggactgacacattatctcacatgcttgatgcctcatggggttttccctcaacattccaattggtctaagtcaaagcacaattagaatagagcaggaagtgttctggagctattttaatctccacttaacttctgccttgtggaaggggtggggaagcctttatcaatgggtaggtgggagaaccaggggaagactgtcagctacgattttctctagcctcaagaagactgagaccgagccaaactcctggccaacgtgctttgtggattcacagtgtagcttgagaaaaatggttagtggtgacttgttttttcccccgagtgattatctcattcaatcagtatttattgagtccttgaaagctgtattttttaaatgaggctgcttgtttatctgtttttgttgttgttgatttcttagtctaagaattaccaggtatttccttcttctgagataccttaatgctctattccaactggtcatcactggggaaaattctcttacaagcccaatgcaaatgttacctaatgtctgacaccatcactgatttcccctcacctctgtaatattaatacttccctaattacgtgtattttttttctctttctcccttctctctcgatcctcatagtccttttattactctctttagaacatttccactttctgtcttacactgtgactgtgtatgtgtgtcctcatccccccaattagttatattataagctccaagaggaaaaggatcatgttttacttctatttttattccctacagtacctagcatataattgatccctgagactatttttagataaatgaatgattaaagagtacagtgttattgcacaatgtgtttttatacatttggtatttttaaaaaatgatttcttcttttatgaagaaaattactcctcagtttctttgtagatttgaaaaatgtagacatttttgaggtgttagagctttttgcccccaaattaaaattattcattatagaatgtaagcagg

SEQ ID NO: 48279 - DNA, 1277 bp, Homo sapiens
ggctcactagttcgactgaataaatcttcttaaaaacaacaaaatcccgctaaactaatggcattttcataatccccagatcaggtccaagagaagagaaaatggggaaattaccagagcgaaatccaacaacaaaaaaggtccttcatgttttacaaatagaacggttgtactaatgcttcgtatgctatcttctatggaatgagaatctactcaagcactgcaaaccagatttttatcgtcaaatgagaaagcatcatccgtaaggggataaatgaaacgttgaatgccaaacagaactgggcctactaggtctccagatccctggtcttttcctacccctacaccagggttctggagcaagaatctccactccctccgcccacacctgaacttcatctttaagttttcttctctatctatgaaagggaccctgtatagatctttaccagagcggtactggccttgagggacggatcgcgactctagaaatccagggggctaagctctggggggcaatgcgacctttgccatttgcccctttctgctgcgtcgtcagcacatccacctgctttacttcccgtgcacaaaagaaggaacaggcaaagagatcggtacctctcagaatagcgaaggagctccgcatcaagctgttctcgaatgccggtgcgtttcctgttaaggtagcggggcgacagcgcgatgtgcctttggtgcggcccggccaccaggcatgagtagcgactgttcaccagcgcacaagcagcggcataagtcggcaactctaggcaaggcaggacgccagcctgccctaccagagacccatcagaagccgccgctggccgcggcgcctctgagcaacctgcagccatgctgcttgtcaaggttcccacggcgcgcgccgttgacgcaagcacaatcccatgtccccggcgctcgttttacgccatccaccaacgaccacgcccctaggaatttcccctcttttcgctgcattacgcagccctgaccagcagggggaaccgcgttttcgcgcttcgagaacgggagcttagagcctcggaaatgcattgagcacgcaggaaagccaaccgactgctcttttaagggcaggcaaatgtgtgttttcgcacagaggcttattggattaagtaggtagcttaaaaatgggggttctcactttgatcatttccagtagtgaggtgggtttggtagaattttacaggcttggactgtacaataaaaaatcaaaatatttatggagtatattttatgca

SEQ ID NO: 48280 - DNA, 933 bp, Homo sapiens
atggttgttgtaaacatgcagtctctgttaccctttgtaatgcttacaaaaaaagtcatttaaattgtggtatttttgtaaagtgcacctatagcaaatgacagagccagtctgaattataaatccatttaagcactcaatcatcaaaattagtaatgctgagaaatggggcacgttgaagaaataggctagatttagaatgagttagataagatgatatgacttaaaaggaagagtgactcaggaccacaaagttaggtttactcttaggctaactcaaccaccaaagggtatactatttgccacctaagaattgggtacgtttatgctcttaccgcattgattttcaaccaagccatgggtcacttaacaacatctggacacatttctggttgtcacaactgaaaggaggtgctattggcatttagcgggtagatgccaaagatgttactaaacatcctgcaatcacaggacagctcacacagcaaagaattatttgccccaaagtgtcaatagtgtcatggttgagaaatcctgctttacaggaattctcaggaagtattttttttatattgggcaatgttgttattaactgaaaaggcaccttggttactgtggttttaactggaaaattacatttagttggattattaccatgttgaaatattaatgacttggtgacataataaaaataacactacaaacatttttaagagtcattaattataaagagtttaggaagttaccaaaacccttacagctgatatttagtactgcatgttccagtttgctaatgctacaatataacatctgataaaactctaattatgaaacagttttacaataaaatttcatatgagcatttcactgttattatttttcacacaataagcccattttctttttaggtgaagtattaattataaattaact

SEQ ID NO: 48281 - DNA, 1451 bp, Homo sapiens
cgctattcaaaatagccaagatagggaatcaacctaaatgtcaatcaatgaatgaatggattattaaaaaatgtggtatgtatgtaaacaatgtaatactactcagccataataataaacaaaattctgacatttggaataacatggataaacctagaagtgccatttttcttagtgattacatgtcaaagggattgcttctagcagcttgggaggaatatttctgggatgtggaagatttggatctcaagagggcagaaacagttttctcttgcaagttatctaaaattagtgctctttaaaaagaaacgctatgagcctatagtcaggaagaaacgtgtccaaaatttagtcaacttgaggggaattttaaggccatcctggtcatatctcaaacttcaaatgaccaaaaatgaattattgattttcttctaccctcaaacttgtccattccccagtatttgtcaactcagttgcaattgtattcttccagttatttgggtcaaaaaccttagggtcaacattgatgctttctactttccctctgtctccccccaacaccacccccccccccccccgacatccaattcctctgtaatctttatctagcttccagccttcatcaggcttttcactccaccctagcccagggcagcaaaattgtccaatggattattaagttactttcctaactattctttctagtttcactctttctcgtcctgcagtctactatttagactgccaagtttctattccactcaaatccaaagctgttatcttggcttaaaaagctcaatatcttcttcctcctgttttctccttactttaatctcgaactttgcccccacattctagactctgtgcatatttgcctttctgagtcacatgtgcctccttattgtccctcatacattccaatcatgtctttgcctccaggatttatgacttgctttcttcattgtttgaaacactcctcatacagatatcaacatgtctttctttcttctttcttctgtcaggtctcggctcccatgtcaaatgttatcacctattttagtctttccctaagctcatgtaatattacaatattacaaccctgtttttttctccttagttcttatcaccacttgatgtattattgtgtttgcttaactatttattttgtctctccaattagaatgtatgttctttgagagccaggacttcttatatgttgtttactagagaaagtctgccaggaacagagtaagcaataagtatttgtaaaataaatgaataaattttctgccttagattgatggttacaaatggctactgactcccattaaagcacttcacaatcttcagtgaatcagtgctatacccttttttattctttcagccccagtctttgttaccttcagtgatttaatcatcaacatatttgattatcttggctgcacagataa
